United States Patent Application Publication US 2011/0183924 A1 - sequence listing, part 234

SEQ ID NO: 629543 - DNA, 280 bp, Homo sapiens
gtggtgatggaacaattcccggtggttatagcaatcctctaggcagagctggtattaggacaaagactcatacaatatggtataaacctgtgagagaggatgaagaaagtaatacaggcattgtgtatgcatggtaaaatgaggaagagcccaatacagctccaactgagaacttcccctaagaaatgcaaaacaagcatgatggagttataggcactgatggacgtgtgcccactcagtatacaaatcctttagcaagtttacctacattcctcatcac

SEQ ID NO: 629544 - DNA, 159 bp, Homo sapiens
cgaggggtggagtgggggaatgataaacacacaaaaacaacaaacacaaagcgtatatgtcctctacacgaggatcttattctattagtaggaaaacacatctacataaaatgatattagagaaacacggctattgaaaccatatattcttcatcccct

SEQ ID NO: 629545 - DNA, 285 bp, Homo sapiens
gctctgtctctggaatgcctcgtcgttactcggacatacctcgatgcatacactatatgaaatatcctatcatctgtatgctcattcatttctctaactgtagtattattattaattttcatgatttgataagccttcgcttcgaagcgaatagtcctattagtagaagaaccctctataaatctgtagtgactatatggatgccccccattctactacacattcgaagatcctgtatatattaaatctagtcaaaaaagtcatgtaggtcatggggttggcttg

SEQ ID NO: 629546 - DNA, 324 bp, Homo sapiens
tggggcttggctgagtcaccagcactgtaacttctttcatgaattcccactgatcacaagaccccacaccaccatctcactgacaccatgttcaaccatgtcttttacttaacaaattccaggaactgttcttaggaaactccaagtatcaaaccaaggttgtggagtattccacctcaggaaggaatgctgaacaactgatttacagacttgttgccccagctagaccaccaggtagcccattactcaaggtaaccattacaaccaaatagtgcttacctgcataccctacccctcacatgctttgccaagccccagctgcgg

SEQ ID NO: 629547 - DNA, 497 bp, Homo sapiens
cgcgaggggcacagacacatcacgctgaatgcaatttaccgaagattggttcgaggaggatgtctcaacatggctttgtgcagccgatttaaaagatcttgtaggtatttatcaagatgaataacattgatggaaaagaactgttgaatcttacaaaagaaagtctggctaatgatttgacacattgaatctctaggactgcgtagtaagagtgctgaggaaaattgaagagctcagggaccaaggttaaatccctttcttcaggaattcctgatagaatttataatttccgataactagagaacttatgacaagaatccggtacatcgcatcagatgggctattcatattaaaaggaagcaatgaaagattggatcagccaaaagaaacgtacaaatcgcatgacggatcttgttctacctatcagcggtacttacaccagataggactcttaaaataggcatcaatagattgctggagacacaccaaaagtaaca

SEQ ID NO: 629548 - DNA, 300 bp, Homo sapiens
ggtgcagaggtgtgccctcatctcaaaaggtatattccgtgtcagtggtgtcccctaaagttattcagtggaaggccctttgggaagcaggggcgggaagatcacttgagcccaggagttcagacccaacctggggggcaacatggagaacccccatttttacaaaaaatataaaaattagtcccagctactcgaaaaactgaggtgggaggatcccctgagcctggggaagttgaggctgcagtgagttgagttcttgtccctgccctccagcctgggcaagggtgagaccctgtttca

SEQ ID NO: 629549 - DNA, 887 bp, Homo sapiens
agcggaggtgatggcgcccaccgcggcctagaggtccagcgcccgccgcgagcagcggacagtcctcctgttgtgtccgaccgagagtcctggtgactttgaacatgctggtgccgctagccaagctgtcctgcctgggtgagaggaaacgggcggtggggataagtggaggagttagggcaaaagggacaaggccggtcctgggggctgtaggcacctctcgccccttctctcatcagctttctcaggctatctagggcaaaggtcacgcgctgtcagcctgttgggggaccctggcttcctccctctggggttgccccagttggtagaattaatatctaggctaaaggtcaagggcggggaaaacttgtcaacacgccctcggcatcaccaccacctgtcaacacacacacacctcggtggactcctgaactgaggcttcccaaatcctggttctaatcttcaaacctctgttggaaatggaaaaaaaaaaatcgtatttgcccagtttttctccctggtcctgacctgactttcgtcttcggagccattctagttcagtctaaagaaattgaagtctgatctgtcacatcatggttaacattcatatgttggccaagtcacccaagtgtatctggagccagtttttctgcgttgtctaaaattaagggctgggattataggcgtgagccaccaatgcctgggccccaggtgctatagtttaagatatgcgtaagtaagttcatttcttttgcccactttaaaaaaattgaccaaacacagattttattgccctttcacagaaaattctctgaaaagcattaatctttagtagacccatgtgtcaagggacgattctaaaattagggtcaacgaatattgtttac

SEQ ID NO: 629550 - DNA, 473 bp, Homo sapiens
  misc_feature (197)..(197): n is a, c, g, or t
tgtcgaggtaccaacaggtggtggaagggtggggtgtagtgggagtggggagtcgctggtgagaggacaggctcatggacaactgtgttagggcagtgacctgtgggtttgcaggttttaggccccgggtgtggtctcagggacttggggtgctgttgagttgctgtagcttttccacatgtgggggtgcaagctgnttggtgggtctatgaatctggctctgcctctggagcaggtttctgcctggaaacagtgggaggtgaaggtgggggttgcggggggcagatccttcagcagtggttaagcaccaatcttctggatgctgaccttgtgatactgagttctcatgagatctggttgtataacagggtgggcacctctttcctctctcagtcttgcttctagtgctgccacatgaagcatttccttgcacctttggccttctggtatgattgggaggctcctgagtcctc

SEQ ID NO: 629551 - DNA, 852 bp, Homo sapiens
acactcacacactctctctatatagatgttcaatagaaaacacacacactctctctataggtgttcaatagaaaacacacacacacactctacaggtgttcaatagaaaaaacacacacacacactcacactctctcttcctgtaaatagaaatctgtcgatatatgatgggcccgagcagcgattctgtcctgcaggagtttatgaatttgtacctgtggaacaaggtgatggatttcggttacagataaatgctcagaactgtgtacattgtaaaacatgtgatattaaagatccaagtcagaatattaactgggtggtacctgaaggtggaggaggacctgcttacaatggaatgtaaactgcagctagccagtttctttcaagtatggcaagctaacgttaaaatgtttagagattaacagatttcagaatgtctttctgcatattactgaacagaatagtcacaaaatgattatcaaataaaaattttatcctatatgtaagattgtcccataaacgaaattacggggtaatgcttttaaataacctttataacgaatgcagcatcttcctacctcttcagattcttcagagaattcagtaccaagaagcaaaattcactactggacctttacattttgacttgccaaaagtttagtaatccacttatcaccatggagtatatattcttagactaaaggttttattgggaacaccaggcatatccgtgggttaccatttgtctatgagcaattctgaattcaccgtgccgggaatggggtgacacttccgggcacaaaggctcaagccttctgactgggcctggacaaacgttggccatcctgaaag

SEQ ID NO: 629552 - DNA, 202 bp, Homo sapiens
gcctgaaactcctaaaaccaattggaccaatctatcaaccctatagagactaatgttagtataaggtaacaatgaaacattctcctcccaatagcctccgtcaagattaaacactaacctacaattacaagccaatatctcaatcacccacaaggtcatataccctactgtcaacccacaaaggcatgctcataggaagggt

SEQ ID NO: 629553 - DNA, 242 bp, Homo sapiens
ggcttccttaaaaacactgatggaatctaacaaacttgagacaattcgttatcttgcagatctgcaatggtgtatcttagcttcgtcaattacgctttgcagaacctatagtattactgtgaagtacgtagggatagttcatcttgttgtaagagctggattacaggacaccgcagccgggataatgaaatccacctgaatcccatagcatgaaagcctctggcagagatctacacacgatt

SEQ ID NO: 629554 - DNA, 2681 bp, Homo sapiens
aaaagcagctggtacggtcgggggttaggatccgcgctgtggctgtttcaccgctccccggctgggacttggagtcccttatctttccctggtttggtacatgaccctggaagcctcggctggccgttgcgtcatccatggcgccggcgcagagcgagaaggaggtgggaacgccgtgaagcaagagcggtcggcagagcggggaggcgaactgcagcagagttcttgctttccggcaggtgatggcgccccccgcggcctagaggtccagcgcccgccgcgagcagcggacagtcctcctgttgtgtccgaccgagagtcctggtgactttgaacatgctggtgccgctagccaagctgtcctgcctggcatatcagtgctttcatgccttaaaaattaagaaaaattatctacctctatgtgctataagatggtcttcaacttctactgtgcctcgaattactacccattatactatttatccccgggataaggacaagagatgggaaggagtgaacatggaaaggtttgcagaagaagcagatgttgtaatagttggtgcaggccctgcagggctctctgcagctgttcgtctaaaacagttggctgtggcacatgaaaaggacatccgtgtgtgtctagtggagaaagctgcccagataggagctcatactctctcaggggcttgccttgatccaggtgcttttaaagaactcttcccagactggaaagagaagggggctccacttaacactcctgtaacagaagacagatttggaattttaacagagaaatacagaattcctgtgccaattcttccagggcttccaatgaataatcatggcaattacattgtacgcttgggacatttagtgagctggatgggcgaacaagcagaagcccttggtgttgaagtataccctggttatgcagctgctgaggtcctttttcatgatgatggtagtgtaaaaggaattgccactaacgatgtagggatacaaaaggatggtgcaccaaaggcaacatttgagagaggactggaactacatgctaaagtcacaatttttgcagaaggttgccatggacatctagccaagcaactatataagaagtttgatttgagagcaaattgtgaacctcaaacctacgggattggactgaaggagttatgggttattgatgaaaagaactggaaacctgggagagtagatcacactgttggttggcccttggacagacatacctatggaggatctttcctctatcatttgaatgaaggtgaacccctagtagctcttggtcttgtggttggtctagactatcagaatccatacctgagtccatttagagagttccaaaggtggaaacaccatcctagcattcggccaaccttggaaggtggaaaaaggattgcatacggagccagagctctcaatgaaggtggctttcagtctataccaaaactcacctttcctggtggtttactaattggttgtagtcctggttttatgaatgttcccaagatcaaaggtactcacacagcaatgaaaagtggaattttagcagcagaatctatttttaatcaactaactagtgaaaatctccaatcaaagacaataggactccatgtaactgaatatgaggacaatttgaagaactcatgggtatggaaagagctatattctgttagaaatataagaccgtcctgccacggagtactgggtgtatatggagggatgatttacactggaatcttttactggatattgagaggaatggagccgtggactctgaaacataaaggttctgactttgaacggctcaagccagccaaggattgcacacctattgagtatccaaaacccgatggacagatcagttttgacctcttgtcatctgtggctctgagtggtactaatcatgaacatgaccagccggcacacttaaccttaagggatgacagtatacctgtaaatagaaatctgtcgatatatgatgggcccgagcagcgattctgtcctgcaggagtttatgaatttgtacctgtggaacaaggtgatggatttcggttacagataaatgctcagaactgtgtacattgtaaaacatgtgatattaaagatccaagtcagaatattaactgggtggtacctgaaggtggaggaggacctgcttacaatggaatgtaaactgcagctagccagtttctttcaagtatggcaagctaacgttaaaatgtttagagattaacagatttcagaatgtctttctgcatattactgaacagaatagtcacaaaatgattatcaaataaaaattttatcctatatgtaagattgtcccataaacgaaattacggggtaatgcttttaaataacctttataacgaatgcagcatcttcctacctcttcagattcttcagagaattcagtaccaagaagcaaaattcactactggacctttacattttgacttgccaaaagtttagtaatccacttatcaccatggagtatatattcttagactaaaggttttattgggaacaccaggcatatccgtgggttaccatttgtctatgagcaattctgaattcaccgtgccgggaatggggtgacacttccgggcacaaaggctcaagccttctgactgggcctggacaaacgttggccatcctgaaag

SEQ ID NO: 629555 - DNA, 367 bp, Homo sapiens
  misc_feature (66)..(66): n is a, c, g, or t
  misc_feature (121)..(121): n is a, c, g, or t
  misc_feature (158)..(158): n is a, c, g, or t
  misc_feature (361)..(361): n is a, c, g, or t
tagaggatcccagacgtccattctgcaattgtctgatttctaattttctgccaccactacgcctgnactcctccaggcaaggactgtgtttattcagctttacatttccactatgcttagnacaaagtagatgttcatgaaatgcttgatgagtgatnggatggttgaaggaatgcatgaatgtatggataattggatggatggatggatggatggatggatggatggatggatgactggatgggtggacgattaggtagatgagtggatggatggatggatgggtgataggatagatggatagataattggaaggatagatgaataaataattgggtggatagatagatgatgaatgatnggatgg

SEQ ID NO: 629556 - DNA, 266 bp, Homo sapiens
cccctttttttttttaaaatttgggccccccttttttgaaaaggttttggggcccttaaaaaagcccctttcccaagggaaaaagggtttttaaaaaccccccttttttggggggggggggccccccccccccccccccccctttgggggggggggccccgcccggggggggcccggaaaaaattttttttttttttttttttcccccgggcttttttttccccctttaatttggggaattaaatttttcccccgggctttggtta

SEQ ID NO: 629557 - DNA, 677 bp, Homo sapiens
atctacacagggctttgctatttaggtacagaaagcacaatttttattgaaagtaggttcctcaaaataacattctgtttcaaactctccggtcttccttaactcctataatggactccaaagcattctctattgaaaggaatcttccttgcttggagggagaaactgcctagtggaattctgcagctcattttcaagttgaacagccttatttcttaagagctaagaatcgccctggattgtgtccgactgaactacccccttgggtaatctaacaaaaacgtcttccagctgtgtttcaaaactctctacttgatggcgcatgcgagcaaaagaggttgctattcgtagaaccacttggtgaccgcagctttggctcatggagctaacaatcgggcctagcccttcagttgcacaaattacaaactgctaggctaaagctagaatctttgcaattgcccgtcccggctcagggtttgggaaagatccaaggttccttcatttggccccgaaacactgcgggggttcaggctcttggaaaccaaacactccccacaacaaaacgttggccacttaaggtgtgggaccccccgaacgccaatctgtgtcttatgtaaacatcgggtttttcccggaacccatatatagggtttttgggtggggaaagaactcatggc

SEQ ID NO: 629558 - DNA, 2533 bp, Homo sapiens
  misc_feature (5)..(5): n is a, c, g, or t
  misc_feature (10)..(10): n is a, c, g, or t
  misc_feature (18)..(18): n is a, c, g, or t
cgacntccancttgcagntggcctactgggaagcttgagcggtcggcagagcggggaggcgaactgcagcagagttcttgctttccggcaggtgatggcgccccccgcggcctagaggtccagcgcccgccgcgagcagcggacagtcctcctgttgtgtccgaccgagagtcctggtgactttgaacatgctggtgccgctagccaagctgtcctgcctggcatatcagtgctttcatgccttaaaaattaagaaaaattatctacctctatgtgctataagatggtcttcaacttctactgtgcctcgaattactacccattatactatttatccccgggataaggacaagagatgggaaggagtgaacatggaaaggtttgcagaagaagcagatgttgtaatagttggtgcaggccctgcagggctctctgcagctgttcgtctaaaacagttggctgtggcacatgaaaaggacatccgtgtgtgtctagtggagaaagctgcccagataggagctcatactctctcaggggcttgccttgatccaggtgcttttaaagaactcttcccagactggaaagagaagggggctccacttaacactcctgtaacagaagacagatttggaattttaacagagaaatacagaattcctgtgccaattcttccagggcttccaatgaataatcatggcaattacattgtacgcttgggacatttagtgagctggatgggcgaacaagcagaagcccttggtgttgaagtataccctggttatgcagctgctgaggtcctttttcatgatgatggtagtgtaaaaggaattgccactaacgatgtagggatacaaaaggatggtgcaccaaaggcaacatttgagagaggactggaactacatgctaaagtcacaatttttgcagaaggttgccatggacatctagccaagcaactatataagaagtttgatttgagagcaaattgtgaacctcaaacctacgggattggactgaaggagttatgggttattgatgaaaagaactggaaacctgggagagtagatcacactgttggttggcccttggacagacatacctatggaggatctttcctctatcatttgaatgaaggtgaacccctagtagctcttggtcttgtggttggtctagactatcagaatccatacctgagtccatttagagagttccaaaggtggaaacaccatcctagcattcggccaaccttggaaggtggaaaaaggattgcatacggagccagagctctcaatgaaggtggctttcagtctataccaaaactcacctttcctggtggtttactaattggttgtagtcctggttttatgaatgttcccaagatcaaaggtactcacacagcaatgaaaagtggaattttagcagcagaatctatttttaatcaactaactagtgaaaatctccaatcaaagacaataggactccatgtaactgaatatgaggacaatttgaagaactcatgggtatggaaagagctatattctgttagaaatataagaccgtcctgccacggagtactgggtgtatatggagggatgatttacactggaatcttttactggatattgagaggaatggagccgtggactctgaaacataaaggttctgactttgaacggctcaagccagccaaggattgcacacctattgagtatccaaaacccgatggacagatcagttttgacctcttgtcatctgtggctctgagtggtactaatcatgaacatgaccagccggcacacttaaccttaagggatgacagtatacctgtaaatagaaatctgtcgatatatgatgggcccgagcagcgattctgtcctgcaggagtttatgaatttgtacctgtggaacaaggtgatggatttcggttacagataaatgctcagaactgtgtacattgtaaaacatgtgatattaaagatccaagtcagaatattaactgggtggtacctgaaggtggaggaggacctgcttacaatggaatgtaaactgcagctagccagtttctttcaagtatggcaagctaacgttaaaatgtttagagattaacagatttcagaatgtctttctgcatattactgaacagaatagtcacaaaatgattatcaaataaaaattttatcctatatgtaagattgtcccataaacgaaattacggggtaatgcttttaaataacctttataacgaatgcagcatcttcctacctcttcagattcttcagagaattcagtaccaagaagcaaaattcactactggacctttacattttgacttgccaaaagtttagtaatccacttatcaccatggagtatatattcttagactaaaggttttattgggaacaccaggcatatccgtgggttaccatttgtctatgagcaattctgaattcaccgtgccgggaatggggtgacacttccgggcacaaaggctcaagccttctgactgggcctggacaaacgttggccatcctgaaag

SEQ ID NO: 629559 - DNA, 259 bp, Homo sapiens
acagaggggagcagatcagtggctgcccagagcttggaggagggaaatagggagtcactgcttcctgggcaccaggtttcggtttggggtgatgaaatgttctataaccagacagtggtgatggttgcataacattgtaaatatgcttaatgccactggattgcacaatttaaaatggttatgatggtaaattttatgttatgtgtgttttaccacgtacacacataaaacttattttgtgccattaaaaagaaaaaaa

SEQ ID NO: 629560 - DNA, 229 bp, Homo sapiens
tgatccacatcaccgccacgcggctttgaccgcgtcagcaattcgcctttccaggcgccgctggcctcgctgccgtcgctcaggcgtcggcgcaggtcaatggcctgaagggcgcctgggttgactgagtgctgcacgccgggattgtcggcggcgctgtcgctgatgatcaggccgtcgcggatctcgatgatgcgtttggcgcgcgcggcgacttcgcggtcgtggg

SEQ ID NO: 629561 - DNA, 2642 bp, Homo sapiens
aaaagcagctggtacggtcgggggttaggatccgcgctgtggctgtttcaccgctccccggctgggacttggagtcccttatctttccctggtttggtacatgaccctggaagcctcggctggccgttgcgtcatccatggcgccggcgcagagcgagaaggaggtgggaacgccgtgaagcaagagcggtcggcagagcggggaggcgaactgcagcagagttcttgctttccggcaggtgatggcgccccccgcggcctagaggtccagcgcccgccgcgagcagcggacagtcctcctgttgtgtccgaccgagagtcctggtgactttgaacatgctggtgccgctagccaagctgtcctgcctggcatatcagtgctttcatgccttaaaaattaagaaaaattatctacctctatgtgctataagatggtcttcaacttctactgtgcctcgaattactacccattatactatttatccccgggataaggacaagagatgggaaggagtgaacatggaaaggtttgcagaagaagcagatgttgtaatagttggtgcaggccctgcagggctctctgcagctgttcgtctaaaacagttggctgtggcacatgaaaaggacatccgtgtgtgtctagtggagaaagctgcccagataggagctcatactctctcaggggcttgccttgatccaggtgcttttaaagaactcttcccagactggaaagagaagggggctccacttaacactcctgtaacagaagacagatttggaattttaacagagaaatacagaattcctgtgccaattcttccagggcttccaatgaataatcatggcaattacattgtacgcttgggacatttagtgagctggatgggcgaacaagcagaagcccttggtgttgaagtataccctggttatgcagctgctgaggtcctttttcatgatgatggtagtgtaaaaggaattgccactaacgatgtagggatacaaaaggatggtgcaccaaaggcaacatttgagagaggactggaactacatgctaaagtcacaatttttgcagaaggttgccatggacatctagccaagcaactatataagaagtttgatttgagagcaaattgtgaacctcaaacctacgggattggactgaaggagttatgggttattgatgaaaagaactggaaacctgggagagtagatcacactgttggttggcccttggacagacatacctatggaggatctttcctctatcatttgaatgaaggtgaacccctagtagctcttggtcttgtggttggtctagactatcagaatccatacctgagtccatttagagagttccaaaggtggaaacaccatcctagcattcggccaaccttggaaggtggaaaaaggattgcatacggagccagagctctcaatgaaggtggctttcagtctataccaaaactcacctttcctggtggtttactaattggttgtagtcctggttttatgaatgttcccaagatcaaaggtactcacacagcaatgaaaactagtgaaaatctccaatcaaagacaataggactccatgtaactgaatatgaggacaatttgaagaactcatgggtatggaaagagctatattctgttagaaatataagaccgtcctgccacggagtactgggtgtatatggagggatgatttacactggaatcttttactggatattgagaggaatggagccgtggactctgaaacataaaggttctgactttgaacggctcaagccagccaaggattgcacacctattgagtatccaaaacccgatggacagatcagttttgacctcttgtcatctgtggctctgagtggtactaatcatgaacatgaccagccggcacacttaaccttaagggatgacagtatacctgtaaatagaaatctgtcgatatatgatgggcccgagcagcgattctgtcctgcaggagtttatgaatttgtacctgtggaacaaggtgatggatttcggttacagataaatgctcagaactgtgtacattgtaaaacatgtgatattaaagatccaagtcagaatattaactgggtggtacctgaaggtggaggaggacctgcttacaatggaatgtaaactgcagctagccagtttctttcaagtatggcaagctaacgttaaaatgtttagagattaacagatttcagaatgtctttctgcatattactgaacagaatagtcacaaaatgattatcaaataaaaattttatcctatatgtaagattgtcccataaacgaaattacggggtaatgcttttaaataacctttataacgaatgcagcatcttcctacctcttcagattcttcagagaattcagtaccaagaagcaaaattcactactggacctttacattttgacttgccaaaagtttagtaatccacttatcaccatggagtatatattcttagactaaaggttttattgggaacaccaggcatatccgtgggttaccatttgtctatgagcaattctgaattcaccgtgccgggaatggggtgacacttccgggcacaaaggctcaagccttctgactgggcctggacaaacgttggccatcctgaaag

SEQ ID NO: 629562 - DNA, 2461 bp, Homo sapiens
aaaagcagctggtacggtcgggggttaggatccgcgctgtggctgtttcaccgctccccggctgggacttggagtcccttatctttccctggtttggtacatgaccctggaagcctcggctggccgttgcgtcatccatggcgccggcgcagagcgagaaggaggtgggaacgccgtgaagcaagagcggtcggcagagcggggaggcgaactgcagcagagttcttgctttccggcaggtgatggcgccccccgcggcctagaggtccagcgcccgccgcgagcagcggacagtcctcctgttgtgtccgaccgagagtcctggtgactttgaacatgctggtgccgctagccaagctgtcctgcctggcatatcagtgctttcatgccttaaaaattaagaaaaattatctacctctatgtgctataagatggtcttcaacttctactgtgcctcgaattactacccattatactatttatccccgggataaggacaagagatgggaaggagtgaacatggaaaggtttgcagaagaagcagatgttgtaatagttggtgcaggccctgcagggctctctgcagctgttcgtctaaaacagttggctgtggcacatgaaaaggacatccgtgtgtgtctagtggagaaagctgcccagataggagctcatactctctcaggggcttgccttgatccaggtgcttttaaagaactcttcccagactggaaagagaagggggctccacttaacactcctgtaacagaagacagatttggaattttaacagagaaatacagaattcctgtgccaattcttccagggcttccaatgaataatcatggcaattacattgtacgcttgggacatttagtgagctggatgggcgaacaagcagaagcccttggtgttgaagtataccctggttatgcagctgctgaggtcctttttcatgatgatggtagtgtaaaaggaattgccactaacgatgtagggatacaaaaggatggtgcaccaaaggcaacatttgagagaggactggaactacatgctaaagtcacaatttttgcagaaggttgccatggacatctagccaagcaactatataagaagtttgatttgagagcaaattgtgaacctcaaacctacgggattggactgaaggagttatgggttattgatgaaaagaactggaaacctgggagagtagatcacactgttggttggcccttggacagacatacctatggaggatctttcctctatcatttgaatgaaggtgaacccctagtagctcttggtcttgtggttggtctagactatcagaatccagtggaattttagcagcagaatctatttttaatcaactaactagtgaaaatctccaatcaaagacaataggactccatgtaactgaatatgaggacaatttgaagaactcatgggtatggaaagagctatattctgttagaaatataagaccgtcctgccacggagtactgggtgtatatggagggatgatttacactggaatcttttactggatattgagaggaatggagccgtggactctgaaacataaaggttctgactttgaacggctcaagccagccaaggattgcacacctattgagtatccaaaacccgatggacagatcagttttgacctcttgtcatctgtggctctgagtggtactaatcatgaacatgaccagccggcacacttaaccttaagggatgacagtatacctgtaaatagaaatctgtcgatatatgatgggcccgagcagcgattctgtcctgcaggagtttatgaatttgtacctgtggaacaaggtgatggatttcggttacagataaatgctcagaactgtgtacattgtaaaacatgtgatattaaagatccaagtcagaatattaactgggtggtacctgaaggtggaggaggacctgcttacaatggaatgtaaactgcagctagccagtttctttcaagtatggcaagctaacgttaaaatgtttagagattaacagatttcagaatgtctttctgcatattactgaacagaatagtcacaaaatgattatcaaataaaaattttatcctatatgtaagattgtcccataaacgaaattacggggtaatgcttttaaataacctttataacgaatgcagcatcttcctacctcttcagattcttcagagaattcagtaccaagaagcaaaattcactactggacctttacattttgacttgccaaaagtttagtaatccacttatcaccatggagtatatattcttagactaaaggttttattgggaacaccaggcatatccgtgggttaccatttgtctatgagcaattctgaattcaccgtgccgggaatggggtgacacttccgggcacaaaggctcaagccttctgactgggcctggacaaacgttggccatcctgaaag

SEQ ID NO: 629563 - DNA, 2627 bp, Homo sapiens
aaaagcagctggtacggtcgggggttaggatccgcgctgtggctgtttcaccgctccccggctgggacttggagtcccttatctttccctggtttggtacatgaccctggaagcctcggctggccgttgcgtcatccatggcgccggcgcagagcgagaaggaggtgggaacgccgtgaagcaagagcggtcggcagagcggggaggcgaactgcagcagagttcttgctttccggcaggtgatggcgccccccgcggcctagaggtccagcgcccgccgcgagcagcggacagtcctcctgttgtgtccgaccgagagtcctggtgactttgaacatgctggtgccgctagccaagctgtcctgcctggcatatcagtgctttcatgccttaaaaattaagaaaaattatctacctctatgtgctataagatggtcttcaacttctactgtgcctcgaattactacccattatactatttatccccgggataaggacaagagatgggaaggagtgaacatggaaaggtttgcagaagaagcagatgttgtaatagttggtgcaggccctgcagggctctctgcagctgttcgtctaaaacagttggctgtggcacatgaaaaggacatccgtgtgtgtctagtggagaaagctgcccagataggagctcatactctctcaggggcttgccttgatccaggtgcttttaaagaactcttcccagactggaaagagaagggggctccacttaacactcctgtaacagaagacagatttggaattttaacagagaaatacagaattcctgtgccaattcttccagggcttccaatgaataatcatggcaattacattgtacgcttgggacatttagtgagctggatgggcgaacaagcagaagcccttggtgttgaagtataccctggttatgcagctgctgaggtcctttttcatgatgatggtagtgtaaaaggaattgccactaacgatgtagggatacaaaaggatggtgcaccaaaggcaacatttgagagaggactggaactacatgctaaagtcacaatttttgcagaaggttgccatggacatctagccaagcaactatataagaagtttgatttgagagcaaattgtgaacctcaaacctacgggattggactgaaggagttatgggttattgatgaaaagaactggaaacctgggagagtagatcacactgttggttggcccttggacagacatacctatggaggatctttcctctatcatttgaatgaaggtgaacccctagtagctcttggtcttgtggttggtctagactatcagaatccatacctgagtccatttagagagttccaaaggtggaaacaccatcctagcattcggccaaccttggaaggtggaaaaaggattgcatacggagccagagctctcaatgaaggtggctttcagtctataccaaaactcacctttcctggtggtttactaattggttgtagtcctggttttatgaatgttcccaagatcaaaggtactcacacagcaatgaaaagtggaattttagcagcagaatctatttttaatcaactaactagtgaaaatctccaatcaaagacaataggactccatgtaactgaatatgaggacaatttgaagaactcatgggtatggaaagagctatattctgttagaaatataagaccgtcctgccacggagtactgggtgtatatggagggatgatttacactggaatcttttactggatattgagaggaatggagccgtggactctgaaacataaaggttctgactttgaacggctcaagccagccaaggattgcacacctattgagtatcctactaatcatgaacatgaccagccggcacacttaaccttaagggatgacagtatacctgtaaatagaaatctgtcgatatatgatgggcccgagcagcgattctgtcctgcaggagtttatgaatttgtacctgtggaacaaggtgatggatttcggttacagataaatgctcagaactgtgtacattgtaaaacatgtgatattaaagatccaagtcagaatattaactgggtggtacctgaaggtggaggaggacctgcttacaatggaatgtaaactgcagctagccagtttctttcaagtatggcaagctaacgttaaaatgtttagagattaacagatttcagaatgtctttctgcatattactgaacagaatagtcacaaaatgattatcaaataaaaattttatcctatatgtaagattgtcccataaacgaaattacggggtaatgcttttaaataacctttataacgaatgcagcatcttcctacctcttcagattcttcagagaattcagtaccaagaagcaaaattcactactggacctttacattttgacttgccaaaagtttagtaatccacttatcaccatggagtatatattcttagactaaaggttttattgggaacaccaggcatatccgtgggttaccatttgtctatgagcaattctgaattcaccgtgccgggaatggggtgacacttccgggcacaaaggctcaagccttctgactgggcctggacaaacgttggccatcctgaaag

SEQ ID NO: 629564 - DNA, 185 bp, Homo sapiens
ccacctcagcctctcgagactggcaggcatacaccactacctccagcatttttttttttcctatttttggtagagagggggtttggctacacacgggcgggtctggaacggggctcaagcgatctgcccacttgggcctcccaaaggtgcgggggtcacaggcaggggccagggcaccgggccag

SEQ ID NO: 629565 - DNA, 2190 bp, Homo sapiens
ggactacagcagatgttgtaacataatcgatgacacggctcttgagagttctctgtcacctagtccagtactagacatcgagataggattggtaggccacagtgcaagaagggcacgatcacggtgctagtagtcgtacggtgagcaggacagactggcaccaggatagagtagtcgtcatactctctcaggggcttgccttgatccaggtgcttttaaagaactcttcccagactggaaagagaagggggctccacttaacactcctgtaacagaagacagatttggaattttaacagagaaatacagaattcctgtgccaattcttccagggcttccaatgaataatcatggcaattacattgtacgcttgggacatttagtgagctggatgggcgaacaagcagaagcccttggtgttgaagtataccctggttatgcagctgctgaggtcctttttcatgatgatggtagtgtaaaaggaattgccactaacgatgtagggatacaaaaggatggtgcaccaaaggcaacatttgagagaggactggaactacatgctaaagtcacaatttttgcagaaggttgccatggacatctagccaagcaactatataagaagtttgatttgagagcaaattgtgaacctcaaacctacgggattggactgaaggagttatgggttattgatgaaaagaactggaaacctgggagagtagatcacactgttggttggcccttggacagacatacctatggaggatctttcctctatcatttgaatgaaggtgaacccctagtagctcttggtcttgtggttggtctagactatcagaatccatacctgagtccatttagagagttccaaaggtggaaacaccatcctagcattcggccaaccttggaaggtggaaaaaggattgcatacggagccagagctctcaatgaaggtggctttcagtctataccaaaactcacctttcctggtggtttactaattggttgtagtcctggttttatgaatgttcccaagatcaaaggtactcacacagcaatgaaaagtggaattttagcagcagaatctatttttaatcaactaactagtgaaaatctccaatcaaagacaataggactccatgtaactgaatatgaggacaatttgaagaactcatgggtatggaaagagctatattctgttagaaatataagaccgtcctgccacggagtactgggtgtatatggagggatgatttacactggaatcttttactggatattgagaggaatggagccgtggactctgaaacataaaggttctgactttgaacggctcaagccagccaaggattgcacacctattgagtatccaaaacccgatggacagatcagttttgacctcttgtcatctgtggctctgagtggtactaatcatgaacatgaccagccggcacacttaaccttaagggatgacagtatacctgtaaatagaaatctgtcgatatatgatgggcccgagcagcgattctgtcctgcaggagtttatgaatttgtacctgtggaacaaggtgatggatttcggttacagataaatgctcagaactgtgtacattgtaaaacatgtgatattaaagatccaagtcagaatattaactgggtggtacctgaaggtggaggaggacctgcttacaatggaatgtaaactgcagctagccagtttctttcaagtatggcaagctaacgttaaaatgtttagagattaacagatttcagaatgtctttctgcatattactgaacagaatagtcacaaaatgattatcaaataaaaattttatcctatatgtaagattgtcccataaacgaaattacggggtaatgcttttaaataacctttataacgaatgcagcatcttcctacctcttcagattcttcagagaattcagtaccaagaagcaaaattcactactggacctttacattttgacttgccaaaagtttagtaatccacttatcaccatggagtatatattcttagactaaaggttttattgggaacaccaggcatatccgtgggttaccatttgtctatgagcaattctgaattcaccgtgccgggaatggggtgacacttccgggcacaaaggctcaagccttctgactgggcctggacaaacgttggccatcctgaaag

SEQ ID NO: 629566 - DNA, 2312 bp, Homo sapiens
aaaagcagctggtacggtcgggggttaggatccgcgctgtggctgtttcaccgctccccggctgggacttggagtcccttatctttccctggtttggtacatgaccctggaagcctcggctggccgttgcgtcatccatggcgccggcgcagagcgagaaggaggtgggaacgccgtgaagcaagagcggtcggcagagcggggaggcgaactgcagcagagttcttgctttccggcaggtgatggcgccccccgcggcctagaggtccagcgcccgccgcgagcagcggacagtcctcctgttgtgtccgaccgagagtcctggtgactttgaacatgctggtgccgctagccaagctgtcctgcctgggggctccacttaacactcctgtaacagaagacagatttggaattttaacagagaaatacagaattcctgtgccaattcttccagggcttccaatgaataatcatggcaattacattgtacgcttgggacatttagtgagctggatgggcgaacaagcagaagcccttggtgttgaagtataccctggttatgcagctgctgaggtcctttttcatgatgatggtagtgtaaaaggaattgccactaacgatgtagggatacaaaaggatggtgcaccaaaggcaacatttgagagaggactggaactacatgctaaagtcacaatttttgcagaaggttgccatggacatctagccaagcaactatataagaagtttgatttgagagcaaattgtgaacctcaaacctacgggattggactgaaggagttatgggttattgatgaaaagaactggaaacctgggagagtagatcacactgttggttggcccttggacagacatacctatggaggatctttcctctatcatttgaatgaaggtgaacccctagtagctcttggtcttgtggttggtctagactatcagaatccatacctgagtccatttagagagttccaaaggtggaaacaccatcctagcattcggccaaccttggaaggtggaaaaaggattgcatacggagccagagctctcaatgaaggtggctttcagtctataccaaaactcacctttcctggtggtttactaattggttgtagtcctggttttatgaatgttcccaagatcaaaggtactcacacagcaatgaaaagtggaattttagcagcagaatctatttttaatcaactaactagtgaaaatctccaatcaaagacaataggactccatgtaactgaatatgaggacaatttgaagaactcatgggtatggaaagagctatattctgttagaaatataagaccgtcctgccacggagtactgggtgtatatggagggatgatttacactggaatcttttactggatattgagaggaatggagccgtggactctgaaacataaaggttctgactttgaacggctcaagccagccaaggattgcacacctattgagtatccaaaacccgatggacagatcagttttgacctcttgtcatctgtggctctgagtggtactaatcatgaacatgaccagccggcacacttaaccttaagggatgacagtatacctgtaaatagaaatctgtcgatatatgatgggcccgagcagcgattctgtcctgcaggagtttatgaatttgtacctgtggaacaaggtgatggatttcggttacagataaatgctcagaactgtgtacattgtaaaacatgtgatattaaagatccaagtcagaatattaactgggtggtacctgaaggtggaggaggacctgcttacaatggaatgtaaactgcagctagccagtttctttcaagtatggcaagctaacgttaaaatgtttagagattaacagatttcagaatgtctttctgcatattactgaacagaatagtcacaaaatgattatcaaataaaaattttatcctatatgtaagattgtcccataaacgaaattacggggtaatgcttttaaataacctttataacgaatgcagcatcttcctacctcttcagattcttcagagaattcagtaccaagaagcaaaattcactactggacctttacattttgacttgccaaaagtttagtaatccacttatcaccatggagtatatattcttagactaaaggttttattgggaacaccaggcatatccgtgggttaccatttgtctatgagcaattctgaattcaccgtgccgggaatggggtgacacttccgggcacaaaggctcaagccttctgactgggcctggacaaacgttggccatcctgaaag

SEQ ID NO: 629567 - DNA, 130 bp, Homo sapiens
  misc_feature (46)..(46): n is a, c, g, or t
gtgtttatctagaggatcccgtgaggcttggtggtaggcatgcgtnctggaggctgcagggtccttgtagcagagcagtttcttgctgcttgggtcctcagcacgccaagccccccaccaaccctccacc

SEQ ID NO: 629568 - DNA, 1964 bp, Homo sapiens
  misc_feature (1858)..(1858): n is a, c, g, or t
aaaagcagctggtacggtcgggggttaggatccgcgctgtggctgtttcaccgctccccggctgggacttggagtcccttatctttccctggtttggtacatgaccctggaagcctcggctggccgttgcgtcatccatggcgccggcgcagagcgagaaggaggtgggaacgccgtgaagcaagagcggtcggcagagcggggaggcgaactgcagcagagttcttgctttccggcaggtgatggcgccccccgcggcctagaggtccagcgcccgccgcgagcagcggacagtcctcctgttgtgtccgaccgagagtcctggtgactttgaacatgctggtgccgctagccaagctgtcctgcctggcatatcagtgctttcatgccttaaaaattaagaaaaattatctacctctatgtgctataagatggtcttcaacttctactgtgcctcgaattactacccattatactatttatccccgggataaggacaagagatgggaaggagtgaacatggaaaggtttgcagaagaagcagatgttgtaatagttggtgcaggccctgcagggctctctgcagctgttcgtctaaaacagttggctgtggcacatgaaaaggacatccgtgtgtgtctagtggagaaagctgcccagataggagctcatactctctcaggggcttgccttgatccaggtgcttttaaagaactcttcccagactggaaagagaagggggctccacttaacactcctgtaacagaagacagatttggaattttaacagagaaatacagaattcctgtgccaattcttccagggcttccaatgaataatcatggcaattacattgtacgcttgggacatttagtgagctggatgggcgaacaagcagaagcccttggtgttgaagtataccctggttatgcagctgctgaggtcctttttcatgatgatggtagtgtaaaaggaattgccactaacgatgtagggatacaaaaggatggtgcaccaaaggcaacatttgagagaggactggaactacatgctaaagtcacaatttttgcagaaggttgccatggacatctagccaagcaactatataagaagtttgatttgagagcaaattgtgaacctcaaacctacgggattggactgaaggagttatgggttattgatgaaaagaactggaaacctgggagagtagatcacactgttggttggcccttggacagacatacctatggaggatctttcctctatcatttgaatgaaggtgaacccctagtagctcttggtcttgtggttggtctagactatcagaatccatacctgagtccatttagagagttccaaaggtggaaacaccatcctagcattcggccaaccttggaaggtggaaaaaggattgcatacggagccagagctctcaatgaaggtggctttcagtctataccaaaactcacctttcctggtggtttactaattggttgtagtcctggttttatgaatgttcccaagatcaaaggtactcacacagcaatgaaaagtggaattttagcagcagaatctatttttaatcaactaactagtgaaaatctccaatcaaagacaataggtaagaaattcctgtgtaaagtatacaaaagaaaattgctgggttatgtgtatttcaattgacattaaaagatttgtattgcatctgtcactttatagaaagtattaataagcatgtatgcaaagaaaactacatggcttattctcaataattacagtcagtgattttttactgtaatgttctgttttattcacatcaaaaaagtagaaaagtaccagtggtagccagccacggtcncacgcctgtaatcccagcactttggtaggctgaggcgggtggatcatctgaagtcaggagctcgagactagcctggcccacatggtgaaaccccgtctctactaaa

SEQ ID NO: 629569 - DNA, 763 bp, Homo sapiens
  misc_feature (132)..(132): n is a, c, g, or t
  misc_feature (287)..(287): n is a, c, g, or t
gtgaagccagtggtggggaggaggtgactggccagttgctctggctgatgggcctcatcccgatcttcgagctgggatcattgtgtccatgatgttatgactcaccaggaggcttgtgagtgtcgtagatgnttgtcgcattcgtacacccgctcatcaccatgtcaatggctgccacgtgcacagtagcgagcgatggtcagggagactgagaaggtgacatatggagtcgatcatggcctagaccaaaacctttgtttagtttgacgcaacgaggaacagcaagntcctcgagatgacacccgagtgaacattcctcgcgacgttcacactggatgaacttacgttgatcatgccatgaattgcgagtcgaggcgctttgggaagggcccaggaccctgtcgcatttccttccgtaacttccgttcctgtcagggaatgctgcgtactgtaagaggtaactgttattgactctaggtatgcctttgcctttactagtgatcacttaaattatgaaatgaccgcccttttcattttatagcgtaggcacacacgttcttagtctttcaacttgttgtcttgtgtccgcgtgggagagtcatggataacatctgcgtggcttttacaaaaagtggttcatctgctgctgggggagacaccagtagagagggtgcgtgcgcgtgaaccagtgagcacaagttgggccggaactttggaatcgccgggagtacgttcccgttgtgaaaggcgctgtgtgaaacgg

SEQ ID NO: 629570 - DNA, 229 bp, Homo sapiens
  misc_feature (196)..(196): n is a, c, g, or t
  misc_feature (204)..(204): n is a, c, g, or t
tcaagctttatacttcgatgagtcttcatggagtaaaaaatgtatttaaaagaaaatgagagaaaggactaggagagccccggaattaataccaatcagaagggcaatgcttttagcattaaaatgacaggtgacttcaaaccagcttaaagtttaagtttaaacagttggtaggtgcattaaacataatttgaanggcgatcnttttaacaaagcagattcaaaccgg

SEQ ID NO: 629571 - DNA, 286 bp, Homo sapiens
tcatcgaatcccgagatggagaacatttggccacatggtgagaatcccatctctactaaaatacaaatattagccaggcatggtggcgtatgcctgtagtcccagctactctggaggctgaggcaggagaattgcttgaacctgggaggcagacgttgcagtgagccgagatcacaccagtgcactctagcctgggcgacaagagtgaaactccgtctcaaaaaaaaaactaaaacccattaaattagccggttgtggtgtccggtgcctgcaatctagcctggaa

SEQ ID NO: 629572 - DNA, 103 bp, Homo sapiens
tccgcatgaggcgtcacaacggagactcatccctctcctggtgcatgattcttactcttcttctttctgccaaagaggctcttggtaactttggcaagacaga

SEQ ID NO: 629573 - DNA, 989 bp, Homo sapiens
caccaggcggtgggctcggctcgggggcggaggcggtgaaaagggcggggagcgcgaggaggagcgacctggcctcatcgcgtgccgcctcttccccgtccgcatgtgacgagcgcctcaggccttctgtcgctcgccgccgtccgccctctagtcctcgccaccgcgcccaccctcctcagcgcctcaggctgagcagcgttgctggtgcctcgacagctgcttgcgtgaacctagctggcatactgcggtgtagcgccgcgcgcgaggcctgcgagcgtgcacgcccgacgatgacctgttggtgccctgtgggtaccgacctgctgttagccgcgagagtggcgcgatgagtggacggggccctcgcccttcaagagcggctcgtgtgcggcgaccgtgcatgctgtacctgcatacgtgagcctgcgttgagcgcctctcgacgtgcacgagcgcgttgtgggccggagccaaggactctgcgtgctgcgggaagtcgcaggtgcgtccgatcaaccatcgtcccgggacgttgcgctttcgagtacggcagcctgatagacccttttgccctagtttccacacgaagtacgggcatgactgggctgaggcccaaaagacggctgcaattgagggtacattctgagacccgtcttcccgagacacgcagtacattcttcagaccgacaatcaggaccagtcttacgaaaagcacaatcctctagctaactatcagtttccgggggggcctgcattcctgctcgggacgggttcaagagatggccccagtcaggaccaattttacctcgcgaggagagaattccgcgtttcatatacaagacttagggctgagggcacggcccatatggaagaaagttaccgagagcgaacaaaggcgcttacttgcgtgaaatgaggatccgggacctatggcccagccagagaacattcagcgccaggatgaagaatgacttacaagtaacccg

SEQ ID NO: 629574 - DNA, 350 bp, Homo sapiens
acctccgcctccatctcagaacatctttcccaatatgaaatgtgatgaaatataagacccatcacaggggagccagagattccagacaatcttacaaagaaaaaatgaaaataagccagaagaggaagccagaaaatggaagaactgctgatttcccatctagctcttcatcttttaaaataacaatgctatatttctggactttaatatcacattatatctaaaaacagcaaatgaggccaggtggggtgggtcacacctgtaatcctagcattttgggggaccaagacaggaggatcactgaaggcctggagtgcaagacagcaacacagtgagaccccttctctatt

SEQ ID NO: 629575 - DNA, 1283 bp, Homo sapiens
  misc_feature (1283)..(1283): n is a, c, g, or t
gactgctcttccagagcagtggatcaaccaaaatgagtgccctgggagctgtcatagcccttccatgcctctgagtggatcagcgtccttcttcgactaagatggcgatctcagggccaattcgagtgtcactgagattactcggtcatgactgcatcgtgtctgttaccgaatgcacccccgagaattgacataatggactatgttggacgacactcggctatcgatatcagtgtaaaggaagcatactatcaaatgctgcgcaaactgcaatggcagatggatgatgttacaccctttacaatcacactggcgacagtcacgttgtgactataaatagagaggctggtttgcgagaatatacacctttccctgaaactggtgcaagcacgtaattgtgggcgaacgacctgcgaatgaaatgtcccgggtaaaagaccctatagtaggccaggccgtgaacttcgcttgggagttgagaaccaatccctagggatttgctcacaaatgggctatgtccttttacaccctagtgtcacgttgacttaaacggattgggttatccccaacgcattacattctgcaacccataaaggttggtccaacggcttgattcaacttgaaagcatagtagagctggctagaaatcactgtgtcttaaaagatatttctcttttcctggaaacctattgcagaatcaatgcaaacctagtcggcaacagcaacatttggcccccatagcattttaagaatacttcctaatgctggggggagatcatagcaaggatttggttagaattaattgccgaaagggtcgatcctaggagcctataactaactgtcccaagggtatgcatataggcgtcgccgattcgcaaaactccaaaaacgcagaaagggtgtgctcctggtcgaactcgagacagaagttggattgcccccattaacgtgagacttattcctgtccaaaaacgggagttcactgccatgaaagcctcagtgagcggtgatgggggccttatatggatttcccctgtgccttgggggcgcgagaaaattgcccaaacattttcacaaattttacttggagcacattcttggacgttatgctcattgcattggcctgttgggtttgaacccacaaggaaccaagttgcgttaaggggcctttatgaaaaggtgaaggcacaggtccccgcaaaaaggaagtatacccggagaaagccctgttaaggggttagagcccaatacttgacttagaactaccttttgtcggggatatn

SEQ ID NO: 629576 - DNA, 95 bp, Homo sapiens
tcgccactccattttcctctctttctcttcccctttccttcgcgcccaagagcgcctcccaacctcgtaggggtggtcaacggagccccttcgcc

SEQ ID NO: 629577 - DNA, 205 bp, Homo sapiens
gcacccaggcgcacttctcgagcctcacctcatggccacggcacctcaggcccacagggagtactgccagactaccaccatgttccctttaggctcaagggctcttcagatcagcttgtgttgaatgctgcctggcctgggactcaccctttagagcagtgaggtcccttctggcctaaggcaagtccagaagtgcgcctgggtg

SEQ ID NO: 629578 - DNA, 428 bp, Homo sapiens
tgcaggattcggcactaggtagtagtagtgtagtagagtagatagtatagatagtagtagtagtagtagtagatatatagtagatagtagtgtgtgagtgagagagagtgttagtgtgagactttgtcatagccacctatatcctctcgttctgtcatactccctccctcctctgtctcctccttctccttctctctttcttctcctcacctactactctctcttctccgtccctccttcacaccttccccccctttctccaccttggtccgttgcttcttcttgtcctcactctttacttgcctctcattcctgcttccctctgcccgccttcaccctctccatcactgtctgtatacctccttctcttctccccttctctcccttccttcctctcatctctctctctccttctttcttcctgttct

SEQ ID NO: 629579 - DNA, 795 bp, Homo sapiens
  misc_feature (1)..(1): n is a, c, g, or t
  misc_feature (454)..(454): n is a, c, g, or t
nttgccccagcatctcagccaggaccatacttccgggtctcttaattctgaccggctttggagattcgaaccgacacgtccaaatttcttccccaacttggcccgccccaatgggtcctcgccaccgtgaagaccacattccccccattatgcgatcttccggaccacatcccaaggcgcccaccttttagcgccccacccacccaccagggggcccacccctcctggccccacctgtctgttgaaggggcccacagctgcacatttgctggtgtaagcactttcaacgtgttaactattcacgagaccacgagcgtctgtttaaacacccacagaggagaaccacgttcttaaagtaatgaaatgctgctcaccaccgtggaaactaaccggggggagctcctcgccccaggagcccgaataaaccttgctctgccttattaaaccccggacngttcaggccccggggcttgggaaacccaagaacggaccgatagcttgagcccttggattccgccggaaaggccttccttctggcctccaggagcctaccccgagccttcaccaggctgagttcttgcctctgtgtcctgtccctcctggaaatcaggactctgcttcctcagggagccccgggaaaggcggagctcactggccacaagccgagggcacctggggccgctcagtccccttggggttgtcctgaggttgagcctgggggggcccgtcctgcccgcctaaagagaatgcccccaagccccgcaccatcgtggtccccataactctgccttcgcc

SEQ ID NO: 629580 - DNA, 912 bp, Homo sapiens
tgaccctgcaacctctgggtgaagctgcttaatctgctgatgagtatgatgacacgtagagtattaacgtaattgctgcccggctctatagtagcactaagactcgactggatctcactagcgtactgtaccgctaactctctatgaatctcaagtcacttggtgctacctcatgaccctggagatacgttgacttggagaagaaggtggtgcggttaaattggctaggagctatcgaacgagtagcgactagggcaccgacatcatgagcgaaaacgcagacttagtaatgacgtggctcgtacctaccccgctatggctctgtagttgatgcgaatttgatccaattatccattacctgcatcggtacctataaccatttaagggggtctgatccagtctgggctataaatggtgtactcttaatcttagcacagactagaatatccatgaacactaccagttattgttctcccatcgagtaataccttccaaggaggagacaagagtattgtctggcgcccgtataattatgatagtactacgaatgccgagatacgcacaaatcatggatagctgcattctgggtatgggtctgatatactataatctggtagtagcatcatacttagcggacaacccattggcttgaactaaaggatgattgtaactcaatcttgatggcttctgaaccttaatgttctaggagttcacagctctcgtaatatgaattctgttgctccactcctgagtcctagtcccttctcatgggatgcttgggagaggaagacagattgtgtactcggatggaggatcgccagaaactgtaccgttgtttttacgcttaaaacaccctaacgttatactgggggtaattccgacgggaactgttgcaggcgtgtccaggacaac

SEQ ID NO: 629581 - DNA, 465 bp, Homo sapiens
caaaaatgtgtccctgagataaatttattaattttggcactggtccttttttcgctctgtatatgccacagtcttgtcctcaaacttgtgagtgagatgtaaaggacgaaataagatgataccctctccattatcatcatactcgttcaacagagactcaacattcgtatgtgcaaatcggtagttatccctcaagttgctggctgcttttaggaactcggagtgagcctcactgaatgaatcatcgaaaaaacctactatagaggcttctttatcactaatgaatttcttaaattcttcctcagtcctgagaggcactgaagctggtcctgcctgcttcttcaggtggctgacaattccatcagcagtcctaggtccatcataagcgcctgcttcttcaccatctctaaatatcttcagggttggatatccactgactccatatttattacaggtgttagtgtt

SEQ ID NO: 629582 - DNA, 890 bp, Homo sapiens
aaggaggagagccacgagggccttagacgatatacctggtggtgttgtcggcgtaatgttgcaatctctccggggccctccttctaggccggggcccactggaagtctgggacacgttctagcctggacaattcgctccgcgggaggatttccacatccgcgttgttccctctgcgatcccgtcgcattatgtcctctgtcgatattggctctaatctaccggtctaccaaattgcgcgtaacgtttcggtactctattctcgccctggtcacgtgggtggtgaattgtctctcccttcggggaccctcgggctccccattgtgtctgtggacacccccccgctcccaggggggccctggtcaacccttccggcctctgtggtccggacgatatggtcggtgttccccgggcacctctaaggcacttgtgagggctcattctccgtccctcctcccgtgtacgctggggataatcttcggcactcccctctgcgggcgcccgactctttggacgggcccatatggatttcacactggcgcgagcaggtccaccccgaccagactcctggaactcgaccctcccgcaagttcttgccccagcctcccgcaccgttgtggtagttactccaagaaaagtcattgctcccctctgtgtccccagttgcgtgccgtcgagacaggcccgtcacggaacttacatggttgtacttggggggaaagccccacgtatgctgggatctacgcccacttcgcgacccaccctggggtcaggagctctagctggggccaccacgcagcctcagggggactatcatatctcgcaacaagagttaattgggtcctaaaactataaaaaaattcatacccccaggaattaacagcccacaatg

SEQ ID NO: 629583 - DNA, 461 bp, Homo sapiens
  misc_feature (159)..(159): n is a, c, g, or t
ccttcgtggagtgctcccgaaggccaggcccaacatcgccgtttctaccgcaggcgaaggttcccaggcgtactgggatgcgttgaccctatggccgtcgaccacagtattccaaccctcctgtgcagggagaagcgatggagggtgctgacaaccagngtgcaggagaacaaggtagaccagtgaggcagaatatgtatcggggatatagaccacgattccgcaggggccctcctcgccaaagacagcctagagaggacggcaatgaagaagataaagaaaatcaaggagatgagacccaaggtcagcagccaccttaacgtcggtaccgccgcaacttcaattaccgacgcagacgcccagaaaaccctaaaccacaagagggcaaagagacaaaagcagtcgatccaccagctgagaattcggccgctcccgaggctgaacagggcggggctgaagaa

SEQ ID NO: 629584 - DNA, 175 bp, Homo sapiens
tagcgactggatggtagattggtgctagtggagtaaaagagtataactggggtaggtaggtatagtaggtaaactatataatagtagtaggaagctgaataatttatgaaggagaggggtcaggatatgattcgaggaggatcctaataggccatgcgtaggatagccagagagg

SEQ ID NO: 629585 - DNA, 380 bp, Homo sapiens
atacgtttttaaaacatagaatggaattgtaaaggaaggtctgatcaatttggtggatttcggaaggttactatggaatttcaggtctttggaacatgtggtcgttcccaagttactgattcctacccatgcattacactttacactacgccggacagtgtccacaatgccatcctcttctgttgcgattggaatgcagatagtctagtatgtctactcaaggtaatttctaagccgtattgaagcgtttaaatactcctcggttgagtaaaggctcgaattcaataccatgcgtttttatgaggcatcctcgtatctattttgctaggactcgagtgcccaattggatatgcatccgattaacctcttaagtggattcc

SEQ ID NO: 629586 - DNA, 138 bp, Homo sapiens
gtattcacactagtaaacatcgtgctattcagaggtcgtgcgaaaaccaggtggtaggcatagatcacctttgtagcccatccacggtctccacgccaatcatctttggtgaacatccacatcatccgcgttgtcttc

SEQ ID NO: 629587 - DNA, 229 bp, Homo sapiens
tagagatgctactggtatccaccatacagcctagaaaagcacggggtacagaggcagactacaaattaaacaaaataaacattaaaagcctctaagctgggcttggcggcacacacctgtaatccagctacctcgggaggctgagacaggagaatcactttgatcctgggaggcagaggcttgcagaactcaatggccacttgccactccaagcctggcgcgacagaag

SEQ ID NO: 629588 - DNA, 167 bp, Homo sapiens
  misc_feature (60)..(61): n is a, c, g, or t
tcaagctcggttgccttttaattcagcttggcacttcaactcaggctgaacttgcacttnncccctgctgtatatcgtggtctatatccccgatacacattctgcctcactggtctaccttgtctcctgcaccctggttgtcagctacccctccatcacttctcccc

SEQ ID NO: 629589 - DNA, 1436 bp, Homo sapiens
cagcctgggcgatgagcgaaactgtctcaaaaaaaaaaaaagttggggatctcgactgtgttgaccagagctggtctcgaaactcctggcctcaagtgatcctcccaatcttggcctcccaaagtgtcaggattcacaggcgtgagccaccacaccctgcctggttgtgtactctttataaattactaaggcttttcaactgcttacaactgctgccttttacgataccactgtaaacaattaccaccctattcaactgaggcttctctttacttacaaaaccatttgccaattggtacactaacaactcttaaatatacactaagagccaataacatccaacggccttccaatggtcgaggtctcacataaggtataatcctcacattaccattctcaattttccaataaccttctggtcacaacgatgcgacagccacgagttagcttttcccaattttctccccttgaagggcgtgaagaacataacgattgaccccatggaccacacacgtggtacaaatagaggcccacaaggttcacacgctttgaagaactttggacacgcatcctcggaattcctaagatcaccttgtgatgaaccaatttcagcacgagctctgaggtagcccacggctcaaacaccgacgagcacataagtgactccacgcccttgtgggcccaccaacttacgcgcgctaccacttacagcattggtctccaccaacacgttcacaaccactctcgctcaccaccttgttaaacaggcggtctctaaaactccttattacacacgtctgcaatctacacgacacaccggccaacttctccataataaacctcgatatacacactgcggccgccgtttcctaaacgccaagcgcatactacctacattattaccccccaatggataccaacacacgcacatattgcccaattatttgcgttaaccaccaacattttgtccaaccacacaccaacaaacttttagccactttatacccacacattatttctcaggcccaaccgctataaacaaagggggccccctttatgtgcgccacccaatttttggaaaaaggctcctgaggacaacctctgcgagcatttagggacccgccccacacacatgcagaggggacagaccgacggggggcaccaccagcgaagaagacacaacgggcacaagcacgcgacaagccgcacaccacaccagcggggagacaaacaaagacacgatcactacaaccagcgacgctctagacagaacgccggaccgcccacatcccagaccgcacatgtgcgggcgcatcccacaaacacacacaggccgccacacccagacggaagaacagacgagacgactgttacctaaacgcacgcagaacgcccgctactgcacaccacacaacctcacagcaacggagagccca

SEQ ID NO: 629590 - DNA, 232 bp, Homo sapiens
ggtgtggcccaggctggtctcgaactcctgagctcaagccatctgcccacctcggcctcccaaagtgctgggattacagacatagccaccaggcctggtctcataactggctttagagcataccaggtggctgtagtttggcttttttccaacttatcaataggatggaagcatgtataagaatgggactaataaatcagaacttggcatggatagggacacaagtagagaa

SEQ ID NO: 629591 - DNA, 372 bp, Homo sapiens
actgtagggcccattccaacaatctcgtataacatggtggatgactatgtaagtactaggcgtgcagagacatgcctcacccgcgtatatcataaaggcatatcgggaactggcactgaagtggcatccagatcaaaatcctcgagaataaagaacgatagcagagagaaaattcagagcaagtagcggaggcatatgaagtgctgtcggatgcaaagaaacgggacatctatcacaaatatggcaaagaaggattcacatggtggaggaggaggtggaagtcatgttgacagtccatttgaatttggtttcacattccgtaacccagataatgtcttcggggagatcccccggtggatggggcccccacat

SEQ ID NO: 629592 - DNA, 146 bp, Homo sapiens
caagcagagctaactctaccactgaagagttgcataagtatcagaaaatgttaggaacaccaccctcagaccaaggcccttcaccacttgatgtggacaagaggtttaggaggaggggccacaaggagtatatgggctcttgtcgg

SEQ ID NO: 629593 - DNA, 208 bp, Homo sapiens
  misc_feature (99)..(99): n is a, c, g, or t
  misc_feature (109)..(110): n is a, c, g, or t
tgatcccgactttttttagcacgaatgtacttatccgccctggttgagcagttgcacgtcggcatggacttcaacatcagccgcgatggcgcgacggtngcatgtcatnntcgtgaacggtcctcccctgctgcgttactcgcgaaagaagccacggccaaccttttcgacacggcccgggcgcggaactgaatcgtttcccggggaa

SEQ ID NO: 629594 - DNA, 131 bp, Homo sapiens
  misc_feature (5)..(5): n is a, c, g, or t
tgacngtaccaattagaacatacatatttttgggtgtcagtcattatctctgggccatttttgtcaaaaattaacgtatttaatagagaaggtgtttaaaacaaaaggagggtttgttgtacccgagctcg

SEQ ID NO: 629595 - DNA, 223 bp, Homo sapiens
  misc_feature (189)..(189): n is a, c, g, or t
ggatcctcgtcgttctcgtgtgaatgagggttctatgctgttaatgtggcgggcgagtgagcctcattgtgttgacgtaaatatgtacagggagtgtacggctgtgactcctatgtcgagtcccgtgagtcagagagcgatctttgatcatgagaacgtggatactagcacagagagttctcccaatcngttaatagtggggggtacggcgaggttagccagg

SEQ ID NO: 629596 - DNA, 531 bp, Homo sapiens
  misc_feature (2)..(2): n is a, c, g, or t
  misc_feature (521)..(521): n is a, c, g, or t
gntggagagggggttcatgtgagggaactcacgattaacaacagaaagctgtgagagtagaagaggggagactgtatgaacagagcactgacggggctttcctgccagtgcccgaactagggtaagggagctgggcccacagagtagactcagccgtggtggagatgccacctgatgtggtggtagggggaagatacccggtttctcccttcttcctgacctccggcctcaagctcgctctagccctcccccgggccaagcctagccagaagcctacgggcaatgccactggcagggcagcccccaacatgcagagcaggtaagatatctgagggcatctgagggtaagcaggctcaggactggcccagatctgctgaaatccaaaacgtttatatgaatgactcggagtggaatttaagacacctctaaggctgagcaagaaaccgtgactatttgaggccagaagcagagacagggctgtcctcgtgatgagccacaatccagctatgtaagtgactgnctattctaag

SEQ ID NO: 629597 - DNA, 101 bp, Homo sapiens
ggatccctcggagtacgtccaagaagcacatattaggaccaaagatagcatcaactgtatatgaaggaactgtagtttgtgcgcatttcttatgacatttt

SEQ ID NO: 629598 - DNA, 245 bp, Homo sapiens
gtcgacctggagtcttggaagcttgactaccctacgttactcctacaaatggaccttgagagctgttggaggttctagcaggggagcgcagctactcgtatacccttgaccgaagaccggtcctcctctatcggggatggtcgtcctcttcgaccgagcgcgcagcttcgggagggacgcacatggagcggtgagggaggaaggggacacccgcctagccagccatatcagccgaatcaaccctg

SEQ ID NO: 629599 - DNA, 106 bp, Homo sapiens
ttacagaccccacgatcaccagacagagcctccccatctccttgctgcctctccctaaacaggagtcaggagacgaagtctctctctctctctttccagggttatg

SEQ ID NO: 629600 - DNA, 602 bp, Homo sapiens
  misc_feature (59)..(59): n is a, c, g, or t
  misc_feature (171)..(171): n is a, c, g, or t
  misc_feature (177)..(177): n is a, c, g, or t
  misc_feature (189)..(189): n is a, c, g, or t
  misc_feature (194)..(194): n is a, c, g, or t
  misc_feature (201)..(201): n is a, c, g, or t
  misc_feature (421)..(421): n is a, c, g, or t
  misc_feature (429)..(429): n is a, c, g, or t
  misc_feature (438)..(438): n is a, c, g, or t
  misc_feature (440)..(440): n is a, c, g, or t
  misc_feature (508)..(508): n is a, c, g, or t
  misc_feature (519)..(519): n is a, c, g, or t
gccacccagcagtatgtgggcccaggccaacagctggtccctggagaagctctgctgtnaagtcaacgtcccacctcacagggcgccacccttgacgcttgcagcttcggagtcacgggtttgaaacttcaaggggccacgtgcaacaacaacaagctgtcactgtccaangccatntcaaccgccttnccctnacgcagntgcgtgggtcaagcagacaaaccccgagaagaaggccagtgtggtaaccttacctgtctacctgaacttcacccgtgcagacctcattttcaccgtggactttgaaattgctacaaaggaggatcctcgcagcttttacgagcggggtgtcgcagttttgtgcacaaagtaaacttttctaactgcccccttctgtaatagtgaaaggtgggatttaacntttattcntttttaaanantttggaaggtttgagcttgtgaaaaaaaagtggttggttttaggttggaggaaactgaatggaatttnacggttgggantggtggaaattggaaggataccaggaggtatttgggaaggccaatggcgtggctcctttgaggaaataaaacactaagcatta

SEQ ID NO: 629601 - DNA, 561 bp, Homo sapiens
  misc_feature (34)..(34): n is a, c, g, or t
  misc_feature (376)..(376): n is a, c, g, or t
  misc_feature (462)..(462): n is a, c, g, or t
  misc_feature (473)..(473): n is a, c, g, or t
  misc_feature (483)..(483): n is a, c, g, or t
  misc_feature (514)..(514): n is a, c, g, or t
  misc_feature (519)..(519): n is a, c, g, or t
  misc_feature (541)..(541): n is a, c, g, or t
  misc_feature (558)..(558): n is a, c, g, or t
aaagtcataaccatctccattttccatttacttntaatttgaggtgtttgagtgtgtgcgcatattttaacaaccatataacaataatggaaaaagaaaagacacttcattcctgagaggtgaaatttaactccaacaagaaaattcaaatgttggcccaaacaggggctcactttaatattaaaaaccattttacgaaacataaacaaaaacaaaaaacttcacattacataaaattattacagctaataatttaaacaagaaattcatactgtttttgcactggatcgctttttaacacatactaccttgaagtcaaatagaacaagactgtattcctaactctaccagttactaattacaaaacagaaaattncctgaacctcaaaagtttccttgtctgttaaataccggaaggatgacaggaactatcctcacatgactaggtgacaggatgaagtnaaaataaaggnaaaagccctntacttagcccatgacattggattttcatttnatttngaggaaaatttcaacaattttnttgggtttccaaaaaanaat

SEQ ID NO: 629602 - DNA, 228 bp, Homo sapiens
  misc_feature (129)..(129): n is a, c, g, or t
ttatatcaaagagtgcaagttagatcaaacaacatcaagaaaatgcggtcctaaaatattaaggtcttttaagaaagtctaaaaacctccttttttcccacggacttcaaaacttggagttttatatcnagaatatcaagttggtcattttaacctttaccattacattgaaataattatcacaaaatatatcggatggggtctatacctaaatggtgctgggggtac

SEQ ID NO: 629603 - DNA, 144 bp, Homo sapiens
gtggtgtcgcggtcagccatgataccagacacagcgctggctggtgtgatgcaggcctgggtgccacgattcccagcctggagccgcgccaggacgtgggagaccttctcagagactctccgggcacactctatgaactccttc

SEQ ID NO: 629604 - DNA, 791 bp, Homo sapiens
  misc_feature (10)..(10): n is a, c, g, or t
  misc_feature (67)..(67): n is a, c, g, or t
  misc_feature (116)..(118): n is a, c, g, or t
  misc_feature (121)..(121): n is a, c, g, or t
  misc_feature (127)..(127): n is a, c, g, or t
  misc_feature (129)..(131): n is a, c, g, or t
  misc_feature (136)..(136): n is a, c, g, or t
  misc_feature (138)..(138): n is a, c, g, or t
  misc_feature (140)..(140): n is a, c, g, or t
  misc_feature (147)..(147): n is a, c, g, or t
  misc_feature (151)..(151): n is a, c, g, or t
  misc_feature (160)..(160): n is a, c, g, or t
  misc_feature (168)..(168): n is a, c, g, or t
  misc_feature (170)..(170): n is a, c, g, or t
  misc_feature (172)..(172): n is a, c, g, or t
  misc_feature (180)..(180): n is a, c, g, or t
  misc_feature (185)..(185): n is a, c, g, or t
  misc_feature (193)..(193): n is a, c, g, or t
  misc_feature (198)..(198): n is a, c, g, or t
  misc_feature (201)..(201): n is a, c, g, or t
  misc_feature (204)..(206): n is a, c, g, or t
  misc_feature (208)..(208): n is a, c, g, or t
  misc_feature (245)..(245): n is a, c, g, or t
  misc_feature (253)..(253): n is a, c, g, or t
  misc_feature (255)..(255): n is a, c, g, or t
  misc_feature (274)..(274): n is a, c, g, or t
  misc_feature (276)..(276): n is a, c, g, or t
  misc_feature (281)..(281): n is a, c, g, or t
  misc_feature (291)..(291): n is a, c, g, or t
  misc_feature (294)..(294): n is a, c, g, or t
  misc_feature (296)..(296): n is a, c, g, or t
  misc_feature (312)..(314): n is a, c, g, or t
  misc_feature (317)..(319): n is a, c, g, or t
  misc_feature (321)..(321): n is a, c, g, or t
  misc_feature (326)..(326): n is a, c, g, or t
  misc_feature (332)..(333): n is a, c, g, or t
  misc_feature (338)..(340): n is a, c, g, or t
  misc_feature (349)..(349): n is a, c, g, or t
  misc_feature (351)..(351): n is a, c, g, or t
  misc_feature (361)..(361): n is a, c, g, or t
  misc_feature (378)..(378): n is a, c, g, or t
  misc_feature (380)..(380): n is a, c, g, or t
  misc_feature (384)..(384): n is a, c, g, or t
  misc_feature (387)..(387): n is a, c, g, or t
  misc_feature (403)..(403): n is a, c, g, or t
  misc_feature (408)..(408): n is a, c, g, or t
  misc_feature (412)..(413): n is a, c, g, or t
  misc_feature (430)..(430): n is a, c, g, or t
  misc_feature (452)..(452): n is a, c, g, or t
  misc_feature (465)..(465): n is a, c, g, or t
  misc_feature (481)..(481): n is a, c, g, or t
  misc_feature (485)..(485): n is a, c, g, or t
  misc_feature (491)..(491): n is a, c, g, or t
  misc_feature (501)..(501): n is a, c, g, or t
  misc_feature (516)..(516): n is a, c, g, or t
  misc_feature (520)..(520): n is a, c, g, or t
  misc_feature (522)..(522): n is a, c, g, or t
  misc_feature (527)..(527): n is a, c, g, or t
  misc_feature (529)..(529): n is a, c, g, or t
  misc_feature (533)..(533): n is a, c, g, or t
  misc_feature (544)..(545): n is a, c, g, or t
  misc_feature (557)..(557): n is a, c, g, or t
  misc_feature (574)..(574): n is a, c, g, or t
  misc_feature (584)..(584): n is a, c, g, or t
ggaagatcancaccctaagagatgggactaggacctgagcctggtcctggccgtccctaagcatgtntcccaggagcaggacctactaggagaggggggccaaggtcctgctgaannntanccgtgntnnnattcntncntccggcnatantgcgtttgnagttggantntnagggattntgggnttggggtntgggntgnccnnncntcgcagaccaaaactatctaaactcacatatcaaaancctccaancnttcctccaaaaatcctctnanttttntcccttcctntcncnttatagacacttactnnnaannnantcacnacaacnnaaacnnnttttttttntnccttggttcntttttttattttccttntnattntcntccttgcccagactanagggnttannacttggtttgttatatnagggaaaaggagtagggagttnatctggagggttntaagtgggagaaggantatnaacacnactaggaatnccagaggtgggatcntccntnatggntntggnacagtgtaatnnaggggtgtagangggggaactgtgaatanttgaactttnttcccccaccctccatgctcctcacctgtctaggtctcctcagggtggggggtgacagtgccttctctattgggcacagcctagggtcttgggggtcaggggggagaagttcttgattcagccaaatgcagggaggggaggcagatggagcccataggccaccccctatcctctgagtgtttggaaataaactgtgcaatcccctca

SEQ ID NO: 629605 - DNA, 861 bp, Homo sapiens
agaactgggtagcatctgagccagtggagatttgtgacttctccttcttctaggagtgcgtgatcagaatggtgtctggacggttctactgtgtcctgcctgctgctggggtccctgggctctatgtgcatcctcttcactatctactggatgcagtactggcgtggtggcttggccgtggaatggctgtcgatctacatgttcgagactggcaccctagttgcttatggttgctggcatggttggtagttctatggaggtgcgtcactggttgtacgcgcctgcgcccagttcgtgggtggggcccgaacgtgcctggaagactcctccagtgcagcgctgcctcctgcatggccgttcgtcctcactgtccgtgggggctggtttggctgtctttacgttttcacaaccatggaaggtactggccaacgctctactgcccgtttcgacagctggcgtggggcattcgaccactgttcgttcctcttcgcctgccagctgggttcgcgtgggtctttgctgtcattcctcctgaccctgggcgtcgatgtgggatgcgcagtgctcctaaaacctatccacgttctgtcttgggagccgccagtccgtctcgtctgatcgcatcggcagtccggtcatttcggggcatctagagtgagaagctatgctctcagttttgaaaagacaccaccaggtccataccagcagccgtgcccagtgaggcggtcttatgccaatcagcaccgggatgctggtgggtggcctctgggctgctggtgctctacaatcctatctggcgttcatctgagaagacgccagagcggggatcctgaccgaaagagaggccctgactgcatgatg

SEQ ID NO: 629606 - DNA, 1530 bp, Homo sapiens
ctgcaacaaaggcttcaccacggcagcataacctgcgcactcacgcggtgaatggaccacgggctccaggccccgcgggttgagcgcatcatgtgcaatgctgtgcatgcgtgcactgcaaagacccctgcccagtctggccggccacatgcagacccatctggcgggggagccggccacacatgatcccgggagacgcaccaccagccagaagcccacacatgctgaggggagaccccacggcaccacacgcaggatacgtgcatgaggtcatagtccaatgcgcctggcggcagcgtgccagctggtgccgcgaaaggcaggcaagacgagcctggcgccaggccacgccaacggcaatgaccccgccatcccccacaagaaactagctcgcgcggcatccccactccatcagagcggcgagcaggaacggcgagcgattagcccttgctcgaaaccctcctccagacaccatgcaattatccacttcccaccaaaacaccgcgtcgcggatgagaggctctcccacacacgatccgggcgacatacggcggagagccagacagcaagaggggccaacgaacatcggcgcacgctaaaggacagataccgccactacaggggcgacccaaacagcccgtcgcacgtgcatcccccgcgcacactcacattctatcccgcaaccgccaacaagacctcccacataacatactctcgccgcgcatacaccccaacacaccgccaacaccgaacagaccccgccagccagaaagcgacacacgcgcccaccacccgcgagcgcgagagccacaagcagacccacaccacacgcctcggcccaacagcccactaccagcggcaggcagacacaacatacccgagccgctcaccaaggcctcgcccgaacaacccgaccaccagccacgacaacctaccactcccacaactcgccagcctcaccaccatacagcctctcccctcccaactccgcagcaccaccctctaggcgacgacccacccacacagccaaacaacagccatgacaccaccgcgcaccacacgcggcacgcccggtcgagcacagcaccaacgcagacccaacaccgcacttgcaacgaccacgccatcgcgagcgcaccaaagagcgagaaagacacagcgcgcccaaagagggcacaaacacggcaaggccaggacacaccagcaacgacaccaccgagcaatacagcgcgccgccgcatccaatcgaccaccgacatcgagggcaaaacaagcaccacgacaggacggcagcaccactcggacgagatatgacccgcacaaacggcagcgacaagactcgacgcgtgagcaaaagcaccgcccagcacaacgaccgcacaccgatcacggccgaagcgacgggcactacccagcacgaacacacagatcgacccagcgcacatccgcagcagaaaccaccttacgcaaccacccctgccccatgcaacagagtgaccaggtaggacgccgagcaccgacaccacccag

SEQ ID NO: 629607 - DNA, 441 bp, Homo sapiens
tttgcctgctatatatatttacatacttctttcaaattttccatatccttaggttttagttgtcatcatttagaatagccaatgtaaaatatcatttttgctgatagttagcccatcttgcataagcttctggacacatggacgctggaaggtccatctggaccatctggaaaacagaccttgaggcaaaagttcatgtgttacaactttcttgaggcatagaattttcagaaacgcaagaggacacggaaacattcaagactaaggagtctgtccctagaattttttattcgcagccttgcttgacagttgattgctaattgttgtaggaagtctccagagaggctatatgcaacatattataaaaaataatttacaggaagggatggcaaacatttatttgctgcccccctctgttttctccctttgattggttaacgt

SEQ ID NO: 629608 - DNA, 188 bp, Homo sapiens
tcatccctgcatcactcggaatgcatttcacacgtgctgcatggcacagtgcattcaatcaccctgcatggaatccactgcattcaatcggtatcaattacaccaatgctgcatggaatccacttcattcaatcgagatacattgcaccacatctgcatgtgaatccaccttcacatcaataattgcg

SEQ ID NO: 629609 - DNA, 229 bp, Homo sapiens
gcctataccatctagctcgccatgaggaacactacagtaacaacaccacggtccatagaagcataattagtaactatacagctaggataggctagcaggcccacccaagggtagcacataacactaccccaccctactactagcaggcaagcaaacaccgataccgaccgcaccccagcctacaagcgggaaggcctatatatcccctagacgctagtaaaactagggg

SEQ ID NO: 629610 - DNA, 311 bp, Homo sapiens
cccatcgcttgaagtagcgaatggggtttggtacttagagcatttgcagaaaattaatttttaagctgttgtaaacctgtttttagcaattactttgataaaaggtgacttatcatgaaacatacgggaaaaaacgtcgttgtccttggtagccagtggggcgatgagggtaaaggcaaaatcgttgacttattgactgaaaaagccagtgcggtggcgcgctatcaaggcggtcataatgccggtcacactttagtcgttggcgagaaaaaaaccgtattacatttgattccatcgggtattctacgtga

SEQ ID NO: 629611 - DNA, 454 bp, Homo sapiens
gaacccctgggaggctctcgggttctccccaaggccccaggggtttttttccaatttgggcccccggcctttgcctcttcccctatgggggcccccaaagggtgagggcccgggcaaaaaggggctttcctccctgggggaatcccataaagcccctggttgttctcagggggcccctttccccaattgagtgaactgccttgtgccaaggggcttggggttcctgaaaacttcaagctccgggaaaatgggtgggggcccgttttggcaacccttttgggcaaaaatttcccccctggggggcgggcttcctggcaaaaaatggggattgggggggccagggccctgtcccccaaaaacccttgggcccccggcccatgatgcagggctttcaaggatgggtttttttttgcaacccatcaaataataaattttttttgttaagggttcccca

SEQ ID NO: 629612 - DNA, 464 bp, Homo sapiens
  misc_feature (114)..(114): n is a, c, g, or t
  misc_feature (139)..(139): n is a, c, g, or t
  misc_feature (141)..(141): n is a, c, g, or t
  misc_feature (207)..(207): n is a, c, g, or t
  misc_feature (235)..(235): n is a, c, g, or t
  misc_feature (250)..(250): n is a, c, g, or t
  misc_feature (255)..(255): n is a, c, g, or t
  misc_feature (277)..(277): n is a, c, g, or t
  misc_feature (300)..(300): n is a, c, g, or t
  misc_feature (312)..(312): n is a, c, g, or t
  misc_feature (374)..(374): n is a, c, g, or t
  misc_feature (408)..(408): n is a, c, g, or t
aattttagtttttagacaaacacaggatctggttttccatttttgctctgtatacaaagtgacgttaaaaccatttcaaagtcaaacaggtctcctctccatccctcagccctnaagaattcaaacagggctgggtttngnttggcagcagggagtggcagtagctgtgaaaatgcttgtcaaatgtaagaaggtgtgatatgcttnaggaaagaaaattgccaggagcaagaanggatagaaaacatgnatacnaattgaaacagctgcagaaganacatccagtttggtatatccatntggtgatctctntatcagaactaagtgtcttaacagcccttttgaaattgaaaatggatcttccatcgattcanagctatcactggctcaaactagctcttggtcaangaggtcatctggtaggttactgcccactactacacactggagtctacatcaaactt

SEQ ID NO: 629613 - DNA, 698 bp, Homo sapiens
taaagtctgcaggcccaaatgaattagttaaactgtagactctttattggtagatttgtctgggagttttcaaagggactccagagcagctcccatggagttccccttccagcaaatcagctatttccggaagttccaccctttacagctctagcctgtctcttttttccgtcaactaactcccgtctcaggcctgttacatttgctctccaaacattagactctgaatcacattgggcatttgtctgtctaggacagtgttttaaactgaaattcaggaccattaataaatgatgaaatcattttggtgggcaacaactaaaaaaaatttttaatgttttatttgaagtaaaacatacagaaaagtaaacaaatcataagtacagcatgatcatattttcacaaagtgaaagatacccatataaatcagcacccagatctagaatcagaacataccagaactccagaaagtccttgtgtcttctgttcaattcctaacacacttagaactacattataactggagtccataccttttcttttaacattggtttcatttattaagtgagaattcatccaatgtcgttgcatatagttgtcatttttaccattctcatgctggggtaggattggcgattataaggcatttaccaaaaagtctatcatggtgaagggacattggggtatttcagattggg

SEQ ID NO: 629614 - DNA, 199 bp, Homo sapiens
gcgcatcataggtcaggatctcacattctgtccagataaaaccgtcatgtctctgcaatgtcgttcccaactaagtgttattgaacccaatgtctggatacagtacgagcactccctcgatgatactcagttcagttcacgggggaatcagacgtttagtcccctactctgtctactgaagctgctggtgccacgggtc

SEQ ID NO: 629615 - DNA, 276 bp, Homo sapiens
gataagctaaacccaaaataagcagaaggaaggaaataaagattagagccaaaataaataaaatagaaatagaaaaccaatagagaagatcaatgaaaaaaaaatgggttctttgaaaagataaacaaattgacaaacctctaagtagatagataaaaagataagctaaacccaaaataagcagaaggaaggaaataaagattagagccaaaattaataatatagaaaatagaaaaacaatagagaagatcaatgaaaataaaatgggttttactg

SEQ ID NO: 629616 - DNA, 100 bp, Homo sapiens
gatagaaaaaagactgccagtttttccttgactctttccgttgcagaagcgatttaacagtgactatctcaaaaaataaaaaatggttaggtctacctgg

SEQ ID NO: 629617 - DNA, 124 bp, Homo sapiens
ttttgcattcttttggcctcattccagaggctcacgagctagcaggcataggagccagggagttgcaggttgagaagagaagcaggttttgtacacgtgggatggagtgtgcgtgacataggga

SEQ ID NO: 629618 - DNA, 199 bp, Homo sapiens
  misc_feature (77)..(77): n is a, c, g, or t
  misc_feature (92)..(92): n is a, c, g, or t
  misc_feature (154)..(154): n is a, c, g, or t
  misc_feature (168)..(168): n is a, c, g, or t
  misc_feature (172)..(172): n is a, c, g, or t
atgtgcagcgccaggtgatcggagcgcgagaaggcacgatcgcacagatggcactggaacatgcggtggcccgtgtnctctcggtagtggcncgtgagctcgtctgagcgcgcaaacttccagccgcagccgtcccagttgcagtggtagggcntctcacctgtgtgncgcncagatgcgccttcagatgcgaactctt

SEQ ID NO: 629619 - DNA, 1434 bp, Homo sapiens
tgctatcaacagtagcttggacggaacccggcgctcgttccccaccccgtgccggccgcccatagccagccctccgtcacctcttcacctgcaccctcggactgccccgaaggcccccgccgccgctccagcgcctgtgcagccacctgccggctgccgccggctctccttagtcgccgccatgacgacctgcgtccacctcgcaggtagcgccagaactaaccaccatggactcagaggccgcacatacaaccgccaggatacaacctaggagctactaacgcctaccgtacgtaataacctagtacccatgtacttaactaactatattgaccgcggatgatagtaggctatacgcacagcaacgttatgccaaataactattccttcacccaactactaccatgcaggcagagcgcgaacgatagcttgacgaacactagactagaagcctgcgagacaccaacgcaggtaggcgcgaaatactatacctatacaggccataatacaacgaaaaccgagactagtagatgcactagcggagcagcgggcgctgacatagcaataggagtagttgcatataccatattgggacaaaacaaatgtagacctccactcacctaacgtgggaaactggcacgaaactagggcgacttgaccaaacacattgacccccccattattggtgtagactatacatatgaagcaccaacaattaacgctgagattagagcacgcgtgaagagccactcgacacggactatggcgtgacccaacgtagagccgaagctttggtgccgctgattgggcacgcgccccgcacatctaggctatgggcggcgccatatactctttctgcccaggccacacccgtgggggagcacagcgtgcatacgtctaccgagcgtaaggcgctcgggcctacagtaatcccccgaataggccgcggggcgttgactttcccgctgggtctccccgcagggcccgtgggccatttccgtgatacgggcggcattccctttaaccccattcaccaaagtcacgactggatccgcgacaaaccaattcccccttcaagcatctttggcggcttgggacccccgtactccttcccgactacggcaacttcgggctcaccccccgggaaccacagtcgaaacaccaccaccgacacacaaccaacagcagcagcaccacataacatgcggggcgtggccacacctgaccacaagacagcgaccgagcccgcacacacacagctgacccctactatataccaagcggacaacacgcgggcccccatgggggagttacagaacggcaccaccccacaacgctgaacaccgcacacccaccaactaacaccaacaaccaccaaatcctacgcaatagcgaaccacatcacaccagcacccacgactgacacgacaacac

SEQ ID NO: 629620 - DNA, 993 bp, Homo sapiens
tctcctgcctcagcttcctgagtagctgggattacaggtgcatgccagcatgcgcggcgtaatttttatatttttatgagagacgggatttcgccatgttagccaggctggtctcgaactcctgacctcaggtgatctgcccgcctggctcccaaagtgctgggattacaggcgatgagcccaccagtgcctggcgttatggcttagtttttaaagttatccgtccagaaagatttgggccttttggtctgtggggaaacaagtgaagctgctcttcagcatagacactaccgtttatcccatcattgtagtaaaaactaggtggtttcacttctgaggtgtcttattaattgtacttcatctgagaattggtgatcttaatgtgcgagcgtatataagaactgccattaaaaaaaagtgggataatagatgatgtttatcagtatacctgtggaatatgtacaaactggatctatagatatttggaagtggacaggtgggtatttgaagtaacccatcaaaatatgctctgagtgattccgcttaatgtttaaattcagtaacgtagtttgaaagggaatttcagtgctttgttatgttggaggagggttagtgatgcgtgtaagaagcgatttctgatgagggatgaacttgggcttattgttttctgggtgaagtctcttctttaggaaaatatggggttggtcatttttgagattcgtacctttttgaatgtatcaggtctcagtaaccaggaaagtcaattgcgggttagtaaggtgttacgacgttagaatttctttggtttggtaggccaggtgagattacagaacattttgttagcgaggtatgtataaggagaatagcagttggggtggaacgagtaaagtttgttgtacggtgttgcaaatcgatgtgggagggtattggtaactgagtcgaggtgtagggagattgcagggcaataacttttgtgtttatctgtgtgtttgt

SEQ ID NO: 629621 - DNA, 119 bp, Homo sapiens
ccatactctcgacaggttgagactgtatcaggttgcgatatcttgcgctcaggtgtctgggattcgctcaggtacttctctgagttcttctgtacagcatccttcactgtcttggtcag

SEQ ID NO: 629622 - DNA, 365 bp, Homo sapiens
tccaccacggcatgtaatcgccccttctgtgaatagtacttctatcttatgctcatcttttattctattgagtttcttttctttttcttgttgattagcatacatccgtaggaatagttacaggaaacaagtccagtcatgggtttggtgtggacaagtcgctgcagtcagtcccatctgtgtgaaacttgatctgtggggagcatgtgttctctcatcgtttcgagggaatactgatattatatattcgagtatttgtcggattacatgcagctggtaacctgaacttgttttaaagcctgatgtctttggagtactgtgtcacccctgctgtcctggctgagtagtggtggaatgtgtcaatg

SEQ ID NO: 629623 - DNA, 205 bp, Homo sapiens
acacgacctggtgggcaggagaatggcttgagcccaagaggttgagactgcagtgagccaggatcatgccactgtactccaacctgggtgaaagagtgagatcttgtctcaaaaaaaaaaagagagagatttactgggcttttggctatttaatggccaaatctaattataggctttaccacccgagggttaacgctttttacta

SEQ ID NO: 629624 - DNA, 353 bp, Homo sapiens
tttttttgcctttcccatattatattaaattcgtgttttattttaaaaaattacagcaacactatcaaagacaacatatgtacaaacattttaaaaaaagaacattaccatatcagtggcagtaaggcaagctgaaaaataatagactgagctttcgggaaatgttgtcctaaaagacatccaactgcgttcaagcagcttgaacaggcttctttccagtgaccagcatatgttgttagttatacaacgatggtaaatgaggctactacatagggccagttatcaaaactcctcttctcctcgggtaggccatgatacaaagtggactcatcaaataatttaaaaccaaagcg

SEQ ID NO: 629625 - DNA, 1074 bp, Homo sapiens
  misc_feature (526)..(526): n is a, c, g, or t
agcggggtgtgcaggcaagctgggccggcgcggaccaggctctcttgtcgtcaagcgcgctgtccgcttctcctggtgacggacgcttctgagaggctaaattattctacccgtggcgtggcgggctggagacgcacgcggtgtagacgttggccgtgcacaggcggcggggaggaaggactgaccattccgcttggcggcaaccgaccgggtagaggcgtcgtgtgggcgttgttaaccgttggtgttcgacggatgcgatcactatggcttagtcgctgttagcgtccggcggacgtctctgtggattgccagatgcctaggggggcgcgcatcatgacgtaccatggcggcgaatcgtacacgggcgtgctccggacagggccggcataagaagagcgcgtgtgcccgtgtgctgtagagcaaacctcgaacgtcggcgcgccagggcttttttccaaccgacgtttgtggaccggacgaaagcatgcgtgccagccttgatggcaagctggaagaaatggcnctggaactgggcgcctgatcgtggggcgcgcacgcgtaccactaggacaggatgggcggcactgaatggcacggcactacagagtgctaacatagaattacatgcaagtttgtaacccgaaatggtctgacgtactaagcaagtagcaggcgttgcatgtagcacaattctagttcgggggttgttcacctccaaaaacactctagagcagctaacgggcggaaaacctgaatttgggttcgtccgaaaaggccggcgaggttggccgctacgcggaggaacgcgtctttcgaattagccaaagcgcttggtgctagacagtagtaaccgatttctgccgggaacgactttggcgaatgggcgggagacccacgaaagggatcgaggacagtagaagcttgaggtggcctggtaggaagagccttcgtttttattgaaacttccggcaagagcggtgcgttagacttcttcgacagcaaacgatttagtaagcaatgaaactggccgcctctctataaggtcttctttgccacgaagaagaggaatcc

SEQ ID NO: 629626 - DNA, 981 bp, Homo sapiens
cccaacgtcgtcgggacactagtgcgtcggatccatcgcgtgccatatagtaactgtacaaacctccggcagacaataaatgcaaccatcaggatacactagagtaagtggtctgagctatgatatctaatcgggttccgtagggttaatcgggtgagcaccaccatatatttgatcagtaggaatatacgtagcacgcggcagagcatattctccaccgtccgctaccgataattcaatcggtcgtaaccccaacgccgagcagtcaaagagtattttaaccatgacatcggcacgatcgactcgctacagcgaagccaaataattcgacaatggatttggcctgcgagatgcttcatgcagtctcactcacagactaccaatcggttactatattacaactgctgaagctgagcctgcacatggactgttggtatttaggcgaatagcttcgagttcaacatataacaattccgctacatactactgaacacagtactgtacggtgggatcacgcatcactttcccaagtgatggtccgtcatccacaataagcgcagcatggtaaatatatgccccaatcaaatatgagacgggcttcatttcaacgagtcactagtccacctgagttcttccagcgtgtgaacactccctgaagagaaatcagctttagggcctatgatattcaatttgacaacttatccaataatctctattcagaggcggtcaatatcatataacgtattgcatttcccacaagcataggaagcaaatgtctcccgagccttataacagcgagtatggcgcgccgaacgtttgcttcgggaggaatcacccggatggcaatattacctacattgaaacatctatcctgatactatctggtaggctccattctattttacgtcctagaacagctgaagattatttacccctattttgcgaggacaccgaggaaaacctttttgtcttgaaaaccta

SEQ ID NO: 629627 - DNA, 180 bp, Homo sapiens
  misc_feature (14)..(14): n is a, c, g, or t
cacgttacctaaangtatctggggtactaggcatgggagggtttcaaggctacctggcactggacgtaacagccaagggactcctagtcctggggtctccgaggtcactataccccgctgcgccaatggcagtgtataggaatgtaaaacatgcataatatgtggacaaccccaccatga

SEQ ID NO: 629628 - DNA, 237 bp, Homo sapiens
gaccgaacaagtcagacactaccgatgtcacggcggcaatgacgttagcctttttctaccaagcctgtggtccacagaaaccagcggttaaacccagtgcaacaagtgttcttctgtgcaaaagttaatggtgatgcgatacgtggatgtttctccgctttaatttcattcagctcatgatcgccacgtaagaacaatgccactaccgatgttgcttgcgcttcttcggctgcaata

SEQ ID NO: 629629 - DNA, 839 bp, Homo sapiens
  misc_feature (496)..(496): n is a, c, g, or t
gtactcttaagctcctagcccagcctagcgtgccctggtccctctggccactgcgtgcacacacctgccttaacacacactacgcaaaaaaaagaagtacaacaaacacaaaagaatgaagttggaaaaaaatcgggggcggggcgtgtgaaaaatatacctggcgaggcgatcgctatattcgtgataggccaggcgagtatcttgctctgctacaaggtgggggtcccttggatacgcggatagatctgattatgccagtgagagggcgtccgtgtgctctccaagaacctgtgctaccacttggagatccctgatggatctttaccatgatgttacacgactactcactttggtagtaggaacgacgtcgtgcgcctatgcacccttgagactgatagtttcctttcgaactacctccgtatactctaatagcgcactctcagagcgacagccatccatagatcaattcgcgatcttatacgcgccgatgttnccctacgccattgggcggcctcgatccgttcgcatatacccggtaaaagaccctatgttagttgcgccaagtaaagacatccgtttcgcgacgcgtgttccacttcccgatatctttctataagtcttctggcttccagcaaattagcatgggagcgctacgacagggatctaccaacttctttaacaaagaccactgggctcttgtggaatgaattaacgggtttagctcccactctttaacggtaccatcgccgtaccagaaggtaatttcaaaaccacggacgactagggttgggaatacgggctgtcactggagttacactcacataaggggaactttg

SEQ ID NO: 629630 - DNA, 903 bp, Homo sapiens
tctggttcgcaagagtaagaagcatagaaacagataagaaaaagacggatgacaaagtaagaaagatgtaaagctggtgtcccgttgtaatgccgcatatagacgcctggtgaacgcaagcccggtgaccaccatggtgttgcggtagcacaccactgttgtgggcgccaattctgccttggcactttttagccttctatgattccataagggccacaagggttcctacaaggggctaacaattgtcacgctggtaaacccacaaattgcttctgttgtgataatacttgcacattggcaagagactttttgcttgctaaactctggcaaaatttgtttccccctggacagtgaagtgccctcttccttttgacaacttccccaatgcccccccctaggcataatacttttcccgttgaagggcaaaacaccttaggttctcgcgaaccaactaaattttcgacgagagaaattgtgtcacccccccctatgggttgaggttttctgaacccacttcttcccaccgatttagtggtcgtatacttcacaacctcagtatgactccttcaaaccctcattgtgctctgcccaattacaccgtaaccacaattacgtctcgacagttccaatgtcaataagcccagtgtgtcaagcaaaaaccatgcttacccaccaggcctcctcactttcacgccccgtcaactacacatttcgagccctagctcaccacggtctaattatgtcttcatccatacttgaccagacgtgtctcctaccttgcgacatacttatttttcaactcggcgcaaaaaaattcgtatccttttctagacgccaaaaataaaaaaccatggtatatgcggaaataaaaaaattggtacattgtggccgccccaacatagc

SEQ ID NO: 629631 - DNA, 981 bp, Homo sapiens
gaggtcagtcttgatatagccagagagttgcgttttccttgaatgcttgcatgcgtgctagggctgtgagcccacataggccagaattttgcaataactttcagattccatggggcatctacctctgcctgctgaaataattagttaccatccatgaattggtgttccagttctctttagttttcaggcaaaagtttccagacattacctgagtaaaaccagcttatattatcacgttttcagagcatagtctagtggtcaagagtacggactctagagccagaccatctctgtttgaagcctggctattctgtttactagttttatgggctacatggattaagttatatagcctatgtgtgtctcagttctcctctgtaaagcagaaatacacacctagtaggtatgttgtgaggttttaatgaaatacagtaagctcttaaaacagagccctacgtatagtaaatggcattttatgaagtttttaataaagttgcaatatgctagtatgtccagaattggttccttctggtgggttcttggtcttgctgacttcaagaatgaagccgcggactctcgcggtgagtgttacagttcttaaagatggtgtgtctggagtttgttccttcagatgttcagatgtgtccggagtttcttcccttctggtgggttcatggtctcactgacttcaggagtgaagccgcagaccttcgcagtgagtgttatagctcttaaaggtggtgcatccggagtggttcgttcctcctggtgggttcgtggtctcactggctttaggagtgaagctgcagaccttcgcagtgttacagctcataaaggtagtgcggacccaaagagtgagcagcagcaagatttattgtgaagagcgaaagaacaaagcttccacagcgtggaaggggacccaagcaggttgccgctgctggcttgggtggcctgctttttttcccttatttggccccaccc

SEQ ID NO: 629632 - DNA, 156 bp, Homo sapiens
tctgcgtttctagaggatcccggaacacccgctacgtgagtccatattgatgccgaacttagtgcggacaccgatcggcatagcgcactacagcccagaactcctggactcaagcgatcctccagcctcagcctcccgccgtagcgggatgttgcg

SEQ ID NO: 629633 - DNA, 446 bp, Homo sapiens
caaaggttagtcattcctgtgattatgttttgtcatataagactccaagaccagccagttggccttgaagaccaaccaaacagctgtgcagtgagctaccatgtcctaaaagggccatttggctgggacttcaggaacgctctaggagttgagagtgacccccagttgacagccagcaagaaaacagggacttcagtgctgcagcctcgtggtactggattctgccaacaactacatgagctttgaggacccagaggcttacaaaagaaccacagcccctacagtgacaccttgagttcagtctggtgaccccctggacagaggacccagttaacctgtctggagactcctgacttacagaaactgtgagataatacatttgtgccgttgctgtatattctcatgtagtaaaataaagacataaataaatttatgttgctttaaaa

SEQ ID NO: 629634 - DNA, 466 bp, Homo sapiens
tgctgaagaagcccgactggttgtcccaggcgaaatcgccgttgtagacatacacatcgtcgaaatcacgcgcactgagcaactgcggcaggcccgacagcttgtggctgcctttcgggagtctgcatcaggtattcgaaacccgggcaggttcgggaagcagggcattggtagcgaacataccctggtgggtgtgggtgccgttggagaagaagcggtcgaacagcaagccctcgtgggtcaacttgtcgaagtacggggtgatattgcccggacgtcccaatgcgcccaccgaatgaccagcgaagctttccatcaggatcaccacgacgttcttgatcggcagggttttctcggccggtggcgtgaagtcacggcgcacggcagcggtgtcggtgtctaacagcttctcttgcgggagcaccagcatgttacgcacggtctgggtggccagcggttgttccag

SEQ ID NO: 629635 - DNA, 301 bp, Homo sapiens
gtgaacatatttttgaaaggaaacaaaattgacaatcctttagccaacaactagaaaacagagaaaaagcaaatacaatcagaaatgaaaaaggagacattacaaccaatactgtagaaaatcaaaggatcattagtggctattatgaatgagtatatgccaattgattggattatttagaaaaatgagataaattcctagacacatacaacctaccaaaattgaagaaggaggaaattcaaaacctgaacatacccataacaaataccaagatctaaagcataatagaaagaatcctagc

SEQ ID NO: 629636 - DNA, 977 bp, Homo sapiens
  misc_feature (316)..(316): n is a, c, g, or t
  misc_feature (975)..(975): n is a, c, g, or t
  misc_feature (977)..(977): n is a, c, g, or t
ggtccccacggcgggcagcagcggcggggggggtgaacgcgagggggcggagggagcccgcggcggggagaagtacagcgaaatggcggaagaccggtggctgacaccccggcgggtgattcaccagagccgcaggaacccttgaattgagcgcgctaagcggacccccccaggcaaaacttccctcgaagatctgatggtgaagcaacccgcgcaaaccggggtgggggttcaggcccggggggccgcggtttacaccacactttaaccgaaaacattcgaggggttcaaaggaaacaattcctttcctattttncagggcgtgaaaagaaatcctacgtgtcagaaagaaggatacgggtgaccttgtgaaagtgcgctggcgaaggtggaaattaagaaaagggaagaagaacgcagggttccgtaggtccccccgcggctcccctgagagaacagcagtatttgggggtacggcttccctttttaagaaggcaagatgaatggacattattcgtggatgaaccacttttattgtgagggacaacgaaaaccaagggctggacgcagtttataaacaagggtcggtgttcatccttcttggcacagaccgaaccgtttgtcttcacttggtttttcacgaggatgaaataatagataaaggctatacttccattctaaaatagactgctgaattgtgcagaggggcaaacgtgactatatgattgtaagccagtggagaagtctaatttagattgtgaaggaaatgggtaaatgcctaagttataactcaatgccagttgttgttggcgtgcacgagtattggttgaaaatccatcagcgttataaaagcttggggaggggcaaagcccacggttcggatggggacagaggggttagagggggtgtgagagaatccttgtgagtgggagtcgtatttgttttttggtgtggaaatttattattgattatttngn

SEQ ID NO: 629637 - DNA, 478 bp, Homo sapiens
  misc_feature (103)..(103): n is a, c, g, or t
  misc_feature (178)..(178): n is a, c, g, or t
  misc_feature (309)..(309): n is a, c, g, or t
  misc_feature (341)..(341): n is a, c, g, or t
  misc_feature (343)..(343): n is a, c, g, or t
  misc_feature (383)..(383): n is a, c, g, or t
  misc_feature (476)..(476): n is a, c, g, or t
  misc_feature (478)..(478): n is a, c, g, or t
atgatcccaatacgcaaaattaaccccctaatttaattaaccactcattcatcgacctccccaccccatccaacatctccgcatgatgaaacttcggctcacnccttggcgcctgcctgatcctccaaatcaccacaggactattcctagccatgcactactcaccagacgcctcaancgccttttcatcaatcgcccacatcactcgagacgtaaattatgggctgaatcatccgctaccttcacgccaatggcgccttcaatattcttatctgcctcttcctacacatcggcgaggctatattaggntcattctctactcagaaacctgaaacatcggnantatcctcctgctgcaatatagcaacagcttcaaaggctangtctccgtgagggcaaatatcattctgaggggcacagtaatactttatatccgccatcccatacatggggacagactagttcaatgtctgggngn

SEQ ID NO: 629638 - DNA, 127 bp, Homo sapiens
tacaaaacttatgcagtttgacttctttggacaaaggactttaggaaaaagaggaacaaagacattatttgagaattaaattatatattttgaatatgactgtgacctggactggatagattagaga

SEQ ID NO: 629639 - DNA, 105 bp, Homo sapiens
gcggccgcctactactactactgctcgaattcaagcttctaacgatgtacggggacatgccgttgcactccagcctgggtgacaaagcgagaccctgtctcaaaa

SEQ ID NO: 629640 - DNA, 455 bp, Homo sapiens
caggcattgggcccgcagcgactcccgcctgcaggccagaggcacagtcgctctcccagtccccgagggacagagagacacctgcagcacggcaatcccctacacctgtgaggccccctaagcccgcaagccccctacacctgtaacctcccttcacctacaagatccctgcacctgcaaggacccctacacctgcaacttccctacacctgcaatctccctacacctgcaacctccgtacgcctgcaacctcctttcacctacgagatccctaaacctgcaacctccttacacctgcgtgacgtcaccccggctgaggcgctggcagaaggcggtgcgggtggagccttcgccaacgtcctgggccccctgagtgctgcatgccagtcctaccagccgctcggtcatctgccaccgcccagcaatggcttcagcatgcagtccctgctagggga

SEQ ID NO: 629641 - DNA, 135 bp, Homo sapiens
ggaaaaaaagtttttgccgggcccggaatttggttccagccccccggcccccccctttttgggggattgggattcccttttgggggggcccaaggttttccctttccccaccaaaaaaggaacccctttcggcca

SEQ ID NO: 629642 - DNA, 485 bp, Homo sapiens
  misc_feature (74)..(74): n is a, c, g, or t
gttgagcttgccgggatactgtgactttttaactggtttctggagttctcataaagtcttttcgggccatatgntgttgttaagtcagtatctctgtgggggaatgaggtctggggattcctattccaccgtgttttctcttcttataaggatgccagtcatgttggattagggccgcacactattccagtgtgatctcatcttaacttgattatatctgcaaagagcctatttccaaataaggtcacattcacaggtgccaggggttagggctttaacttatcttttaggggtacataactgaacctacaatagcttccaccactgctcataaaaagattgaggctggatgctcactctgtgatcccagcactttgggaggccacaaggtggtgggtggatcgcttcagcccagaagtttaagaccagcctgggcaacatggtgaaaccctgcctctacaaaaagaacaaataaattagctggt

SEQ ID NO: 629643 - DNA, 311 bp, Homo sapiens
  misc_feature (228)..(228): n is a, c, g, or t
  misc_feature (252)..(252): n is a, c, g, or t
  misc_feature (277)..(277): n is a, c, g, or t
ttcatcctgggcaaaatgagatcacagtccccgactctcatttgccctcttttctgcttttattttattttatttttttagagatgggctatttttacgttgcccagactcgtctcgaacacctgggctaaagcaatctgcccacctcggcctcccaaagtactgggattacaggcaggagccactgtgtctggcccaatgcttaagatcttttgagacaaaaaggangaagttggagatagttttcaatancacaaggaagctcagaaaaaaaaancaccccccaacccccccaaaaaaacacacttgta

SEQ ID NO: 629644 - DNA, 492 bp, Homo sapiens
  misc_feature (455)..(455): n is a, c, g, or t
  misc_feature (492)..(492): n is a, c, g, or t
cgcgatcgtaagggctgaggattctaggtccggacgctactgctcgtgactcaccgatgttcgctctagccgggtaacatgtagctcagtaagcccgaacgcaacaggcatggcttgtacggataccgtaataacacccgtggagacgaaggtggcagttcaccgcattctaatcaccctgacaagccggagcgttctcacagtgaacggtccagttcgcatgcctaccaagactttgagaatcactacaagacaaactcgttgtggtgaagcttctaagactcacagatcgttaccagattagaattcacaagcgagtcatagacttgtacagtcgttgtgagattggtaagcacattactatcatgcagatcgagccagaagatgaggcggatgtcagcattgcagatgcttaagtccactattcgaatcaatagatgactagttgtgatcantgtccctacagacctcgagcagtttctttatggcgtn

SEQ ID NO: 629645 - DNA, 209 bp, Homo sapiens
tgatagcacgcacccagctacttttgcattatgtagtaaagatggggttcaccatgtggccaggttggtctggaactcctgacctcaagtgatctgcccgctcggcctcccaaaatgctaggattacaggcgtgagccacggcacccggccagtgacttttaccttcactgatgaattcacaatctcttacagagctctcttacgctct

SEQ ID NO: 629646 - DNA, 308 bp, Homo sapiens
taggattatcctcagctggaaaaagacacagagtattgcaagtgagtctgcttctctccaccgccagtgctagtcagagcctccctacggtgctcagcaagaccccggctttacagcaattcactctgcaaatgaagccttcaccatgagcagctttcccagtgcacaactgtgggatttttctgcacggactcttggcctgggcccatccgacagtttataaatgaaaggctccagccggagctgcaggagagcagagacaggagcggagacccttgagtcatccaaccccctgttctgtgctacac

SEQ ID NO: 629647 - DNA, 387 bp, Homo sapiens
tctagaggttcccctggcgtggtcgggctacatagtgtacatttaactacgctcttttggcttttgctttatttgaaagtttttttatcctatgctagtctcacagacatcgatttgtgatagcatttgagctgatgacatctcttcctttttctgcaacatatctcagtggctcattatgttgctcttcatcactcatatgtgcagcgataacttacccagcacattctaatcactaacacctcaaacagtagcctgtgaaccttattggctacaggtagtgggatctgatacgctgccctgctgtagcattccaaacctaggtacagtggatagaacaggatataagacaatttataacttttagctgcaagctggtttcaattc

SEQ ID NO: 629648 - DNA, 325 bp, Homo sapiens
  misc_feature (217)..(218): n is a, c, g, or t
atcgcggccgcgtcgacagcgtccgttcggcgtcgggccacaagcgggcgcggtcataaatatgggtcagttcgtgaagaacggtggcgagcatttcctcgcgcacggtgccgtgggaccgattggtttttttcgtcgcggccgaaccgtccaccaggccgggcaacagcctgcgattgaggtccacttcggagaccaatgaggcctcgccgtagcnntgtccggcatctgggtcgaccagacaaaatcaatgctgcggtccagctgttcgataaaacgcggcggcagatgggccgtcgacgcggccgcgaatttagtagtagta

SEQ ID NO: 629649 - DNA, 326 bp, Homo sapiens
cgcagacaacacatttcccactgacttcatgcctcgacaatacctgggaggttaacagtggaaataaagagaaaaacatggaataagaatttataaaaccacaaaagaaacctcatgatctttgagagaagttatgtgcaccacatgtatacgtaaactaaatggactgtatatataagaaagaatttttaaaaacaaatgggaggaacaaggtgaagctgtgaaggacctactgatatcttagcagggggcacaggctccttctagcaatggaagagagtctgtacacaccaggactaacctgtatggagacaggctcgccaaat

SEQ ID NO: 629650 - DNA, 389 bp, Homo sapiens
  misc_feature (52)..(53): n is a, c, g, or t
  misc_feature (271)..(271): n is a, c, g, or t
  misc_feature (342)..(342): n is a, c, g, or t
  misc_feature (345)..(345): n is a, c, g, or t
tactactactaaattcgcgggcgcgtcgaccataggcaaaggtaatgaaaanntccaagatgtctctgaatcctcctcacagacaaggagccttggctgggcacagtggctcatgcctgtaatgcccgtactttgggaggccaaggcgggaggatcgctggagcccagaagattgagaccaacctgggcaacatagtgaggccctgtctctacaaaaataaaattaaaaaataaaaaactagctgagacatggtagtatacacctgtggtnccagctactcaggaggctgaagtaggaggatcgcctgaacccaggagtttgaggctgcagtgaaccttgantgngccactgcactccggactgggcaacagagggagactgtgtcttt

SEQ ID NO: 629651 - DNA, 221 bp, Homo sapiens
actggctggccagactggcaccgtcctgggtcgtgcagtggctgagcccggggcccgtggctgttactaactgactccagcccttgaaggatgggctttggccctgcctttgtggcccaggcaggaggcggggcaggaaaagggtaattcgtttccttcctggatcccaggagctgcctgaggaccaaggaagcggcctctgtggccagcgcctggctgcc

SEQ ID NO: 629652 - DNA, 320 bp, Homo sapiens
tcagcttctgagtgtctgaagcaggaggatacttgagcccgggagtttgaggttacagtgagctacgatgatctcaccactgcactccagcctgtctctattaaaaaattaaataattttagtctgggcgtgttggcatgcgcctgtagtctcagctactggggaggctgaggtgggaggatagcttgagcccaggaggtcgaagctgaactgagcggtgattcacgcctctgcactcaagcctggattacagagccagaccctgtctcaaatgaagtaaaataggccaggcacggtggcccacgcctgtcatcccagca

SEQ ID NO: 629653 - DNA, 1775 bp, Homo sapiens
  misc_feature (671)..(671): n is a, c, g, or t
  misc_feature (1292)..(1292): n is a, c, g, or t
  misc_feature (1693)..(1693): n is a, c, g, or t
gccgcaaggaaggtaccggttctactgccacctcttccagctccaccgcacggcgacagtagggaaaggcaagaggcaagaggcggctcggagtagattcatgtcggtgaaagcaaggatgcaggataagactggctcttgtggtattataagataatcaaacattatcaatgatatgaacggagcaatggaacatgaacgttagttcaaggatgtgctttgtgtggtcatgtgtctgtaagaacgattcgcgtcatttgcaagagtattaaccaacataggcttctcctctgttccgcgctgcaggcatccagcagtagtgattgaatcgacttgatctctatggaatgaaacgatccgatacttattcagggagtaggaacacactagaataggccggaggacgcgtatactgcaccaatgtaacacctatttagatccactcttatcaacagtggtggctctagggctattcgagttcacgacctatataatcgtaatcgagcctctaatctctgatgtaacccctagtgtgctaaccatccgttgggaacgtctgtcaagggctataagtgtacgcacgacagtagcccatatttgttaaaacgcaaatcctagagtccgagtgtcattccacctttatgaggtgtacctctccctagtttataaanataccgttgggcccccagaggggaggtctctctgtcttgcaccgtgaaaacgtgtgccaatgagcagcaacttgtgaacctcccgtaaaaaaccatgtaggtgcgccaaaggcgttgtggcttaatagggcagccacatgcgccattgtttctatccaccacgtgggaaatgccgactttggcaccccacaagagatggcctaatacactaattgcaacccctttttgtggggaggataaacccattgggttcttggaacaaccgaaaaagttggcccctggaagtgtggcttaagttctccacaaccatatttgtccaccatttccctgcattccataaggggtgtcccctacaattggccggcgggacacaacctttgggaccagacgagaaaagctcccaaagctgtggctttggccagtgattcccacaacctttgggatatatggacgtcccaaaagccttttgggctcagtgcccagacgacacttcgcatcttggggcgggcgcagagacatatgctttccaccgttcggctctgggatatgggaacaacgaatctggcgcgtgcgcaaacatgggaaggccccacaatatatatacgtctcccacataactcngcactccttttacctttgtccggcggatactgtccggcttaaaagcaatcagaggcgggagcgaacaaccaagatccgctaattaagcaaggggactggccaccggagcggcaaaaaatgttactacgggaacctaattgcagagggataaataaccggccccccgttggtgggggagcggcttcacaacatctgtagtgaacacaagacgtcgtctctggcatggaggtgtcggtccacacgcgagcacaattctaatcaagtgagcgagaccacagaagcttgtgcttgatcaccacattcacgcaccatgctgtgcgccacggctcggatgatacaacacacgaacccttgcaaggcaacaattgatatgatagacccgcgcgacgtgcttacagaanaacggggttcggttatatgacggaagagcgaggtcgaatcatccctatcttctactttcatcatcatcgacattgatgacca

SEQ ID NO: 629654 - DNA, 434 bp, Homo sapiens
gggggggtgtgccccaaataaacttaggaacgcccaaaaaaaaaaaaaaaaaaaaaaaaaaaaaaaaaaaaaaaaaaaaaaaaaaaaaaaaaaaaaaaaaaaaaaaaaaaaaaaaaaaaaaaaaaaaaaaaaaaaaaaaaaaaaaaaaaagaaaaaaaaaaaaaaaaaaaaaaaaaaaaaaattttggcccgttttgcccaaagaaatttaaaattggaaaagcttatgttatgggccccaatttgggcctaattgggcaaattccccataagggggtcttttttaaaaaaaaaggcccgtcttttaaaaactgtaaaatgggaaaaaccttggtttacccaaataaaatggtttggaaaaaaatccctttttccacagttgggaaaatcctaaaaagccccacccagatggtctttccatttgcacccctggg

SEQ ID NO: 629655 - DNA, 266 bp, Homo sapiens
tgaatgctatccattatagggctcgcatatataatctaaaacggcagcacggcatcggacatgggttaacatctcaaaccaaaagaacctacaaacgttccttgtgcaagactcaggcgagggtctgagggtaaaagcaccagggggcataacctcatctcatgctacctaacatgcataagaaaagctaacatggctttgaagatcgcccttccgctgatattacgcgccagcctactacacttcaatatgcagggttcacaaaa

SEQ ID NO: 629656 - DNA, 425 bp, Homo sapiens
  misc_feature (183)..(183): n is a, c, g, or t
aaaatatttaggaaaaaaggtttggttggcctatacgagatttgatctgtacttgttaacaaggaataactaaatctagtcttagttttcaaaaataaatctgttattacagaacagataatctgatctctatataacaaaaggtggaaatctcacgcctgtaatcccagcactttgggaggntgagtagattgcttgagcccaggagttcgagaccagcctgggcaatgtgataaaaccccatctctacaaaaatagaaaaaattagcggggcatggtggcatccacctgtggtcccagctacttgggaggctggggcagaaggattgcttgtgcctgggaggcagaggttgcagtgagccgagatcatgccactgcccttcagcctgggtgacagagcaagaccttgtctcaaaaaaaaaaaa

SEQ ID NO: 629657 - DNA, 665 bp, Homo sapiens
  misc_feature (9)..(9): n is a, c, g, or t
  misc_feature (464)..(464): n is a, c, g, or t
  misc_feature (478)..(478): n is a, c, g, or t
  misc_feature (481)..(481): n is a, c, g, or t
  misc_feature (500)..(500): n is a, c, g, or t
  misc_feature (504)..(504): n is a, c, g, or t
  misc_feature (516)..(516): n is a, c, g, or t
  misc_feature (525)..(525): n is a, c, g, or t
  misc_feature (531)..(531): n is a, c, g, or t
  misc_feature (540)..(541): n is a, c, g, or t
  misc_feature (549)..(549): n is a, c, g, or t
  misc_feature (562)..(562): n is a, c, g, or t
  misc_feature (574)..(574): n is a, c, g, or t
  misc_feature (578)..(578): n is a, c, g, or t
  misc_feature (585)..(585): n is a, c, g, or t
  misc_feature (589)..(589): n is a, c, g, or t
  misc_feature (651)..(651): n is a, c, g, or t
  misc_feature (654)..(654): n is a, c, g, or t
gaattcggnacgagagcccattctgctccgtataccagaaaaaaacacatttgaagcatgaattctcagcagcagaagcagccttgcaccccaccccctcagcctcagcagcagcaggtgaaacaaccttgccagcctccaccccaggaaccatgcatccccaaaaccaaggagccctgccaacccaaggtgcctgagccctgccaccccaaagtgcctgagccctgccagcccaagattccagcaccagcccagcagaagaccaagcagaagtaatgtggtccacagccatgcccttgaggagctggccactggatactgaacaccctactccattctgcttatgaatcccatttgcctattgaccctgcagttagcatgctgtcaccctgaatcattaattcggtcctttgcaccttttaaaaagatgtcccttaacccttaattctggaggggtcctgagnctttggggtaaggnttnaacgttttactgactgagntagnctttcttgttgnttggggtgnaatttnagggatggnntttggggnagggttaaagtgnaccccattcctnagtnttccctnaatnaataactttttaaattcaaaaaaaaaaaaaaaaaaaattggggggggggcccggttcccaanttngcccttttggg

SEQ ID NO: 629658 - DNA, 87 bp, Homo sapiens
aacccagggtgaagctcatcaaaccagggtttctggaggaagacagatgaaagctgagacatgaaaaatgaagaaaacctatccagg

SEQ ID NO: 629659 - DNA, 619 bp, Homo sapiens
  misc_feature (478)..(478): n is a, c, g, or t
acaaactttcagagacaggggggcacagatgcttctatgacaagatccatgaataaaccactcggaaggaaccatctcactgtgagaaacatgacttccaagctggccgggggtctcttgccagactacctgatttttgcaggtgtgggtgatggtgcagttttgccactgcgtgctagggaacttagatgtcatagcatcaagacatactgcaaacctttccaccccaaatcttatgacagaactgatagcgattgagagcggaccacactgcgccagcacaaagacttgttggctgactttctcatggaagagagctttgtctgaacccccaggatatctgagaccagatgggtgtactgaaccatgtgatgatgcttaacagtgactaagcctagtcattctctgagacctccaataatgagagaagatgccagtgaacctgtaagccagctacttaagcatgttatgatacggntctaacagatgaggggctgacacaagcactgactattcttgagtagatttgatttgcagtcaatcaagagtgagtttgcatcgttccatgaaatatccagaacatacttatatgtaaagtattatttatttgaatctacaa

SEQ ID NO: 629660 - DNA, 904 bp, Homo sapiens
  misc_feature (131)..(131): n is a, c, g, or t
  misc_feature (904)..(904): n is a, c, g, or t
ggcagaatggtcctgccggccacagcagcgccctggtggggatttgcactgggcactccaatcctggagaggatgccacggactgtggatgctgacggaagttcagagcagcgttgcgctacaggttgaangaagaactgatgctcttggcgctatttgtgctaaaactaggtgagttgtctagacccaaggcatcttaccaatcagctggtttggggtggtggtttccctggtgtttgtgtgttacctaccctttgtgcttgtgcttgacctctccttgtgagctcacctgagccctcctcagggccaggttcctgacatgtgttggtttttgcatcatccactggaaaggtgtcattaatgacccattgttacgaatgcaagacggtcatggttattctagccctcatggctgaacgtgcccagtcctggctccacctactctctccatgccagagtggtcgtggaccagtccagtgcctgtcctcgccacaggtgcctccagggagcattcgggtcaaatccagagtggacaccctgtggctacaaaccaagggctgctgttcatcccacatcgtgtggggcagtgtccagtcccctgcagctacttgtgtgacttaacaactccaggagccctgtcagctgccctcctccatctaaagcccttcgactcttctgctttgacaaagaaaatgacattgggaggggagggtgctccgccttcccgagctttttctcaggaattagtcctatagatactggtaaatctggcacttgaagaaagtacttcctgtctctggcagctaacttttgccagaactgttccagggaagtatactggtgtaagtattaattggcagaaacgtttgtttcaaaagggtttgtacctcagacttcataccan

SEQ ID NO: 629661 - DNA, 951 bp, Homo sapiens
gaaatctagtgtactttaaatttttttcataaaagtttacattgtatgtaggttaacattaaatgttttatagcaaaaaaaaaaaaaaaaaaaaaaaaaaaaaaaaaaaaaaaaaaaaaaaaaaaaaaaaaaaaaaaaaaaaaaaaaaaaaaaaaaaaaaaaggggggggggcccgaaaaatactaccctcccggggaggcggcacaatcgtccagccaccaccagcccttttgtttcgaacaaaagggcgcccccaaaggagggcccgatataaaaataacacacaccgcaacggggcgcgctgataaaaaaccagccgcgggcgaggagacaaccaaccggcactcgctacaacacaacctgagcggcaagacacccccacgcggggggggggcacaacacctggcagaccaccaccccgacgaataactattactcagcgccccgcgaaggggacaaacaaaacaacatcccgacaggaggaatataggcgcggcacacccccccaaggcgctcaattcagtcgtgcgcaggaagcaaaacagtaccgtgcccactgagcagaccatcttactgccgagcaacacctcaattctcctagccggcgcggcgcgccagtgctcatcatctaccgcggggcggcacacggaccgcacgcaacgatggacaatctcacacccaccaccgaaagtcagaaccgaaggcagaccgcaagacgaacaaacccaccgcgaaccacacacacaacccaccacacccgagaccaaacaaaccacgcaacaacacaaacaccacacacacaacaaccaaacacacaaaacaaaaaccaccaacagacacccgcaacgcaacacacgcacccacacacaccgaaaaccagaaacacaaaccccacaaacaccacaaacacaccaacaatcccatcaccaaaccaaaaacaaaacacaaga

SEQ ID NO: 629662 - DNA, 1020 bp, Homo sapiens
agcggggttgtttgttacgtttctttgaaggtgacctagttatctctttttccttgcattaagaaggcatatcccaagagagggattgatatctttctctttgacagttctggaagaatgtcatgagccccttacatctccgaaactggattttaaaaacaatgtggaaaaactgcttccgtcccagggtcgacatttttctgtgacttctgagtttggctttctattaattattcttgtattcggaacagtgggtggtctcgacatcctggatggcccagagtctggagtaggtgccgcgggaaggtagtatctggtggcttcgatgggtaaccgcatcgcgaaccaccgggggattcaaagcagatatcatttgtgccgcagcccgtctgtgaaaatcgctgtggaattaacaaggacaggtggcccaacccagcacccggggcaagttgcgagttgtgaagggcgagactggaggtagggccccaatcgctaggtgcaaagagctgggatgagaaatgccgaaccctccagtgcaagcacggcccgtctggagggctccgaaagcgccgggtgtaaccaggcggtgaccaccgtgaccagggactgacgggttacaggctgtgaaaggacgccccttcagtttcgaaacataggggcctgggaggaaaagaaccatagtaccagagaagtccgaaggagtctgcacaaggcagcctgcgtgaacagtgtccactggattagacggggtcgggccggacccagtgtgagtttcggcgcggacacaggggaatgccaatggcggcacaatatgacgaacctgacgcctatgtaacccccagggctcccggagggggctggcaaagccactgctcttccggcgagagcactgtgccggaaccaggggccactttcgacggcggtggtgcaacagaacgtcgccggggcccaagagcgacaacgaagcaccgcgacaggagagagaacaaaagacccagacacacgcgctccagaaagcac

SEQ ID NO: 629663 - DNA, 726 bp, Homo sapiens
gggaccctcaaggttttatcatgttcaaaatggagggcataattcctatccctttctgccgcaaccgatttttttagtctatatcagggaggtctatttttggtaaatatacgttctttgagatccgagcctccagatgataggccaagctcctgaaatggttatttcttttagattatgattgtattaaaagtatttaataaaaaatatttaagataattattatatgactatatttatgggaaccccttcatacctctgagtgtgtaccaggcatcctccaccatagcagacagatgttttctgggataagtaagtttgatttccattaatacagggcaattttggtcccagattgtgcttatcccatagcccaggaaactctgcattctagtacttgggagacctgtatatcatataatgtaatgtacatttattaccttgagcccagtaattggtccgatctttgactcttttgcccttaaacttacctgggcattcttgtttccaattccacctgccaatcaagtcctaccagctaaaattagatgaactccaactttgaccaacccatgagacccctgttatccaaactttcttttttggaaagtaatccatgttttttctaggttttaaaaattgtgatcagaccataatgttacattattatccaccatagtgattgatagagtgttatcagtcattacttaataaagcttgccacca

SEQ ID NO: 629664 - DNA, 395 bp, Homo sapiens
ctgcgtcaacctcccaagtagctgggataacggttgcagcagcaccacacctggctaatttgttaaatttttttgtagagatgaggtcttgctatgttgaacaggctggtttagaattcctggcctcaagcaatcctcctgcctcagccttcgcaagtgctgggattataggcatgagccaccatgcccagcctgctgaaagttttttttttttggcaacctctgcctccgggtttcaagcgattccccgtgcctcaccctcccgagtagctgggattacgggcttgtgtcaccatccccgactaattttggtattttccctactaaagttttttaaacagtcacttgacacttgattttcacagagccgcacttagcagccggggcgaaagaag

SEQ ID NO: 629665 - DNA, 198 bp, Homo sapiens
tgcttacacccagtgtgtgtgttatcctgtgtatccatgtgttcagatgctgtagtgaaaggaatcagtgtagtgcctgggcacacagcaagccctcagcaaatggccaggttggggagcacttgcggccaatagtgtccatatacatcgcgtatccatgcttattcatcctatatccacgtgggttaagtagggcag

SEQ ID NO: 629666 - DNA, 493 bp, Homo sapiens
  misc_feature (22)..(23): n is a, c, g, or t
  misc_feature (26)..(26): n is a, c, g, or t
  misc_feature (28)..(28): n is a, c, g, or t
  misc_feature (62)..(62): n is a, c, g, or t
  misc_feature (93)..(93): n is a, c, g, or t
  misc_feature (130)..(130): n is a, c, g, or t
  misc_feature (181)..(181): n is a, c, g, or t
  misc_feature (188)..(189): n is a, c, g, or t
  misc_feature (219)..(219): n is a, c, g, or t
tatagggaatttggccctcgannagnanattcggcacattgcaagagagaggaggcactgcnaaccgacagcaactgcacccacgatgcaganacaacgtgcgtggtggtgggtgatggggctgtgggcnagacgtgcctgctcatctgctacacaactaacgctttccccaaagattagntccccanngtgttcgacaattacagcgcgcagacagtntcgaccgggcgcacagtgaacctgaacctgtgggacactgcgggccaggaggagtatgaccgcctccgtacactctcctaccctcagaccaacgttttcgtcatctgtttctccattgccagtccgccgtcctatgagaacgtgcggcacaagtggcatccagaggtgtgccaccacttgccctgatgttgcccatcctgctggtggggcaccaagaaggacctgagaagcccagccttgacaccctaacgggggccttaaggagcagggccag

SEQ ID NO: 629667 - DNA, 371 bp, Homo sapiens
  misc_feature (48)..(48): n is a, c, g, or t
  misc_feature (58)..(58): n is a, c, g, or t
gcaagcggctggaaacacgaaaacgtgcaccaagacgcaaatgtaagncgcttagcgncggaaaaccgggaatccaagtctcagggggaaaaggtggaaaagaggcagacgttcgccgcgagaaacaacgcgccgcggcctctatgtctcgatccaactcctcgtcgaacatccgggatagcgcgagactctcgggccgcccgtgtcactcccatgcggcacgttgtgtagggaatcggccaagtcgtggatggcagccatcgtgcttgcagagactggctgtcttgccaaccgtcgaatctcgacgagtgcagcctgagtgatcgccaatgcggaaatctgcttttcggtcaacttaaccatagtctgtc

SEQ ID NO: 629668 - DNA, 99 bp, Homo sapiens
acaggtcaaaaagaacctttattactttttatgattgccgcatatgctttcgtgccagatgcctttggagcaggtgctttatgggctggagctttttga

SEQ ID NO: 629669 - DNA, 502 bp, Homo sapiens
acaggaaagaaataaaagttgggtctcaaaaagatctttgtacatccacatgaatagcagcattactcacaacagctacagtgtggaagcaacccaagtgaccatcgatggaggaataaacagaatgtggtgcacccatccttatagtcagccttaaaaaggaaggaaattcaacatggatgaaccttgagggcattactttaagtgaaataagccagtcacaaaagaataaatactgtgtgattgtccttagatgaggtccctggagcggtcaaactcatggagacagaaagtggaatgggggttgccaggggctgggggaggaggaatggggagtcagtgtttcatgtttgggaaaatgaaaagttttggagatggatggtagtgacggttgtatgataatgtgaatgtactaatacccctgactgtacactcaaagatggttacggtggtcaattttatgttatgtgcattgcaccccaataaaaaagggactctgtga

SEQ ID NO: 629670 - DNA, 433 bp, Homo sapiens
aaatgaaaagaacataccaaccaaataaattaaaacacgttaaaactcatggttttagagctagaatggaaacagcagatggtagaaaagttttagcagcaagaagagcaaaaggtagaaaaagattaacagtatcagataaataatgttaaattttaaaaaagttcgaaaaaactgacaattccaaaatataatcaattttaaacaacaagtagttaataaagaacttattttatactacaaagaattctttcaatttgaattaggaatctcgattccgaaaaaatttgtcaatgctgtaaaaagaaattattacaagagacaaataaaaattattattcaaaattatctaaaaaataaaaaagaatttaatgttaaattccaaataatacttataacaagaaaaagttttttaaacttggattttaaaacc

SEQ ID NO: 629671 - DNA, 974 bp, Homo sapiens
  misc_feature (333)..(333): n is a, c, g, or t
  misc_feature (338)..(338): n is a, c, g, or t
gcatcattcttcaggcttctctcaatcgtgtaaagtaatttagtaatacgagatccttggttgcgagcagcaatacattctaattgacacacacctaacctgtgtcttacgtgacactgatgtgcgattcatagtaaaactagatggtagttcacctacacaagtcgtcggtggtgatgggaaaatttactctatgccacgagtagctggactcctgatgacaccatgtgatggtactcatgatcaagggggctgaccagacactgctgaccgtctctctgatctggttgcaatgaggcgtgctcttctgaagggggacactagtgccgatcngaacnttgtgttctcgtgcatcgagacacacaacatacgtgtgacatcgatcactgatatcgtggccgtgtggttcttgcactgagagacacttacgacgacttaggagaattaggctccgacacgacgagctttgcccgtctagacttttgctagcattgtggtcatctgaactgcacctttgcatgcagactaatcacgacatagctacatagagcgctcacgactacaagtacagtgtcagctccaactcgttcctcctagttcctctgccttgacgacagacccacgtggaacgactccgcttgtacgaacgacggcgactagggcttggcatacgaatctccacctggcccgagaccgttcgaccaacccgttcccatgcttatccaggccgtcaaggtcacagacactcggtgtcggacatacccactcaacgttgttctcctttagagactctagcccttattttgccctgccgagtattagcgtgagaatatgtacctgcgcggacaccttcaagagttggcgtctcacagaggtagtaaagacagaactgtccatccctcaattagaatgtctctacaacgacgccaggtttaaagacagcatttagataatgagagtaggtaggctgtgta

SEQ ID NO: 629672 - DNA, 177 bp, Homo sapiens
  misc_feature (19)..(19): n is a, c, g, or t
  misc_feature (57)..(57): n is a, c, g, or t
  misc_feature (59)..(59): n is a, c, g, or t
tgcatcctgagagcaagtnaggcagaggccacagagaacaccgcatcgccggagtcntntcaaaaatgcatgttgtggccaggcgcggtggctcacgcctgtaatcccagcactttgggaggccgaggcaggcggatcaccaggtcaggaaatcgagaccatcctggctaacacagt

SEQ ID NO: 629673 - DNA, 294 bp, Homo sapiens
taacccatggctgagtgatgtggcacgatatcacctccgtagcagcctcaaatacccaggttccagtgatcctgccaactcagcctcctgagtagctgggaaaacacgcactcaataccatgcccgggtaatatttgtattcttggcagagacagggtttcaccaacattgcccaatgtgggtctcaatactcctgtagctcaacgtgatccaccgcgccttgggctcccacaagtgctgggcattacagtgagtgagccaccgactcctgtgccatctataagtgattcttta

SEQ ID NO: 629674 - DNA, 847 bp, Homo sapiens
cctgcgcgggtaatgtgctctggagaccagttgtcatttcttatctccgtggcgccttctctcctatccctaatggtgcgtgccgtctaccacgagtgagaacgatatctactggagcactggagcatgtagacccctcctttgagaccaccagaatctatctatttgcggttgctgaaactgataagagtccgactaaaggattatcactttaaggtggagttctgatgaaattgtagcacctgtttattctttaagcaacgcgtcagtttcatggcgcgtctgggttgcatataggcactgacgattgctactatcggttgcacatgccgagggcgacaatggaattcatcgaagagctggtcgctatttacacacagtatacatcgtaggactaagtttctgcacacctgtcttggtaatcaggccatacgagttttgcctctgggggggctaaggaagttcctcgacccactccgatgtggttctaaaaagggttggaaattgtggtagggattcaagggcccgaggtggcgattatttgagttggaacatggagtttgagattagcctggatgggagggaacgcaatgcctggcaagttcggggacaagaattgacatgcaccgcacgggacagtcgactgttggtaaaacttcctttcacagtttgtttttcctgggtggaacagcgggggtcctggcgtacccccttggtccgtgtttgggttagggcccctgggtttcccaaccttgaaggtaagggcgtcataaaaacttttgcgctgcttggattgcagggagtgaatccaacttattgcactggctgggacgcactggacttgggc

SEQ ID NO: 629675 - DNA, 745 bp, Homo sapiens
  misc_feature (18)..(18): n is a, c, g, or t
  misc_feature (90)..(90): n is a, c, g, or t
  misc_feature (112)..(112): n is a, c, g, or t
  misc_feature (223)..(223): n is a, c, g, or t
  misc_feature (260)..(260): n is a, c, g, or t
  misc_feature (306)..(306): n is a, c, g, or t
  misc_feature (344)..(344): n is a, c, g, or t
  misc_feature (579)..(579): n is a, c, g, or t
  misc_feature (651)..(651): n is a, c, g, or t
  misc_feature (708)..(708): n is a, c, g, or t
  misc_feature (737)..(737): n is a, c, g, or t
  misc_feature (740)..(740): n is a, c, g, or t
  misc_feature (744)..(744): n is a, c, g, or t
gctcagttgggatttaanatccgaggaggaaaggcctcccagctaggcatcttcatctccaaggtgattcctaactctgatgcacatagngcagaactgcaggaaggggacnaagttctagctgtgaatgatgtggatttccaagatattgagcacagcaaggctgttgcgatcctgaagaccgctcgtgaaatccgcatgcgtgtgcgcttctttccccacnattatcatcgccaaaaagagaggactgtgcactaganagttgccgcccacagcccttcatgtggactctgtcatgacatgctnactagacttcaggggagccacttctgttttcagccccnccctggaatagtgagttgggaggatggggagacagctaaccaactgcattacccaaaccatattgcacttttagttccctagttttctaggtgagcttcattccctgaaaggaggatgatgatatctaggcataacctagcctgtgaggaacctagttaggaaagacaactgacatttattgaatatcatgcactagtcccttacatatgtcatattttaattatagaaatcagnagcaaaaagaatcttggggattttccatctgacttccctggccatcttatcccatccttgcactaccagaanattcatacacttttgagactccggtgagaggcgggttttaccccttcctcctcctancctctctcccaaaaagtaaaacacaatcnacnaaana

SEQ ID NO: 629676 - DNA, 905 bp, Homo sapiens
taaaaatttccatgctgtccccttagatttctgcatttgagtgtttgaaaattaaagaatagctcatatatattacacattaatttcccaaatatattgcttccacaaagcttaaaaaaattagcagcacataccaaatagtcaaatattaaaaatcttgacagtgtcaagtgttggcaaggatatgaatgcaggaactctcatgttgttggtaaggagataactgatatgatcactctttagaaaaatagtttggcagtatctagtaaaatgaatctaagagattccatttctatgtctgtcccctagagaaactcatatatgtgtaccaagagatgtataggccaggcgcggtggctcatggctgtgagcaactttggagccgaggcaggtagatcacttgagcccaggagtttgagaccagcctcagcaacatggtgttttatctctacaaaaaagtaaacaaaattagcctggcatggtggcacccacctgtagtcccagctattttggggagctgaggtgggaggatcgcttgagcccaggaggcagaggtaagtgagccaagattgtgccacttggaactccagtctggttgaacagagcgagacctggtcttaacaaaaaagaagcaatgtggctgggccggaagtgatcacggcctgtaccccaaattgtgggggaacgaggctgagcaaccttcaagacacgagtcgaaacaaccaggtaatggggaaaaccgtctacaaaaaaagaaccacagaaaaaaaaaaaattaagcgacgccaagaaaaaacaaagacggcagcacaaaaacagaagccaaacgaaaagggaccacaacaggacaaaacgatagcataaacagcaaccccaaaagacgcacaaaaaagaaaaatactccc

SEQ ID NO: 629677 - DNA, 620 bp, Homo sapiens
  misc_feature (460)..(460): n is a, c, g, or t
  misc_feature (497)..(497): n is a, c, g, or t
  misc_feature (519)..(519): n is a, c, g, or t
  misc_feature (537)..(537): n is a, c, g, or t
aattggaaaagaaaaagtcaaatttgtatgccctgtatatattataatcttatatttgaaaaatcctaaaaaccctgccaaaaaactaatagaactgataaacaaattcagtaaaatggcaggatattaaaataaacatgcaaaaatcagtagcgtttctatatgacaacaatgaacaatctaaagaagaaatcaacaaagcaatcgtatttatgatagctacaaataaaataaaatacctaggaataaacttaatcaaagtgaaaaatcactacaatgaaaactataaaacattggtgcaagaaattgaagaggacacacaaaaaatggaaaggtattccatgtacatggattcaaagaataaatgttgttaaaatgtccatactacccaaagcaatctacagattcaatgcaataccacttaaaatcccaatgacattcttcacagaaatgaaaacanaaaatcttaaaatgtatacagagcacgaaagacctgnaagagccaacacatcctgagcnaaaagaatacaactgtangaatcacattacctaaacttcaaatacattacagagctatagtaacctcagcatgacaatggcatttagacacttagaccaca

SEQ ID NO: 629678 - DNA, 304 bp, Homo sapiens
atttgaagtcagggacggacggtccctcgagggcactcgtggtgtgagcacatgctgcccgtctcacatgaagtctggcatggaaacataaactaatgcataccagtgctacccagaagcagcaacacgtgtgttctccattccaccaatcacagaccagtatctactccaaacatccagtaacgaaaactatggcatcttcccaggaacagcaaggcaggcttcttactcacgatgaaccagcacgaataaacccagcaaaaagagaactgcatacttaaatttaggatagtcattcatgagg

SEQ ID NO: 629679 - DNA, 1265 bp, Homo sapiens
accactccagcttactaccagacaaacttagccaaaccatttacccaaataaagtataggcgatagaaatggaaacctggcgcaatcagcatcatagtaccgcaaggggaaagcatgaagacaattataacctacagcatcaatatagccaaggactaaccccatcataccttctgcatcaatgcaattcaactcagcaaatcaactttgcaaggcagagccaaagctcaagcaccccacgaaacaccagcacgcagctacctcaagaacagcataaaagagcacacccgatcatatgatagcaaaatagtgggcaagcatttatcaggtcagaggcgacaaaacctatcgagccatggtgatagctggttgtccaagatagaatcttagtatcaactattaaagttatgcccagagacccctctaaatccccttgtcacaatttaactagatagatccaaagaggaacacgctctcaggacactaagagaaaaaaaccatatgtagagaagagtaacaacacatataacagcaccatacgtaggcctaaaagcagacacacaataaacgaacagcgtaacaagactcaaacaacacacgtagccataagaacaatcccaaagcaatataaagtgaagacaccatacacaggccacagaggggaaacaaaatcaatccacgcgtatcagacaagaactaaagggaaagacaaaaggacacagtgaacaaacgacaacacacatcacagaataacgccatgcagacagaatcaagaaaaactggaccacgaacgaaaaagcagcccacaaaactaccacaccacaaccaagcaggcacagcatgaacgaccaatggcaacccacacacaaggaacaggaccaaaaaggacaaagggtatagaagacacaggacaaagggagaagcggacaaaactatttgaccagagacagtgtaaaccagatacaaataccacgcgacacaacaacaagagatatcagaagggacgacgccgggcgcccgagggaaccacgtgatcacagacggcgcgcgcccgcaaacagcgagacaagagacacaatcaacaccggcaccataaaacaagaaccgaaagaaagcgaacccacaggtgagcgaaggagcacacaaacatgaacgagagaacaacagaagccgacaagtaaggcgaaacaaaaaggaaaaagcaaagagagaagccacaacgacaacaaaaaacggccaacaagaagagaccatggagccaacac

SEQ ID NO: 629680 - DNA, 227 bp, Homo sapiens
ttcgtcgaagaacaacggcagacaaggattatgggtggcaaaacattggctcttccttggggagtgatgctgggcgaaagggaagagatgtggctcacgcctgcaggctcaatacggctagatacagccaaggcccacaggctgccagggcgagaggacatgtcagcatgtccagccctggggctctggagtgtagggcttactcccttctccctgctgcccttccc

SEQ ID NO: 629681 - DNA, 124 bp, Homo sapiens
cactcgtactgacgcaggattactcgattgtgactacagcatcatcagtactggtatcattatcctggtctcatcgacgtgttctaaacccaggctcaccgtgccctggtccattccagcgcct

SEQ ID NO: 629682 - DNA, 378 bp, Homo sapiens
  misc_feature (1)..(1): n is a, c, g, or t
  misc_feature (28)..(28): n is a, c, g, or t
  misc_feature (80)..(81): n is a, c, g, or t
  misc_feature (103)..(103): n is a, c, g, or t
  misc_feature (157)..(157): n is a, c, g, or t
  misc_feature (294)..(294): n is a, c, g, or t
  misc_feature (320)..(320): n is a, c, g, or t
  misc_feature (347)..(347): n is a, c, g, or t
nccagccgccctcgccatggccgcgcgncaagggctcatctcggtgttctcgagttcccaggagctgggtgcggcgctannagctggctggcccagcgcgcanatgctgctggcaggggccgcgccgtttcgcgctcggcctgtcgggcgggactcngtctcgatgctagcccgcgagctacccgccgccgtcgcccctgccgggccaagctaagcttagcgcgctggacgctgggcttctgcgacgaacgcctcgtgcccttcgatcacgccgagagcacgtacggcctctanccggacgcatcttctctccaagaatngccgattccaaaaaagccaaggtgatnaacaatttaaaccccgaagttgcctttggaa

SEQ ID NO: 629683 - DNA, 593 bp, Homo sapiens
ggcaacccgtgtagagtgcacaattaaatatactcataactcaagacactgttcaattaatggcacatcgggttgttctcctattagagttattctatataagaacgcattgaatatttttacacataaaacctaatgtacacgtgtatatatatctcaggtctcattcccaagagcgcatttgctgggttatagctcaagcacatatctcaatttgtgttaaataatttccatctattttccaaagtagttctccatatatatcctattctcctcaatttatgagaattacacttgctccacatcctcattaacacttgttaacgtcagcccttttaatattgcgcaattctaatgggtatatagtggtattccattgggtttaaattttctttaccttgattaccaaaaggttgtaccttttaattggtttgtttttatagccacttgaatctcctcctttgtaaagtcgcctttccaataatttgtccaccttcctattgggtcacctgtcttttcttacacaatttaaaggtattttctatgtatgtgtatcatatttgtctttatgtcctataaatatattttcccat

SEQ ID NO: 629684 - DNA, 296 bp, Homo sapiens
acgggtgctccggattacagatcccgtagatatcgacgtcgttggattcgacggtacggaactggcagaaatggtttcccctcagctttcgaccattgagcacgccctcgcgggatataggccgccaagcggtagcgattgctgactgaattaaaagtagaagaatcctgcacgcgcagtacggaaagtggtgatgtatggactggcgctgatatttcacgcagccagatacctgagacgttatcgactgacaatgcgccagacacgtgcgcgaactatcgtttccgcgtaggcga

SEQ ID NO: 629685 - DNA, 348 bp, Homo sapiens
tctttgactttcatctcaaacacttgctctatctctatctctatcttcttaatttaagctactggctcctctctttcttcttccatttgtgccagaggtctctaagtgaccctgattccatagttctcgatagtgcacattattagtaacttctttcaagtcgtgcgtgtgttctatatcaccatatttcttaaacctgtaaattcacaatgtctcaccattttcaacttcagcaactctccaagaatactgccttcatatgccctttgtgccattaacttcaatgatagtattactacccaccacagcaagaggtatatggtcctatatctttttcacgagttttct

SEQ ID NO: 629686 - DNA, 682 bp, Homo sapiens
tgtcgtacccccaaatggatcacccatcagcacgactctctgggtcgaagcctaagaacacctgctcgaacgccggccatttggcatcgaccacgctgtgcttcaaaccggcgcggaacactctgcagcgccaaggtcgacaggtaacggtcatccgctatcttgcgcaattgcgccggggtcttgggcaccggcaggtgggcttccaacttggccgccgaaccgaagcggttcagacaatattcgtgcagccacttgtaatcgcgcatgccctctcctgtcagtcgaattgaaaacggcgcccgcaaagcgccggtgtactagagcctcgggaagactcagaggttcactacatttgacgaaacgcgatgcggcggtctcatcgattttcaagctggtgaagtcgaacaggttgcggtcggccaaattgcgacgggatcacgtattgcaggctgcggaagatactttccggtaacgcccaggggtcttgcgcacccagtcccaccagcatctccttgaccacctggcgctgcaggttaccctgggagccgcacaggttgaacgggatgatcgagaaatgctgaaatcggagtacgcctggatgtccactcgtggaataagccaccgggcggatcatagttgcgccatcatggaagcaactgggggatggcctgagcagcgc

SEQ ID NO: 629687 - DNA, 908 bp, Homo sapiens
  misc_feature (566)..(566): n is a, c, g, or t
  misc_feature (602)..(602): n is a, c, g, or t
  misc_feature (608)..(608): n is a, c, g, or t
  misc_feature (652)..(652): n is a, c, g, or t
  misc_feature (656)..(656): n is a, c, g, or t
gagctgcgcgggcgggcgtggttgccggggacgcgcggcccccggtcgggcactgcaggcggcgaaacgacttgggaaggccctttcgggacggagtcttgctctgtcacccaagctggagtacagtggtacaatctcggctcactgcaacctccgcctcccgggttcaagcgattctcctgcctcagcctcccaagtagctgggattacagaagtgcaccaccacacctggttaatttttgtatttttagtagagacgaggtttcaccatgtcggccaggcttgtctcaaacttctgacctcaagtgatccacccacctcggcctcccaaagtgctgggattacaggcatgagccaccacgcctggccagaggagccaccacgcctggccagagttgtcttgatagaggtcttgtaattatttgaattagaaaattttctgttaaaatatgtccacaaattctttggtaaccctcccttcaagaagtgaagcctaaatcccttcccttccagtgtgagctagacttagtgactcagttctatgagtaaaagtggtggaactgatngtgtgacttctgagactaggtcataataggcattgnggcttnctccttgctctccctctcagatcacttgctctgggggaaacagnagcnatgtgtgaggaacccaagcagtctatggagaggctacatggagagtaaccaaggtccctatcaatagcagcaggaacagaagctcctgccacagtccgtgtgagccatgtgagagcgatctccaggcccgtcagacttccattatggtagcctagtgagaattgctggaattccggaacccttgcctggtagcatcccaattgtaccccgaacagaatctcatatacaagggttgtccaaaaaaaaaaaaga

SEQ ID NO: 629688 - DNA, 269 bp, Homo sapiens
gctgtgccgcgtgcgcgccagtgctaactcatgtgccgagctctagagcagtgggagaattaccccgcgtgcaccaagctcaagtagcttcaccttgtgtatgcaggccccatgttatttgatagcaatcttacgagtgaaatgtactggtgggtagacaaacgttcttattttaacgaaaggtagtgctcgctacacggctggtgtgtgcatactgagaactcttgtatacactctgagcaggatatgtgtataactcgggtaccgag

SEQ ID NO: 629689 - DNA, 308 bp, Homo sapiens
agtgcagtggcgtgatctcagatcactgcaacctctgcctgccaggttcaagtgattctcctgcctcagcctcctgagtagctgggactacaggcgtgcaccaccatgcccagctaatttttgtatttttagtagagatggggtttcatcacgttggccaggatggtctcgatctgttgaccttgtgatccacctgccttggcctcccaaagtgctgggattacaggtatgagccgccgtgcccggccctgctttgatttttattatttcttttcttctacaaacgtcaggtttggtttggtcgacgc

SEQ ID NO: 629690 - DNA, 1473 bp, Homo sapiens
  misc_feature (395)..(395): n is a, c, g, or t
tataagattattagttataaaaggggaaataggtaggagtagcgtggtaagggcgatgagtgtggggaggaatgggggtgggttttggtattgttcaacactgtggtcatttatattttacacgtgtgtcagcatagtggggagataggtggtgatgtgagggtggcagtaaatataggcggtaggtagaaagtagaaggttaaggagggtgaagtgggtggctatattgagtgggtggggaatgaatgagggcatatatgtggttttgtgggtgaatttcttctcgattaatgtggcccatttgtggcgcaaaaacgccggttaagcgggggcaaggcctctccatagggagaaggagagggtggaagtggacaattacgagggggtggttagncccagtggtatagacgtgtgtgttctcagaggtggcgcaaaaatagatagatagggtctcggtgggtgccgtggaaagattaacagtttgtgagtatagataggaacagtggcgggaaagatacgttgtagagaatacacttataaaacttacgcttaaaactttaaaaaaagtgggtaaagtgttaaagggggttggtagcgggtaaaacaccgtggctaataaattacattcctaattggtggggtaacctgggagcggaggaatgggctaaacaaaacctgagggcgagtcaacccagcgagcggctcgggagtgcaaaattccccaaccctacaaattgggcgccgcgcaaataacgacggggcatacaaccagatctcggcccaccacggtcaccgcggacccacccggggctcccaccctcaccacagtcagcacgggaccacacactcgggcgaccaacacggcacctggaaccaaagaggggggcgcaaaaaaatattggggcgccaaggttggacgaaacaacaacaaaccacgatccccgagtagtgtccacaagagaggggcgacgccgactagcgagagtaacccccccccctggtgagcacccctacagaaacagagtcgcaaagaggcgggggcgacaaagtccaccacaaagatgcaaaacgcagggagaaaaacggccccaattaagatggagctaaactaaccagagtggagggaggaacccccataatacttaacttcgcggacactactaatgtaccagccgccacccaacaccccccccataggggggcgccacaaaaaagaccatcacatcaaacaccgaccaccaccagtgggccccaagaacataattccaaccctcctcggagacccacaaatcaataacacaccacgcgtcaccacacaaagcgcctatatcagcaaagcaacctgccatcgaggagcccccctctgtaacgccccacagcgcgagctaacagcacccccacgatgggtcaaaagaaaagcccggaacacacgcaacaaggagcagagccaaaacagacaccagagaatgaca

SEQ ID NO: 629691 - DNA, 321 bp, Homo sapiens
gacttagaggatcccattgatagcggataggggcacatgctgaagacattcactgttttgctcttttgcattcggatgagtctgggtatgacatcgatagtgatggaccctcaccggagttgtggatagagtccaactacccccagggcccttgtgagaacatcacgctttggtgccgaagcccctcttggatattaaagcacgtcctgctgctgaaggataagacacagatgacctggatgcgcccttcccacaagaacttaccaagttccattccttataggtgccctcatccgcttattctcagggggaccgcgctcg

SEQ ID NO: 629692 - DNA, 175 bp, Homo sapiens
ccctcttaccttgatgatgccctagagctgaggctgagaagacacagtgctgactttgactgagggccatggacgctgacagtgcctgtggccctgcccatgctgaaataactggaacccagcctctcctcctacacctggcctaccctatctgggcctctagtgtggcaccctg

SEQ ID NO: 629693 - DNA, 675 bp, Homo sapiens
atccatccagtccaccacactccactcctgtcctcatgactcctttccaacctctattcgtctcttgatgttgtcatcctacccctggggacatcagtgacttgtcccctgcaactacgtggataatgacccgggcgagacggtcactcggagcacactgcgcctaccctgaatatgttaaagggacaccggatacccaccaagcgcatatcgcattgcaccacccacgtcacatcacaccaaacatagacaacgtgacgacaacgcacctatcttctactacgagacaccaacatcgaacaaaacagcaaactggcatcactagtcgcaacgcacacagcgtcgccacctccggtccaacgcccactgagacacccgcgcaaacagccaaacaggccgaccacagaccagacggagagacacgccacagaacacaaccgcgaacgagaacaccagacaccgaagcacgaaacgaaccaaactgctcacctgcaagcgaccacagaccacacagaggccgtaaaacaaagaccaaaccacgagccacaagcacgcaaacacgacgacacagcaccacacgacaaaactaacgacgacacgccaggacaccacagaccaacaccaaacgcacacacgcgaaacagcggagcacgaacaacaaaacaagacacggaa

SEQ ID NO: 629694 - DNA, 291 bp, Homo sapiens
cccatctaggatatgggtctagagtccaggatccaagaaccacagctcatctgccaccaatcccaccatgggctcattttaggactatgggttatttcgtttccgtctctatcttcctttgcagatgttcctgcctttggggtctacaagcttgtggggatgaaatgggacccctgctgattctttctgcttcttacactttgccagacgccctgcgtctaagacagaaagagacccgctcctccactttcaggtgtaattagcttccgctagtctgagggcagataaggt

SEQ ID NO: 629695 - DNA, 165 bp, Homo sapiens
gactagatatgaggcagaatattaggctgtgatccgctgtcaccacctcgcccagcctggggcagttgagcctgattgggcacacacgtgataattgtaatcatattgtcataacatccctgagactacattaattacacattgagtgttctcgtcctattatag

SEQ ID NO: 629696 - DNA, 133 bp, Homo sapiens
taacaaaggcctatagacttcttagacatagaaacctgacagtattcttcacagcagacctacactacaagaaatgttacaggaagtccttcgaccagattacacaaaaaaaaacaccagaatgaaaatatgg

SEQ ID NO: 629697 - DNA, 457 bp, Homo sapiens
atgatctagaggatcccgcccatggcagcgaagcagaacactggtttggtggagagatctgataacaaaaagttgggaaataggtaaaataataacttggggtagaggttatgcttgtgtttctcccaggaccgaatcaacagctgatttggataccattaagacacctgaaaccttattatgagctagatgcccaggaagagattctgggaggatcccgaggaccccgtagttgcagccatgtcgagattgacactgaggaggatcccaactgtcatgagcaatacccatcgaacatagccacctacttggggacagatcaagaagctgtcacagatggcggaataaaaacctgaggaaagcaggacaaccagtcacaatgagtaatttgatggtacctatgatagcagtgattaccattgccgtgagtattccttcaacaacggctgccattggg

SEQ ID NO: 629698 - DNA, 617 bp, Homo sapiens
  misc_feature (14)..(14): n is a, c, g, or t
  misc_feature (16)..(16): n is a, c, g, or t
  misc_feature (22)..(22): n is a, c, g, or t
  misc_feature (24)..(24): n is a, c, g, or t
  misc_feature (26)..(26): n is a, c, g, or t
  misc_feature (30)..(30): n is a, c, g, or t
  misc_feature (34)..(34): n is a, c, g, or t
  misc_feature (39)..(39): n is a, c, g, or t
  misc_feature (61)..(61): n is a, c, g, or t
  misc_feature (67)..(67): n is a, c, g, or t
  misc_feature (69)..(69): n is a, c, g, or t
  misc_feature (76)..(76): n is a, c, g, or t
  misc_feature (82)..(82): n is a, c, g, or t
  misc_feature (95)..(95): n is a, c, g, or t
  misc_feature (99)..(100): n is a, c, g, or t
  misc_feature (108)..(108): n is a, c, g, or t
  misc_feature (115)..(115): n is a, c, g, or t
  misc_feature (121)..(121): n is a, c, g, or t
  misc_feature (127)..(127): n is a, c, g, or t
  misc_feature (129)..(129): n is a, c, g, or t
  misc_feature (136)..(136): n is a, c, g, or t
  misc_feature (146)..(147): n is a, c, g, or t
  misc_feature (153)..(153): n is a, c, g, or t
  misc_feature (157)..(157): n is a, c, g, or t
  misc_feature (161)..(161): n is a, c, g, or t
  misc_feature (163)..(163): n is a, c, g, or t
  misc_feature (167)..(167): n is a, c, g, or t
  misc_feature (186)..(186): n is a, c, g, or t
  misc_feature (197)..(197): n is a, c, g, or t
  misc_feature (202)..(203): n is a, c, g, or t
  misc_feature (261)..(261): n is a, c, g, or t
  misc_feature (263)..(263): n is a, c, g, or t
  misc_feature (278)..(278): n is a, c, g, or t
  misc_feature (289)..(289): n is a, c, g, or t
  misc_feature (298)..(298): n is a, c, g, or t
  misc_feature (300)..(300): n is a, c, g, or t
  misc_feature (304)..(304): n is a, c, g, or t
  misc_feature (323)..(323): n is a, c, g, or t
  misc_feature (330)..(330): n is a, c, g, or t
  misc_feature (337)..(337): n is a, c, g, or t
  misc_feature (343)..(343): n is a, c, g, or t
  misc_feature (354)..(354): n is a, c, g, or t
  misc_feature (356)..(357): n is a, c, g, or t
  misc_feature (360)..(360): n is a, c, g, or t
  misc_feature (365)..(365): n is a, c, g, or t
  misc_feature (367)..(367): n is a, c, g, or t
  misc_feature (369)..(369): n is a, c, g, or t
  misc_feature (373)..(373): n is a, c, g, or t
  misc_feature (387)..(389): n is a, c, g, or t
  misc_feature (392)..(392): n is a, c, g, or t
  misc_feature (394)..(394): n is a, c, g, or t
  misc_feature (397)..(397): n is a, c, g, or t
  misc_feature (400)..(400): n is a, c, g, or t
  misc_feature (404)..(404): n is a, c, g, or t
  misc_feature (407)..(407): n is a, c, g, or t
  misc_feature (409)..(409): n is a, c, g, or t
  misc_feature (412)..(412): n is a, c, g, or t
  misc_feature (589)..(589): n is a, c, g, or t
ctctctccacacgnanggtggntntngtgncccntgatncacagtatggaataatggcaangaggananctatatngaaagnacttgtcataggnaatnnggtggctnccttaangctccntgaggnanacacttnatgaatgctnngagtcngganaatnancggncccatatagagataggttnatgaagcggantctgnnggatgagcttcatcagcaatcctcagaatgtcagttctactagctaaggatgcaggtnantatgttggacaccangagaacagganggaagtgtntngaanactggaggtgggtcatgangaagctnatacatnttcacnttgtgaatcantnncanggacngntnaacnaagactgggcgttnnnaananacnggntttngtntngtntttcccctaaggcaaaaggcagaaatgagtgggtacaccatgattaagttgcattctgtagagataggatcatttaagtcaagtcagcaacaaaaattagagacattgaagatgatggggtagaaaaggggtatcaaataggttagaaagatggcttgaaaggaaatgagggaaatnccagtgtggagagatggtaccgagctga

SEQ ID NO: 629699 - DNA, 140 bp, Homo sapiens
ggggccccttgggggtggggttttaaaccccccccctttctttccggccttttgggttttttttccccggcccccccttccctgggggccctttcccccttttgggggggccccccggcccttgggtttaaggcaggggc

SEQ ID NO: 629700 - DNA, 383 bp, Homo sapiens
gcgaagtcgtccttctgccccaaatagtgactgacatagagaaggtacacagtaaacactataaaaggaatgcctgcctgactgaagcttactgatgtgaggcttctagttgtgataccctacctagtgtaaaccggaagtgactcttccttagctaagagagccagacggactccatcgtgactccttcactcgcagccccttacccacccccttcctcaaggactaaactggtgcaagctgactcccagcacatcaagaatgcaattaactgataagatactgtggcaagctatatccgcagttcccaggaatccgcccggttaatagcacccagagcccctgcgtttgtgtccggttgataacgcccaaagcccgccctc

SEQ ID NO: 629701 - DNA, 102 bp, Homo sapiens
  misc_feature (1)..(1): n is a, c, g, or t
nttcggcacagcccaagaagaaataacagcaacagtgaaagtaaatttgccatttgggaggcctagggtactgcagaagaacgtggaccactgtctccttta

SEQ ID NO: 629702 - DNA, 102 bp, Homo sapiens
  misc_feature (84)..(84): n is a, c, g, or t
ctgagatccggccactaaagagggagcagtgacatttcacaggagatgacccagaaaactaaacaacgtgtgagtgttgtgtgncgtggtttgcgcgtcgcc

SEQ ID NO: 629703 - DNA, 852 bp, Homo sapiens
  misc_feature (260)..(261): n is a, c, g, or t
  misc_feature (274)..(275): n is a, c, g, or t
  misc_feature (277)..(277): n is a, c, g, or t
  misc_feature (280)..(280): n is a, c, g, or t
  misc_feature (282)..(282): n is a, c, g, or t
  misc_feature (289)..(289): n is a, c, g, or t
  misc_feature (291)..(291): n is a, c, g, or t
  misc_feature (299)..(299): n is a, c, g, or t
  misc_feature (319)..(319): n is a, c, g, or t
  misc_feature (322)..(323): n is a, c, g, or t
  misc_feature (336)..(336): n is a, c, g, or t
  misc_feature (338)..(338): n is a, c, g, or t
  misc_feature (340)..(340): n is a, c, g, or t
  misc_feature (361)..(361): n is a, c, g, or t
  misc_feature (393)..(393): n is a, c, g, or t
  misc_feature (401)..(401): n is a, c, g, or t
  misc_feature (407)..(407): n is a, c, g, or t
  misc_feature (416)..(416): n is a, c, g, or t
  misc_feature (442)..(442): n is a, c, g, or t
  misc_feature (553)..(553): n is a, c, g, or t
  misc_feature (555)..(555): n is a, c, g, or t
  misc_feature (557)..(557): n is a, c, g, or t
  misc_feature (609)..(609): n is a, c, g, or t
  misc_feature (641)..(641): n is a, c, g, or t
  misc_feature (669)..(669): n is a, c, g, or t
  misc_feature (671)..(671): n is a, c, g, or t
agcggagtcatcaggccaggattccagagagcgtgtgtggctgcagcctgcaccgttgctgcccgctgcccaggacgcggggtgggggacaggagccagagtggtgcctcctgcagaccaatctggggccccaaggtggggggccctacagagatgctccgaggcatgtacctcactcgtcaacgggaacctgcagaggcgacacacgatgaaggaagccaaggacatgaagaacaagtggggatcttcagacggcgganntgagtccctgganncnctncngcgggcnangcagacanaatgatgaagtcattcaagncanntcagaggaagccntnangtggggcgagtcttggagaangtgtggtttacaaatacgggttagcagtgttncaagcttncttcgnactgagttnagtgaggagaatctggagttctggtnggcttgtgaggacttcaagaaggtcaagtcacagtccaagatggcatccaaggccaagaagatctttgctgaatacatcgcgatccaggcatgcaaggaggtcaactggantncntacagcgggagcacacaaggacaactgcagagcgtacgcggggctgttcganctggacagaagcgcatcttcgggtcatggaanaggatcgtacctcgcttttccgtttgantntaactggacttattaacagaagaagatgagttccccggataaggggccacctggaggtcgatgctcagagttcacaccaggcagggctaggggtcccttggccatcttgctacctgcccctgtgacggaggggcaagcaaagcccataaggtccggtgtctctcgacagacggagtaaaca

SEQ ID NO: 629704 - DNA, 632 bp, Homo sapiens
  misc_feature (304)..(304): n is a, c, g, or t
catactgaggtgtcttctctttctcttacctattagaggcatttctgggcaagtttgaggagcatggaattaacagtcatcaatgcattgctggatttgaaaatgatttatatcaatcagcagaggacctccactggtgatgtcagcaggatctgaggatgttcaggtagacatgctatgctttgaatctccaaacttgaacgacattatgactgtgctcatagccaggcttcccttgcttgtggtcattgctgtggatcaaggttgttttgccttccatgcagtggatttgctgaggtgcttnccaatctgtatctcagaattgagatgtatgagaaagaatcttaagaggggaagatatatcctcttgggaccacgaccatgggcttcctttggcctcattgagtagcagtgaatatggacagggggaggagaggcgcaggactcacagggatggtcttagcaatgaaggatggtggccaagaagtgaggactaagattcaaaagaaccttgcttggactgtgccttgtgcctaaactgcacacttcaaaggtaataacttctttgcctacttccccttggaaaccaagaagagggaactacaagcttgcttgctaccaagtagcttacc

SEQ ID NO: 629705 - DNA, 120 bp, Homo sapiens
agtcttgatcgcaatcagcagccattaggtaacagacatttaggtaacagacatttaggtaacagccatttaggtaacagcacatttaggtatcagccatttacggtaacacgccattta

SEQ ID NO: 629706 - DNA, 311 bp, Homo sapiens
ccatccagaaatggacatggtggcacaaagctacatgaatcaaatggcctcgggagtgaccttagctatcatctgtgcacatcgcagctagtgaattcaagtttgaaatcctttttactctgtacttcaaatctatgatcttcctggaaacacttggtaagattagttctgaggagtatctttaggggcacaagtaaaaaatgggattgtcatgccttgatttgatcattcacacattgtgagcatgtatcaaaaaccaaatgtaccccataagtatgtacaattattatgtatcaaaagtggggttgtaa

SEQ ID NO: 629707 - DNA, 110 bp, Homo sapiens
tgttagggaatagactccactctcatttccggagctcacgctcacagacgggagtcgagagtacagcgggcagcaccggctaagccagaaggaagacggcaaacttacaa

SEQ ID NO: 629708 - DNA, 241 bp, Homo sapiens
ctccatcatgagaaaacttgagtgcaagcatggcctggggtgaccatgttgggcttcagaaagggtgccttccaggtagatgtggtggtcacatcagagccttgtagacacgcagccagacaccttctcggtcacatactggcagcgctacaagtcatggtccccatcagagcggatctcaggctccatgatgggcaccatgccattctgctggcggatactgcgcattgagccaagcggg

SEQ ID NO: 629709 - DNA, 158 bp, Homo sapiens
ctgctgaccctttatactttatgccatgggctacatgacgggcaccatttccagtatgtaccaaaccaaagccgtcatcattgcaatgatcatcgctgcggtggatatccattatcagtacaccatcttctgctttcagacccaaggatggacttcac

SEQ ID NO: 629710 - DNA, 173 bp, Homo sapiens
gtgggttcgtgtgtgcagagacttaccttctggccattgacacaccctgcacggcatttcttctgcggacgcttctgggacacggtacgtcatgtactttcacaagggacccctggacgaccgggatacttttacttttgtgagatcctgggtgtgccgcggccatcttgctg

SEQ ID NO: 629711 - DNA, 758 bp, Homo sapiens
tatctgtgagaaagctggagttcataagtattctccccctcccccatctccagtctcctaggtattcccttactgtgtgagtttttctgttggtttatggagacagagtcttgctccattgcccaggctgtattacagtggcgcaatctcggctcacttgcaatttctgcctcccgggttcaagcgattctcctgcctcagcctcctgagtagcggggactacaggcatgtgccaccatgccgtggctaattttattgcatttcacagtagagatgaggttcaccttgttggtcaggctgtctcgaactcctgacctcaagtgatccaccgactcgtctatgggtatatggaaagacaatttttaaaggtagattgggaacaaaatagacttgaagatgggaaatctgttttattcaaaaaggtgctagacgatgtttcaagagacaatattctgatttaatacgctgtagaaggtaggtgtggaactccatgtaacatgtgcaaaacctaattatgcttttgggtcacttgtcagtcgagtaaatcttgccttcatcttctcccaactcatgtcatctttaggttgtgcacctgaagcttggttaagtgatttagtttctttcagattgataacttacaaggagaagtttggttgagcagtgaccaaaaattattaacaggttttgggcaaaggatcaatttaagagtcttaaagatgttgtggaattgctttaagaaaacggagtttagaattgga

SEQ ID NO: 629712 - DNA, 107 bp, Homo sapiens
tagaggatcccgcggattgtgtccgcagtacgtcgggagcattccggataggccgagaaagtgttgtggagaagaaagttagatttacgccgaataatatgatagtg

SEQ ID NO: 629713 - DNA, 319 bp, Homo sapiens
  misc_feature (19)..(19): n is a, c, g, or t
ttacaagccacgtatggtngtcacacctgtaatcccagcactttgggagggtgaggtggaagggccatttgaagcgaggagtttgagattagcctgggcagggagaccctgtctctacaaaaaaatttaaaaattagtgggctgtggcggcacgtgcctatagtcccagctacttaggaaactgaggtgggaggattggttgaggcttcaatgagccataattgcaccactgcactgcagcctgggcaacactctcaaaaagaaaatttacagaataagccaattcctgggtagagagaagtattaagtttccatagag

SEQ ID NO: 629714 - DNA, 270 bp, Homo sapiens
  misc_feature (193)..(193): n is a, c, g, or t
  misc_feature (250)..(250): n is a, c, g, or t
tactacgggatgctgtaatccttcgatagcaagcaggcagtctatctacaaaacgatgtaccctcttttagagtacagcaggaatagcactggttattgtgtggccaatcccatacgagtatataatgggttcttctgtgcttcataaatattgccaggcggtcttcccaatccaaatgaacatccaatgtgncataaaatcctctgggtgcgcacagtccccacgccatacttctttagcagatgctanaagctgtggctttaaccgag

SEQ ID NO: 629715 - DNA, 689 bp, Homo sapiens
gtatcaacgcagagtggccattacggccggggctgactctcttcgaactcagcctgcctgcacccaggtgaaataaacagccttgttgctcacacaaagcctgtttggtggtctcttcacacggacgcacatgaaatttggtgccatgactcgaatcgggggacctccttgggaggttgggggatctcccttgggagatcaatcccctgtcctcctgctctttgctccatgaaaaagatccacctacgaccttgggtcctcagagccaccagcccaaggaacatctcaccaattttaaattgggtaagcggcctcttcttactctcttctccaacctctctcactatccctcgagcactttctcctttcaatcttggcaccacccttcaatctctcccttctcttaatttcagttcctttccttttctggtagagacaggagacgcattttatctgtggacccaaaactctggtgcctgtcacggactcgggaagacagtcttcccttgatgttatcacgcgaggacgcctgcctgattattcacccacatttcagaggtgtccaaccacgcagggacgcctgcctggtccttcacccttagcagcaagtaccgcttttctggggggcaagaacccccaacccttctcttcacctgagtggaagtgcgcttttctagggggcaagaacc

SEQ ID NO: 629716 - DNA, 293 bp, Homo sapiens
tgtccctatttagagccatattgtaattactgtcatgcaccatgggacaatgtcgtggtcggtgattgactgtgtctataatggtgtcccttgtcccataaaattatcacgaagctcaaaaatttctattgcttagtgtttgtggtgatgctggttgttaagaccagcttacttgcatctgtctgctcatatcataatctagcacaggctgggcgtgttggctctcgccttttttcccatcactttgcgtaggcagaggcagtgcgatcacacgaaacctgagcaagcccagg

SEQ ID NO: 629717 - DNA, 571 bp, Homo sapiens
  misc_feature (571)..(571): n is a, c, g, or t
ccacgcgtccggaaggactgacaccacagatgacagccccacctccttgagctttatttacctaaatttaaaggtatttcttaacccgaaaaaaaaaaaaaaaaaaaaaaaaaaaaaaaaaaaaaaaaaaaaaaggggggggggggcaaaaattccccgggggggcccatagggctaaccgcgattttcttggtgaaacaaggggggtctccataggaggggctgtttattaaagagcacagcacgaagagcgcgcggactaaaacaagcctgctggggaaggagggaaaacaagtggggacatggaggagatgtttgtggagggaaggacgacactcatttgtggggggggtgggaggatattttgtgggaactaaatactactgaagaagaattttaaagccggcttgtagggagagaattattaacaaatttggaaggttaggtatttgtgggtgaaacccaaacgcggggagtattagtcggggcggggtaagaaaatattttgggtattaggagagattatattttagaaaaattttattaacgggggggtatgtataataaagan

SEQ ID NO: 629718 - DNA, 1211 bp, Homo sapiens
agcggctagttccaaaccacgtggacgcgtactagggctagctaggagtgcagcccgagccgccgccgtcggtgtcttcctgtcatcaccaccattctgtgagtcacgagtcccgcgtctgtccttaattcgccgctctcggtgctactacactgtctcttacggagagcgcgcatcatggctgacttcatgtatctcatctctctacattctaatcgtcagaggtagcaactttcttatcgccaatcttactaggtacctagttctaacccctgagtcgtgtcggccctctttcaataatccttatatagattcgggccaggagacgacaacccgggcctccgagattttgaagcctagctatcataagtactaagatatactaataaaatacgaataaggttctcggaattttgatatattaataccataatcattgatacaaacctaatataatatatacattccaaggtcctacctaagttaatgggtagtgcatacttggtggacacatggaactagtaagtcgactctaacagttattctatatatggaaaaataccttggacgagtctttctttagctttgtagccaccatcttaattgaaacagccaccccggtttaaaaacaataaggttttataacgaaggtgagggtggtctcaatgaaattcgatagggatagaactctctatactaggtttggagttgtcatctattaaaggagcaacacaatctcttctctctattatttatttgacaatcaaatttttatgggaattttgattatgtgtatacactcgatttttctgtcactgccttatatccttaatatctatctacccgaactgtggtcgcgacattggcctcccccttttcaggacattacatgacctgaatttttgacgttattttcgttacccttatagttctttatgtagagcgggcagacgttcttcttttataatgcctctcaaatatcatagtttacattatttattattcttttctatctcttcctatcggcaacaaattttattataaatatagtctgaacttcctatcaactttatgaattaactccctcttagaaagttcttcaacatctcttcatttagtagggtcatttctattctttttagcttctttcctttttattttattttcccttatccctgtaccttttcatatttctccctccggaatccgcg

SEQ ID NO: 629719 - DNA, 266 bp, Homo sapiens
ccccccccaattttccccctaggggggggtttttttttttggttttttccccttaaaaatttccaacctttgtgggggtgggggaggggggagggaaaacctttgggaaatttcccaatttttaaatgggggtttgggggggccccccccccccccgggccctgttttcattttttttttaccccccccatggggccctggtcccccaaactttaaggttttttattaaaattaattaattaattaaattaaaaattaaaagggga

SEQ ID NO: 629720 - DNA, 428 bp, Homo sapiens
gcgtactcctatccttaggcagatggtccagaactcagaatttcccagttgtagaaagatggggccgggtgcagtggctcacgcctgtaatcccagcatattgggagtacagggtgggcggatcacctgaggtcgggagttcgagaccagccagtttgagaccagcctggccaacaagatgaaaccctgcccctattaaaaatacaaaaattagccaaatgtggtggtacgcgcctgtaatcccagcaactcaggaggccaaggtgggaggatcacttgagcccaggagttcgagaccagcctgtgcaacatggcaagacctcatctttacaaaaaattttttaaaacttagcccaccgcgcctggacaaaaattgagtttttaaatcattcattacttggtcacatcaggagaacgcgtcaaaatcg

SEQ ID NO: 629721 - DNA, 181 bp, Homo sapiens
ccgggttgggacgcactgcactccagcctgggcgacagaactagactccgtctcaaaaaaaaaaagactttacctaaaaaatgagagggctttgagtccttggagagcctccacgggtcctgagtcattggtcatttctcagtttggaagaacatgggtgctctggtagcctgcttatata

SEQ ID NO: 629722 - DNA, 1157 bp, Homo sapiens
gagatcacaccatcgcactccagcctgggcaataagagcaaaactccatctaaaaaaaaaaaaaaaattagacattaattattgaccaccagatttcaaaaaaccaagcaaattctaaaaaaaattgcaatctcgcaaagagttcattaattcaaaccttcttaaagacacagagaaaaaatttctgtgaaagcgcaagttatgccaggaagggaaaccaatataagggattaacgatttacgaacattacaatgtgaacatgtgaacatgtgacaacaacaaaacaacaccacattaggagaacaacatctcaggtgtgagaattctaacagagatgtgtgtgtgtctctttgtggacacaacacaagactctcaagtacaaacttgtgagcacacaaatcgtgtctttagccaagggggtgtgtgacaaacacatgtgtgagtatacacacgcgttctatatgacacagggggctgtgagacacagacatactagagatatacacaccactttttctgtaaagcgcacagaggggggtgtgaacaacagagagaaaaaaacagaggaaacacaacagagaaatctataactatttatctgacgagaacactgtggttgagagagcgaggggaaaatatctcacgcattatagttgaaagaacaaccctctgtggtgatcgcagaaatattattctcctgagagcacaccacaacaatatcacactccttacagggggggggaacaaatcctaattattatcacagtgggaaacacgcgagaacgctgatgtcttctgcacaacaccgacttttcgtgctcaaacgaccctgtttattacgacacaccacgactttgttacgagtcacttttatcacagcacgacataacgcacagaggcggggacacacacgcccaacaagtatgatttactcccccctgcttcagtacattgcaagaaaatatgcccgtacccactaacaactatgtttcttcaggccccttaatcagaacaaagtctcttcccaacgctcgtttcccaaaagaagtactcgttaaagcacccagtattacaaactattacgttgtagggagaacactttatacagcgcccccccccctgcgggttgtaacacagagccgtttcttctatcaga

SEQ ID NO: 629723 - DNA, 170 bp, Homo sapiens
tttttcctcagaaatctcagtattttatagctctgacgtaaatgaaattcaatttcatagtgtctctcagcacccgaacgtaaaatcctttcttatttcacgactagcgactacacagtaaaagcaacatctctgttcgaaatttcagctttctagtcgtagctatcacg

SEQ ID NO: 629724 - DNA, 146 bp, Homo sapiens
caatgcaacgtgctctttcctccaagactccaggatcaccctctatcagattgcttttcccggcagcttctctgatcaagctatgccaagctctgttgatcctgtgaccgctactttgtctatatccatgtgagaagaaatggctg

SEQ ID NO: 629725 - DNA, 596 bp, Homo sapiens
aatgttaaaaagtccctgttttgtcctgaaattttagtttattttggggaaataggattttttgacccaaatatgaaaagttgtagctttgaagtttagcgggagtctccttgatttgcggaatgcattattttaatttgcttttttgggaaagcagttttgttaaaaactgtacagacttttttttttggtcctagcaggactttatatagtaaagctttgggccatgtagccttttaagactcaattttaaaaaattattaatctggtggggacttttaattcctatttcaaaaaggggttccttgaagaattcaggatacaactttttgggtatgacagctttccttccccccctatttttggggggggggaaaaatttgatttgggaagaatttaaaaaacccatagctttttaatttgtttgaaacaaactttttgcctgttacatttttggttttaaccaattaaaaaagccaaaggcattttagttttatattgggttttcccctaggaaatccccgttgatttgtttgggccttttattaactgcccttttttaaaattttttttcaataaaaggaaggaagatggta

SEQ ID NO: 629726 - DNA, 345 bp, Homo sapiens
  misc_feature (26)..(26): n is a, c, g, or t
  misc_feature (35)..(35): n is a, c, g, or t
  misc_feature (43)..(43): n is a, c, g, or t
  misc_feature (50)..(50): n is a, c, g, or t
  misc_feature (107)..(107): n is a, c, g, or t
  misc_feature (110)..(110): n is a, c, g, or t
  misc_feature (159)..(159): n is a, c, g, or t
  misc_feature (173)..(173): n is a, c, g, or t
  misc_feature (177)..(177): n is a, c, g, or t
  misc_feature (184)..(184): n is a, c, g, or t
  misc_feature (233)..(233): n is a, c, g, or t
  misc_feature (260)..(260): n is a, c, g, or t
  misc_feature (278)..(279): n is a, c, g, or t
  misc_feature (287)..(287): n is a, c, g, or t
  misc_feature (290)..(290): n is a, c, g, or t
  misc_feature (308)..(308): n is a, c, g, or t
  misc_feature (323)..(323): n is a, c, g, or t
  misc_feature (343)..(343): n is a, c, g, or t
aggatgctgcattgcgaggacccggnaattcatantggtgccncgttccntcccgtatttctaacgtgtatgtttctggtggaaaccgagttcaccctggctgggancanctctgatgaggcattctggcgactggatggataatcctgtgcatcaccnttgtgtcctgtgcncccncctagcncagtggccaagccgggaaagccgctaacttgccgttgctgctgctgccntttttttcttttgtctctgcctttccntttgttagatgggggccnnctcttccntanctctgtctctgagttacngggtggaaataagcntataaatgaaatactcttcngg

SEQ ID NO: 629727 - DNA, 613 bp, Homo sapiens
cgtgaaacaatatattgatccaacgtatagttggctggtcagtgaaatattatgaacttgaagaaatagtatacgtcagtctgactcaagatacctgttagtctgctctctcatggatcttccattctgaatctattgtcagtgcctctagactgttgcttcccaacatctcacagtctagttgagctacattttctgtactacgatacatattccagcgaataatctatagccatccttaccgatccagatggaaccgggacagagccgattcgcagagcttaccttgtccacttgtctctaggtaaataattaccgagctcaggtcattgtccgacgaaggaactataatttctgattacctactgcagtttcgatattgactgcaggatttttcagatacaactctctgattactatgaccactttattcgttgaatccacatgagattgattgaccgtgtccattgccaaactaccacacatttctgatatacatcacggagttactgaaaaagctgcaatcaaccacagtcatgaaccccctacatgaagcttgctccaggagaacttactatcatcctctaattttttaaaagaaatcttcatttat

SEQ ID NO: 629728 - DNA, 188 bp, Homo sapiens
gtctagcctcgcgtagtggctgggtattacagatgcacaccatgccccattacttttttgtgtttttagtagagacggggtttcgccgtgtggccaggctggttttgaactcctgacctcaagtgatccatccacctcggcctcccaaggtgctgggattacaggcatgagccaccatgctcggccta

SEQ ID NO: 629729 - DNA, 391 bp, Homo sapiens
cgaaaatacgatataaaattctgaaggataaataaaaaaacaggcgaacattaaatataagaataataaagattaagaagaattataaagagaacaagaatactaaaagaaacaagttcaaaagttaagaatatgataataaaatgataaaatatgaaactataaatcataaagaacaatgtagactgaggaaatattaataatcagacagaaatactaatccgaaggtagattacaaacaccaaaaaaataacagaactatcagacaaccagcaaccaaatataactatatctataactctctctctctctctctctctctctcgctctctctctctgggtctctctctctctctctctctctctctctctctctctctctctctctctc

SEQ ID NO: 629730 - DNA, 106 bp, Homo sapiens
gagtgataccatgaaggagctgtgtagagtggtgcggggaatgtggaccctatgctggagaagaggtcggtgggctgccggcgctgcgccgttgtgggcaatcggg

SEQ ID NO: 629731 - DNA, 338 bp, Homo sapiens
ctccacagtatccagtgtcagaagacagtggagcaatatatacatatttcttaaggagataatatggttaattaaagttaaatataaatccattctctccttcaaatataaaagctacagtaaaagcatttctgtggggttattgtttctataaatttctcagggaaactaccatcggctaaatgcaatgcaaccaagagttaattgaagaaactgtcaaagaacttatgtgagcatttattatatttaaatctagaaaaagactaaaacaaaagtgtaacttagggtgacagatgggattgtaaatattatagcttctgacaatgcagaaataatta

SEQ ID NO: 629732 - DNA, 483 bp, Homo sapiens
tctagagatcccccggagccttcacctatcggtcggctcgctgggctggtgttggtattcgacttccaccaggtaaggtgggcggtggtgcttgagccaggtcttgatgcgcacgcgggtcaggccctgggcgacgaactgcagcttgccgttctcgcggctggcgtggtgcaccttcaccagggtgccgtacagcggcagggcggaggtgtcgaagtgccgtgggtcttcgggcggcgtgtccatgaaaaacagcgcaagggaatggtggtcggatttgctcaccagctccagggtttcggcccagggttcttcattgacgatcaccggcaacacttgtgccgggaagaacggccggttgtggatcgggatgatgtagaccttgtccggcaggttttgcccaggcagggccaggccagtattggacgagggggtttcagcgttttcggggtcgggataatcgttgaggtcggtatctggaaa

SEQ ID NO: 629733 - DNA, 195 bp, Homo sapiens
  misc_feature (32)..(32): n is a, c, g, or t
  misc_feature (53)..(53): n is a, c, g, or t
aggttgcttggcctgcctttctgtcctggggnagctcggggagacaggtgganggagtagatgtcagagacatggtctggtgaagatgccaggaaacacgagcctccagcccattttccaacaaccacccatcaacaccaaagaggttcccaagacatcccacaagggaaaagggacccgtcaaggaagttccag

SEQ ID NO: 629734 - DNA, 552 bp, Homo sapiens
  misc_feature (130)..(130): n is a, c, g, or t
  misc_feature (139)..(139): n is a, c, g, or t
  misc_feature (289)..(289): n is a, c, g, or t
  misc_feature (324)..(324): n is a, c, g, or t
  misc_feature (333)..(333): n is a, c, g, or t
aatccacgtgcctgcttctgactgagattctctttctctctggcccttggctcttcccccatctcctctgaagcgcactgcagcctagtggctctaagtgtaggctccggcactagagtggattccagcnctgtctatnccgtgtagggattgtgttttctgtacaagtctctgtgcccctatttcacctgtgaaatggggataatgacagtatctgctgatggggttcctgtgagggctaaacactgcttagaacagtctctggaattgagtaagtgtgaagtgttgncagttattgtttgggagggaagagctattggttgnccgtgtggnccacatgttccctgtgaatgtgagtttccatgatctttctctgcagtggtagactctcgttctctcagacagatgctctcctcggggagttccggtaatgctattttctatgaaacagtcattctcacttctccgtgttggtggagcctctgtggaccatgggcaggggctccagagatcctgtgtttctctgctttgggaaaatataatttcaaagaa

SEQ ID NO: 629735 - DNA, 441 bp, Homo sapiens
  misc_feature (4)..(4): n is a, c, g, or t
cggnccccccaggctctctacctgctctttccttcctcctgggtggaggaggggcgggctcccggctcgggcttcatttaccagagcggccggctgcagtcacactcaggtcatcttctctcacctttctccttgggccgattaggggccgtgacagcgctgtgaatggggcaggcatgtccttggagggcatcaagactttagcttcgtgggggcgctgtgtcccagctctgatttcagtggcagccggtgatggacagtggcagggaagcggagatctcactggacagtgaaaccctcaaatgaacacaatccctgctttcctgccaaggtatcctggtagggtcccccagcttccccaattttgtgcggtgtccggacaaagcaaacacagagtcattggcatggcccggtgaccgggccagttggatctcccgggag

SEQ ID NO: 629736 - DNA, 370 bp, Homo sapiens
gcacacatgagcccaacaggtacacgaatggatccaccagtcccaaccccagctattcctttcatctgacccagaatgtgcatttatggaagcctccctcaatctccaagctggcagagcaggagggagagtgaagtaagagatggcagagggagatggtggcaaaaaggtttacgatgcaggagaacagtcaaggaggatggttccggccagagtcgatgtggggaggaacagagggctgcagggagagggggctgactgttccattctagcttcggcacaaatcagcagaacgggggaaaagccactagacatttccttagcttccccaccctatgtatattctaggatttgagaggcaagagaggca

SEQ ID NO: 629737 - DNA, 362 bp, Homo sapiens
gcgttattaacttttatatcagatggtcccgacctatgatggttcaacttatgatttttcacgtttactactgagtttactgggacttgaaatgcattttctttctttttttttttggagacagagtctcgctccgttgcccaggctggagtgcagtggcaccatcttggctcactgcaacctctgcctaccgggttcaagtgattctcctgcctcagcctcccgagggcagctggattacagccatgagcccttgtgtcccgcctaaaaagttgtttaaaagaagtttggactctgaagcctaacagaccagggtttgaactctggttcctgtcattcactacctgtgtgactccagacaa

SEQ ID NO: 629738 - DNA, 149 bp, Homo sapiens
  misc_feature (26)..(26): n is a, c, g, or t
  misc_feature (36)..(37): n is a, c, g, or t
  misc_feature (80)..(80): n is a, c, g, or t
atcgctgtatcgaggggagtgtgatncaacgggagnncaggaaagtaaagcaagaagtttcagtcccctgcgtgactatnttaaggaaagtccttaggagtgataaacagtgagaagcctttttttattttttagagaacaaagtctcc

SEQ ID NO: 629739 - DNA, 200 bp, Homo sapiens
ggggaaaatggacaataacccttgtgcatctaaattgttcatctggggcagatttttgaatttggaaagcccaatattcaagccaatgtcagtctttagataaaactcaaatgtactcttgacgcataatctagtcttgtgttccaattattaattttttagtgagaaattatcaaacatttcctttaagaaaaaaaaaa

SEQ ID NO: 629740 - DNA, 400 bp, Homo sapiens
  misc_feature (36)..(36): n is a, c, g, or t
  misc_feature (49)..(49): n is a, c, g, or t
  misc_feature (114)..(114): n is a, c, g, or t
  misc_feature (124)..(124): n is a, c, g, or t
gggaaacaggccttttgatgttaaaccttttgaggnacctttatgaggnttaagaataaccttgattcattcctactttgagtatatgttttcgcattaaaaataaaaatatgncccaggcacnaggtgtcacgccctgtaatccccagaaatttgggaggccaaggcgggcggatcacctgaggtcaggagttcaagaccagcctgaccaacatggagaaaccgcgtctctcctaaaaatacaaaattagccgggggtggcagcgcatgcctgtaatcccagctactcaggaggctgaggcaggagaatcacttgaacccaggaggcgagaggttgcagtgagccaagaactgtgccattgcactccagcttgggcaataagggcgaaactccatctca

SEQ ID NO: 629741 - DNA, 151 bp, Homo sapiens
aaggagaaaaagtgggtgagatgctggagaagagaggagaggagagaggcagagagcggtttcaggttggtgggaggggagccctcctccccacgccctcccctcccctgatgcaggggctctggagagaaccaataaagagattactcac

SEQ ID NO: 629742 - DNA, 987 bp, Homo sapiens
aacgcttcaggctagtacgaggcgggtgttgagttcggcggaggcgcgtgcggcgaagtgcggggctgctccgtcggcacaatggtcaagagcgtggctatttctacggtaccccgactgtgggcgaacttccactacggagctggacaccctatgaagccccatcgcctggacattgacccatagcctggtcctgcattacggtctctataagaagatgatcgtcttcaagccataccaggcctcccagcatgacagttgtgccgcttccactccgaggactacgattgacttcctgcagagagtcgagtcccaccaatatgcaaggttcaccaagagtcgttaactgccttcaattggtaggcagtatgactgcccagtgtttcccgggctcttgagattctgctcgcgtaacgcaggcgcatctcgttgcaaggagcaacccagctgaacaacgagatctgtgatactgccattaactgggcatggtggtctgagcctatgccaagaacggtttgaggcctctggacttctgctatgtcaacgacattgtgattggcatcctggagctgctcaagtaccaccctcgggtgctctacattgacatttgacattccaccatggtgacggggttcaaggaagctttctacctcactgaccgggtcatgacggtgtccttccacaaatacggaaattacttcttcccgtgcccggtgaccttgtatgaagtcggggcagagagtggccgtactacctgtctggacgtgccctgcgggatggcctttgatgaccgaggttccaagcccttttccgcgggtattcacaggtagtggcttcttcaaccccgtgcgttgtgctcccgtgggagcgacccctgggcggacccatggggggtttaccacaccgccggctgggggcgtgcgatttgaggcatccccccggcggggggggactctcccgggcgcggggtaaacacgcgggaggccg

SEQ ID NO: 629743 - DNA, 326 bp, Homo sapiens
acacaggagtgctgtcaccactggaccgtgcgtgattaacacgtgacgcaggtgcagagcacgcaagatcgtaaagctggagcctggtcaacgcgagagcgatcctccagtagccgagcatgcatccctgactgaaggacgacgtgtatacagcaatgcaaatgcatgcctccctgaacaagtaccggcgagacgtgagcacagtgatgagctccaaatactcgttatgcatggagcctggacgacgagtattcaccactgcggtgcatgcctccctgtacaatttccgtagacatgtgagcaccgtgctgacctccaaatatcgt

SEQ ID NO: 629744 - DNA, 129 bp, Homo sapiens
aactaagttaagatcagacatctaatttaagtcacacagtacccatcaagcaacaataagtagtaatgaaaaataaagttaaaaagacaaacagggtaaaagtcaggctgagaaatgaaagctttactc

SEQ ID NO: 629745 - DNA, 325 bp, Homo sapiens
gacgcttcaacggaacttaggcgaggatacgaggtgccggtgagcccgagtctgactccggggacgaggaagaggaggggccattgtgctgggaagacgacaaaaagctttggggaagaaccgcagtggtagatttcaaccctgatttcgttttcacttgagaaggaggggacgtacgataggcagctgggccctaggttaatgtcatgtagccatagtcagagatagaagagggcagccacttacattaggatgagcaagattgaggaaagttcgagaagaccaaggaaaacaggaggatacaagaagccaaggtctgggaagg

SEQ ID NO: 629746 - DNA, 361 bp, Homo sapiens
tgctcgttctagcacgatcccccacattagctcttccgtcgctgccccaggagcaccttctcccgggcccctccattgctgtgactatgacctcagcgtgcacagccaccctggccaggctctccccgcctcttcatctcgaccggtcaacctcttcgaccagaatttctccacctttggcatactgagctctgacgccctatggcagctgtcagggcagcatcccttgcctccactcactagatgccaagagcatccccttgatgtgacaagccaataacctctcttgacattgcccagcgtcgcctgggcacctcaatcaccatacagaaccatgcgtctaaacatgagtcaaacaact

SEQ ID NO: 629747 - DNA, 102 bp, Homo sapiens
acacccacaccacaaaccccacaccgacccggggcgaacagtgtatcatagtgccgctgggttgagcgaagacgacgcaggagctagtgagcgaggaagcgg

SEQ ID NO: 629748 - DNA, 322 bp, Homo sapiens
actctctataagtaggtgctgcaaatccagttcttcccaaagcactttatttagggtttattcacaagtcatatccatttggtacaggttggttctaatatttaattaaccacttattacaaatgtcttgcaaagaaatgttattaaaaccttgaatttttaccaatgtaaaaaaccaaaagtgtattaatgttattgttcaggaaaagctacgtaccgaagggcttttgtatatgaattctgtggtggggagcaccatttgtaatctatatggcagttccatctgggttttaagtttagatttcaccgtgtcttagtgctt

SEQ ID NO: 629749 - DNA, 137 bp, Homo sapiens
gcggtctgcaggcggcatggggttgtatggattctggatgcttttgaaggataaacataacatgatgatgatgaagatgacagaacagatacagggtactagagaaaactgtctgcactgctgataaatcaaagggg

SEQ ID NO: 629750 - DNA, 417 bp, Homo sapiens
tggctctacaaggtggaccagccataccaattagatggcaagcttcttgaggatagggccaatctctctctctcttctctcctcttccctttctttctttctctctctctctcgctgtctctttctttctctcccctctctgcatcccacattgcttctgtcccagtgtatggtataagtaacaagtgattaataaatactgactcagtgacctgtttatgacagaaaatctcaaattatagttcatgtaaatgaaaaggagtgaaaactgtgcttggtcccatcctataaacaaaatgtgacagtgttatgatttgttaaaagcaatgccaccaggccaggtgcaatggctcacacctgtaatccaagcattttgggaggccaaggcaggtggatcatttgaggtcaggagttcaa

SEQ ID NO: 629751 - DNA, 109 bp, Homo sapiens
acccaggctggcctcaaactgtgtcctcttttaaaggacacgttttcatttctttatctttacttttgtcttttttagttagagacggagagtggctttgctgcccaga

SEQ ID NO: 629752 - DNA, 228 bp, Homo sapiens
ccttcatgggccagccctgcctccagccctccctctttcaccccaactctcccccaagcccctttttactcaacgggggtagcccctggtgctttgaacccttttgtttttataaaatggtttttgcaaggggcccaggttctcttttccctgggcccctgcaaggaggggagtgctctcctggtttttgtgcaggcgggttgattaaaaatggtgtttttttctcta

SEQ ID NO: 629753 - DNA, 486 bp, Homo sapiens
acaagagacaaaggacatcatatattaataaaaggttcaggccgggtgtggtggctcacgcctgtaatctcagcattctgggaggccaagggtgggcagatcacgaggtcaggagattgagaccatcctggcaacacagtgaaaccccatctccactaaaaaaacaaaaaaaaaaaaacaaaaaaaaatttagccgggcaggggggcaggcaccttatgtcccagcttactcaggaagctgaggcaggaaattggtgtgacccggggaggcagacctttgcagtgagctgagataacgccattgcactccagccggggcaccattgagcactgagtgaacgagactccgtctgcaatcccggcacctcgggaggccgaggtgggcgggatcactcggggtaaggagctggagaccagcccgggccaacagggcaaaaccccgtttccaccaaaaaaaaacgaaaaccagtcaggcgttgggggcgt

SEQ ID NO: 629754 - DNA, 736 bp, Homo sapiens
cctcatttcactacagacctttccggcacactggtgccacattcacctgctccgtactagccatagccagctatgtctatgtttacccagcgaactataccctgccaggactctcccttcgacggtgcaaccttgatgccactcgacaagccgtattgtctgacatgtcaccaacttccgtcccagtggctgctgcacatatcactgtccaggcgctgaaccgatcagcgccctctgaccggatgcatccagtctaagcgcgctaacgcgatacgtgatgactatagtaccggatgcgaattcttgttccgctgaacatataggcgacgccttcaagcgatgtcttcggttacttctcagactacatggcctgtagagatggttgtccacggttagccagcaatccactatccgtgcatcttgcacggtctatagcttgtacagcctcatcacattcactactcgcctgctaatctgcgttcgcagtcgccagctgggaatatgcctctacggcccactttgagcatctactgccgcacgtaactgggaatcttctctcttcccctcatagacgactgatgcccgctcgacttagcgcatacactcgacgcgcattcctgtcttgcgcatgatctcatctccatccgctagtcaattcgctcttcaccctgcttcggcgaactctagtgctcgtataggtcgctccggtccccactctgccgtctctgcctctccg

SEQ ID NO: 629755 - DNA, 102 bp, Homo sapiens
attttcaatggcaggaagagtcccgttctgggacagctggagacagtagtggtgactcaaataacctttaccaaaggaaagctattttttcgcaactattct

SEQ ID NO: 629756 - DNA, 240 bp, Homo sapiens
aatcaaaagagacttctgtatgttggctgaaactggcttgtttgaagatttgactgttaactcactctctcctgatcttggaaggtcagatcgacagctcagttttggcttggtggcgtggaacttcagcttgagggactccatcttggtttggtctcttgggccttgtgcaggagctcagtcccaaccaatggcctcctagaaatattatttaacagttctccccttttggtcaggttg

SEQ ID NO: 629757 - DNA, 329 bp, Homo sapiens
  misc_feature (74)..(74): n is a, c, g, or t
ggcacaggcaaagcattctgggaagggctccagaagaaggtccagcctaggtcccctgcatagctggcagcccncacccccaccccccaggccgccttgagaagcacagattaactgagctctgtctcctgagctgcttctgcctgctttccacctccccagtccctttctctggccctgtccatgtgactttggcccttggttttctttccagattggaggtttcaagaggccccaccgtgaagtaaccaagggcgcttcttgtgggcagctgaggcccatgctctctcctctctggagcccatcctggcagaggggctggggtgggc

SEQ ID NO: 629758 - DNA, 408 bp, Homo sapiens
aaaaaaaatttggcctcttttccctcccaccccaaaaaaggcagaacggggggttttttctggtggtttcctccccccggggttgaaaaaaccagcccaaagggaaggactagggggcctggaccggtttaaatttttttggggttaaagggccccttgggggttttttttcccccttaaaaccttttggaatataaaagggttccccccccttttttaccaagggccccggttaaaataaaaaaaaaaattcccaccttggggggttttcccccccccgttattgggccttttgccccaaccttgggggggggggcttttgggaagatggggcttggggttccggttggttcccttggtggctttttttatggaacccctccaattaaccccccctggtttggttga

SEQ ID NO: 629759 - DNA, 110 bp, Homo sapiens
ggggcacgggttcgtgtgtctttttgaaacatccacctctcacaatttaggcagaagctgatatcccagaaagactatatattgtatatattttttgtttgttttttatg

SEQ ID NO: 629760 - DNA, 1469 bp, Homo sapiens
cgcgctcgcgggttcaaccatgcgtatcgaaaagtgtctcatttccgtacggggaccatctatcctggcacacggcatgatgttcgtccgcaacgatagcaaggtgttcagatttagcaaatctaaatgtcataaaaactttcacaaaagaagcgcaatcctcgcaacagcttaggtggacccaaagcattccggacagcagctggtacagagcttacagaggcatacatacattctgcacactctgacaacacgtagcaaatgcaaccatatccaaatcacccagcgcagaagctcatggccacatcaacaactcatccgatgcgcatgcaagaagcagctcgcaagcaaatcgaaaaccagcacagcgccaaaagctcaaattgtactaaactcgacaccaggactacggacacgacacaccaaatacacagcaggcataccaggagacagattccacggcactaaatcacacacgcaaagatcccaaggcacacaaaaccaatccccagtcctgcactcccagcgagccacagccatacaatatgccacagagcaccacaaaggcgcggcaacacccacagccgaggagacacacgaaagaaaacaaaccagggagacaccacggccaacgccatacagacacggacgagcccatcgctcgggccccacaatcgccaacacacaaatcggcaacaccgtatatacacacaaaaacttccatgccaagggcacacaacacccccaagacgacagcccaggcagcacacacacatcggactaacaggcaaagatagcaccggccaccaacacacagtagggacacgcaccccaacgaccacaagggagcgccacacccctaccaccccatctggcgagcacacacagccccacagggggacgccacagcaagacaactaccccaagcttacaacacgacgcacgcgtagcagcgacaaccaatacaaaacgacaaatataacaacaaggaaggagtaacccaaacaccacgactatacaccaaaccccttgccacacaacacaaccaaagcaacggccacattgtcaggacaagacacaggcacacaacaccatgcacgtcactgcaccacaccagtgacacaccaacactatgggacccacaacagacagcacacaaccagccacacgcataacaccaaacacaatacgaaccgcgccaacagcacagtacacacaacaggcgaacacacagaggaagatcgctaccgacacaacaccagggcgccacaccacccacagccaagagaaccaggcagcacaacaaaacaacatcggaccaacaaaacactcgggcagcatcacgcaacagcacgcacacaacagcacacacaacagagcacaaacaaacaccacactcggaaacaccagaacacggcacaaccaacgcccccaggaagtggacaacaaaccagaccaacagaagcaca

SEQ ID NO: 629761 - DNA, 600 bp, Homo sapiens
atttggggggaattaaacggggggggtgactcttcgcatgggggttgcatcttggtggggagagaaacagtctctctgtggtgggtgggataagtaataacccaccacgtggtgtttttgtacggcactacgatttttttataatatgaagttttctttttttccactaataataagttctttttgttccttttttgttggaacagtaaacgctccctgcatcatggtagggataatttagcggtcctctcgtttgttggtgtcgcgccacactgtgtttatttagatgaatggtgcttgttgatggtcgtcatgcattgggtgtgtcgtctttgtgttgttttttcccccgactcttgctcgattcatggtgtgtggttgctgttgtctgtgtagatgtagttttgctcgcgcgtctttgttaaacaccacagtggggttgtttttgtttgtggtaatgattggtgttgcggcgtcatcacctatgattgtttttttttcccccctttgggcttctttttgggggggtagttttttttgggttttttttttttttttttggcccccccctaccttatatttttttgtgagtagaagaga

SEQ ID NO: 629762 - DNA, 365 bp, Homo sapiens
gtcgatctagaggatcctatgcgggagctggagctgaaggagaagagatcaaggagctccaaaatgctggggaccggctgctgcgggaggaccacccggcccggcccacggtggagtccttccaggcggccctgcagacgcagtggagctggatgctacagctgtgctgctgtatcgaggcacacctgaaggagaacgctgcctactttcagttcttctcagatgtgcgggaggccgaggggcagttgcagaagctgcaggaggcactgcgtaggaaatacagttgtgatcgctccgccaccgtcacccggctggaggacctgctgcaggatgcccaggacgagaaggaacgggtgccgcggtct

SEQ ID NO: 629763 - DNA, 977 bp, Homo sapiens
  misc_feature (265)..(265): n is a, c, g, or t
  misc_feature (285)..(285): n is a, c, g, or t
  misc_feature (293)..(293): n is a, c, g, or t
  misc_feature (299)..(299): n is a, c, g, or t
  misc_feature (306)..(307): n is a, c, g, or t
  misc_feature (309)..(309): n is a, c, g, or t
  misc_feature (313)..(313): n is a, c, g, or t
  misc_feature (315)..(315): n is a, c, g, or t
  misc_feature (317)..(317): n is a, c, g, or t
  misc_feature (324)..(324): n is a, c, g, or t
ttcaaatgatgttggtctacttgctgaaaaatgctgggtttgactggaatttaatagactttccacagcacgtggaacttgcaaaaaaaaaagttcactccctaaaaccagatcagatgaaccctttaccaatctgggggttgctgccactgcctttaaacaattgggatatgccttagctatggggtctaattgcaggccatgatatgtgatgggcctgtgctttcccaactatgttcttttttatgtatgtatgtatgtattnattttttgagatggagtttngctcttcntgcccnagctggnntncagngngngactcgnctcgctgcaatctccgcctcccgggttcaggtgatcctcctgcataagcctcccgagtagctgggattgcaggtgcccgccacagcccagcttatttttggtattgagttggagatggggtttcaccgtgttcgtcagggctggtctcgatctcctgacctcaggtgatccacccgcctcggcctcccaaagtgctgggcaccaactatgttcttgagtaagaactcctgatgcctgattgttatgttttatgaacaaaacaaggtgaaggttcagtataagttggaaatccctaagaaacatatttgttattcccatccctggtcatattgccttaattagactgtgaacgttccggatgaagtcctttttaaaatgagccggttactggccatttctgtgtctgccgggtttcccaggtgtggttctaacaggaggcctattattctgaaaccggccattttctttgggccccggatttgtgttgggccccagttttggtgcgaagcctgggtgatttgaaatcttcccctttcatcctgtgcccctcgggttgagggcgctgatcccggggggacctgtccttgcataagcccgcttgtatatgtggaacaagcgtgacgtgagcaactcaccgagagctcttgcataac

SEQ ID NO: 629764 - DNA, 1031 bp, Homo sapiens
ggcttcttcggcggaagcaaccgtgttgcttgatgtcccagcggcgccccgcgtcatcactcgtcggtgcatgcccggaggtcttgcttcatctgggtggactgtggctcgccgaactttgagagccaatactctagcgtcgggcctgcatccagtgttccgacggactgttcgtgggagactcatggtgggcatatctcttgtctgcaccagccgtcgcgtggactgtttaccccagatgttgctacctacgaggagcgttgcgtagcagcttgcaaagcttggccatccaggagattttgccaaagcagggaatggttgcaggtgttgattagccctattcgagataggaccaggagtagtaggagccatatcttgcaccttggaaagcaaaggatgattcaactggcttgacatattcgtcgcaaggaagacgcacacagtaagacaggtataccttctttcccgatcatgcgatcgatcccggcaatcctgggaggcttgatccaataccttgtgtttgggcatggcttgcgaataccacgactatgagataggattggaagagaggggcgagtggcacttgttgaaacgagacatgcgttgatgtgctgttggagtattataggggtgcactgagtaagcacaggcttgaaatgcgtggtgcttatccttgctaacaccaatgggtatcacttgggcaggagaacagttaggatgaggattcatcatggggtatgtcaatcttcttctcacgagacatgacaaggagatacaacaaggggttggccaagacaccaagtttgaatttggacaaggggaatggggaggattaaagctggtgcatgggtgttacatattctaagtctaataggctgtttaaacgaaagaataggacctataacaaaatttttttacgagaaaaacgggagttcctttaaccaaaaggaaagagtcgccgaattcttgggacatagaaaattaacatcaggattatgacgagtgcacgaaggcgttcaagagtataatgg

SEQ ID NO: 629765 - DNA, 245 bp, Homo sapiens
ccctcctataccagttgcaacagaccccccacccttccggccccatgatatttaatctatttaatcttcttgcatctatttctcaagaattactggctttacaagaagccaaagcactactagctttttttccatattggtatttttgatgctgcttccaattttaaaagggaacaaagctgccataaatcgaaatgttcaatactaaaagctaaaatatttctcaccatcctccatggtgctga

SEQ ID NO: 629766 - DNA, 842 bp, Homo sapiens
cgaccacgcgtccgtgattttacttgaatgtgcctcagatggaaccatttgatgtgagaaacaattcgtttttaatttacagcaagaatattgaataaccattgagcaaaaagactattatttccttgtaccaagataatacgttagagaggacctcatgaacgcacgtcttcttactatttaacgaatagttggctgttttgtgaactttattcagaagcagttagtcaataagattccatataataatgtcatgggtatttaagaaatgaatattaatataatgaaatggtttgccgtttgtgtcaggcagtaataagccaaatacgtttgtgttacccaatagataattctcttcagagacaaggtgatgtaatgaagagaagttgtaccatgagttcaggcacgccatagtgctcttctccatttcaacgtcaccattacttacaaagatgattgattattgctataccaaatcagcatgaactctgttcatcacttttcttctctgtccccaaacaattttggttcattcagactgaaatgtttgtgtcttcaacttattagaatggaagataatgcagatatttctgtgggaaataaaataactaattttgaggtaccaaatagtgcaattgggtaaaacagggtttattcagttgcatctgtctccagtgttgtattgacagctctgggtcttattattgggccagcccttttttgacattgcttccagcagtggaaaatgggcatttgatggcaataggccaaaatcattgtgtccagagagtacactttttcaaaatgctcacctactggcaagtgtgaatccacttgacaat

SEQ ID NO: 629767 - DNA, 726 bp, Homo sapiens
taacggggacggcgagtggctggtgcccatcgggcgctgcatgtgcaaagcaggcttacgaggcgcgttgagaatggcacctgtctgccgaggttgtccatctgggactttcaatggccaaccaatgggagatgatggcctgtacccacattgtcccatcaacatgactggaccacttctgaagtggtgccaccaactgtgtcttgcctgcaattggcgtactacagatgcagacctgtgaccccactgtgacatgccctgcacaaccatcccctcctgcgccccaggcttgtgatttccagtgtcaattgatgacactccactcattgactaggaggttggacccctaccccgatgacatacctggatgtgccgacagagtgacctcgatctaacaaacatcattcttgcaaagacgcttggtgtgctcgggccgtgtgggtagcactgacaccctggcaatgcagggcgaaccaaattggtaacatagttacgacacccaacgcgcaagcttagggcactgaccctggaggccaccggccatttttaccatcacgtaggaccctggcaaggggaccacaccaacccaatgattacacccatttcgacgaattccagggctggtgaacgcgcgtaacatgacccagagtcccctttatcgcccttcaagtcgcgctctgtagaacatcaccaccaaaccaggtcgcaccatcggagctgccatcc

SEQ ID NO: 629768 - DNA, 420 bp, Homo sapiens
  misc_feature (9)..(9): n is a, c, g, or t
  misc_feature (42)..(42): n is a, c, g, or t
  misc_feature (179)..(179): n is a, c, g, or t
  misc_feature (211)..(211): n is a, c, g, or t
  misc_feature (313)..(313): n is a, c, g, or t
  misc_feature (380)..(380): n is a, c, g, or t
  misc_feature (382)..(382): n is a, c, g, or t
  misc_feature (386)..(386): n is a, c, g, or t
ggtttctgnctaaaagcctggcccgctaaggtgaaaagggtntggcaaaaggagcctactcccaaaaatggaggctgtaggaatataacctcccaccctgcaaagggaatctcttgcctgctccatctcataggctaagtcagctgaatcccgatagtactaggtccccttccctccgnatcccgtcagctggaaaaagcctgtggcccanaggcttctccaaagggagggtgacatgctggcttttgtgcccaagctcaccagccctgcgccacctcactgcagtagtgcaccatctcactgcagtagcacncctcctggccgtctggcctgtggctaatggaggtgacggcactcccatgtgctgactccccccatcncnctgncgctgtgccctgcctggctagtccctgcctgaat

SEQ ID NO: 629769 - DNA, 404 bp, Homo sapiens
  misc_feature (304)..(304): n is a, c, g, or t
  misc_feature (369)..(369): n is a, c, g, or t
ttcatcatactggaggaacagatttaagtatgcccggacaggagatgaagtaaagaagattggcatgcagcggttcattaaaatcgagggcaaggtccgaactgatataacctacccggcgggattcagggatgtcatcagcatggacaagaggggagagaatttcggtctgatctatgacaccaagggtcgcttggctgtacatcgtattacaccggaggaggccaagtacaagtggtgcaaagtgagaaagatcttggtgggcacaaaaggaatccctcatcgggtgactcatgaggcccgnaccatccgttacccaaatcccctcatcagggtgaatgataccattcagattgatttagagacggncaagattacggatttcatcaagttcgacacgggta

SEQ ID NO: 629770 - DNA, 313 bp, Homo sapiens
tggaaatggattctcgctttgtcacccaggctgacgttgcagtggcgcagtcttcggctcattgaaggcttcgccctcccgggtccacgcaattctctgtgcctcatcttcccaagtagcgtggaaccacaggcacccgacacaagtggccatttttttttccttggtattttaagaaaaaaggggcccccacggtgcaagccaggattgctctaatcttctaacctcgtaatccgcccacttcagcctcataaagtgctgcaataccgggaattagataccgaaaaaaagcccaaaagggttcccgagctca

SEQ ID NO: 629771 - DNA, 417 bp, Homo sapiens
  misc_feature (1)..(1): n is a, c, g, or t
  misc_feature (7)..(7): n is a, c, g, or t
  misc_feature (94)..(94): n is a, c, g, or t
  misc_feature (116)..(116): n is a, c, g, or t
  misc_feature (121)..(121): n is a, c, g, or t
  misc_feature (139)..(139): n is a, c, g, or t
  misc_feature (144)..(144): n is a, c, g, or t
  misc_feature (159)..(159): n is a, c, g, or t
  misc_feature (201)..(201): n is a, c, g, or t
  misc_feature (209)..(209): n is a, c, g, or t
  misc_feature (242)..(242): n is a, c, g, or t
nccctanacttgacgtctggcattgtttaaaaaaatccgattgataggtcagagtattgggggattatagaatccccctttcacccttgtgtangtctttgttaacaactgttatncttantctaaaatgagtctcaancggangccttgaagacagangcttctatagaggttccttgacctaaatagttcagcattgtntttttatnctggtatctaatcagattcctaatcatagcccntaagaaggaatgttactttaatattggactttgctcatgtgctcgtgtccgcattttttttttcttaaaatcatagccatatggtaaattttctattttgttatggttctcttttattgatgggcatgcagtgggtgttacttggaaatggccaatttttattaaaatatttctg

SEQ ID NO: 629772 - DNA, 117 bp, Homo sapiens
ctcctgctaccgacttttgctcttactttatgcctgctatgactccggctctgggtttcccgacattgtcattgtttttcttagtggagaataaagaccaaggggcacagtggagga

SEQ ID NO: 629773 - DNA, 300 bp, Homo sapiens
  misc_feature (18)..(18): n is a, c, g, or t
  misc_feature (173)..(173): n is a, c, g, or t
  misc_feature (283)..(283): n is a, c, g, or t
  misc_feature (285)..(285): n is a, c, g, or t
aattcgcggccgcgtcgnacacggctgcgcagaagacgacagaagggtggaggttgccgtgagttgagattggaccactgctctccagcctgggcaacagagtaaaactctgtcccaaaaaaaaaaaagaatacaaccttgcaggatgtctctcctggagacagcaagagcgnagacgagggagagggctctttcttagaaaagaggcctttggtgagcccagaagtttgaaaccagcctgggcaattcagcaagatcccgtctctacaaaaaaaaaaaagananacaagcggccgctcg

SEQ ID NO: 629774 - DNA, 621 bp, Homo sapiens
  misc_feature (258)..(258): n is a, c, g, or t
  misc_feature (279)..(279): n is a, c, g, or t
  misc_feature (285)..(285): n is a, c, g, or t
  misc_feature (295)..(295): n is a, c, g, or t
  misc_feature (315)..(315): n is a, c, g, or t
  misc_feature (339)..(339): n is a, c, g, or t
  misc_feature (343)..(344): n is a, c, g, or t
  misc_feature (353)..(353): n is a, c, g, or t
  misc_feature (369)..(369): n is a, c, g, or t
  misc_feature (381)..(381): n is a, c, g, or t
  misc_feature (384)..(384): n is a, c, g, or t
  misc_feature (395)..(395): n is a, c, g, or t
  misc_feature (397)..(397): n is a, c, g, or t
  misc_feature (425)..(425): n is a, c, g, or t
  misc_feature (430)..(430): n is a, c, g, or t
  misc_feature (444)..(444): n is a, c, g, or t
  misc_feature (459)..(460): n is a, c, g, or t
  misc_feature (477)..(477): n is a, c, g, or t
  misc_feature (479)..(479): n is a, c, g, or t
  misc_feature (484)..(484): n is a, c, g, or t
  misc_feature (489)..(489): n is a, c, g, or t
  misc_feature (512)..(512): n is a, c, g, or t
  misc_feature (532)..(532): n is a, c, g, or t
gctcccttgaggccatgagttcaaggccagcccgggcaacatagtgagactctgtctatatggaaaaaaaaattaaccaggtgtggtggcatgcacctgtggtcctagctacctaggaggctgaggcaggaagattgcctgagccaggaggttgagtcttcagtgggccatgatcataccactgtactccagcctgaatggcagagcaagaccctgtccctttaaaaaaaaaaaaaaagaaagaaagaaaaagaaatntaagaaagggcactagaatantcagtnttatattacntttatttccggtttaaaaantccacacaacgggcaaaaaaaagngacnntacattgancatttattaagacagntgcatttataanttncaaactctcgngntcctcccatattatttggcagggatgantgatnaggccatccaaagntaaagattaattggnnaattggctaatgatggnantgacnccggntgaggtacaagttcccagcaatnctgggaattagcaatagggngtacttctttctcgaaagaagcatgattggtaagcagctatatctgagtgtagtaaacctgaaagtttaaattaaaacaaaaaaaaaag

SEQ ID NO: 629775 - DNA, 491 bp, Homo sapiens
ggccacttccactatgtcccatcaaagagagctggattggccatcataggagggttcattccctgatttcccctattttcaggggaccccctaggccaaacctacgccaaaatccctttccctatcatattcatcgggggaaatttaacttttttcccccaaccctttttcggcctatccggaatgccccgacgtttctggggcttccccgatgcataccccccatgaaacatcctatcattgggggggtccttcctttttttaacagcgggaattttaataattttcctgatttgagaagccttcgcttcgaagcgaaaagtcctaatagtagaagaaccctcccttaacctggaggggctatatggaggcccccccccctcccccccctttgaagaacccggatacataaaatttagacaaaaaaggaagggatcggacccccccaaggtggtttccagccccccccctggcccccctggctttttcca

SEQ ID NO: 629776 - DNA, 177 bp, Homo sapiens
atactgagatccatctctacaaaaaaaaaaatacaaaaaaattagcctcccgagtagctgggactacaggcacgcgctaccatgccgggctaatttttttggtatttttttttttggtaaagttggggatctcagtattgtaacccagggcatacggggggggggtaccggagctcg

SEQ ID NO: 629777 - DNA, 130 bp, Homo sapiens
agtttgttttggtaatcggggtataataggctctgcctgccaaagggatggaggaaaaactgaaaggcttttcccccccaaaactcttttggggttttcaaagacctgggggtgctgtgaagctggaact

SEQ ID NO: 629778 - DNA, 369 bp, Homo sapiens
tcgtccacgatgacgactccatgcttacttcttctaggaaaagtatttaaatcgaccactcatcattcgaccataattttaaaaaactggctattttgtaaaatgtgtcagagactccatgggacagaaccctactttttgtagaggaacttaatctgaataaagtctgagtataacagtaaatctccactgagtatactggtacttttacaaaaacaagcccatcattgtccatacgtaatgagttagacagatagatatactttcagtttatccatgatttcgtacatcttgtcgcctggaattaacatcacaggttcgcaaggggcgtcattggtaccgtcatcaaaagaccatttgcctcccaga

SEQ ID NO: 629779 - DNA, 292 bp, Homo sapiens
tctgccttgctatgcactgttccttttcaatgaataccaggtttccaggagagaatccactctattgttatatcttgggtcagctccttcattaatggcctagaatgtcatctcactttccaactttcctagacttggcaagcatcccctgctgtcccactcttcacaatttgcaagccaactttttgcccacttctgtgcaagttgtttcctttgataccactgcttgactgtttctgagtggctactcaccagccctgcagccaatcaagcagtgagtgcagtgcagtgt

SEQ ID NO: 629780 - DNA, 286 bp, Homo sapiens
  misc_feature (42)..(43): n is a, c, g, or t
  misc_feature (72)..(72): n is a, c, g, or t
  misc_feature (161)..(162): n is a, c, g, or t
  misc_feature (251)..(251): n is a, c, g, or t
  misc_feature (274)..(274): n is a, c, g, or t
ctccatagtccatcgagcatgtccagaggacgcagtcagtgnngttgagtgcgactctgctcatatgcactntccaatcgactctctgtgagcatcgagacagaccttgttattctcagacttggaaatgcattgtatcgatgttatgtaaaggcaaaccnntcagtgtaatagttactccagtgccacaatcctagtgctttcctttttaaaaatgcaaatcctatgtgattttaactctgtcttcaccngattcaactaaaaaaaaaaagtntttttttccaaa

SEQ ID NO: 629781 - DNA, 169 bp, Homo sapiens
ttttcctttccctccggggcttttttccaggttttccaccaatccaaaggggccctgttttttggttcccaaacccaaaaaatttggtttcccccctgtaattaggccgatctgccttgtttggtttcccgggggaattaaggtttcttggctcggcgcgcccaggctt

SEQ ID NO: 629782 - DNA, 160 bp, Homo sapiens
agcttgtgagctccttagatctgtggtctctggagctgtggtatgctgctgatgatatggagaaagaagagctcagagtggaacaaggagagagctactctaaggctgagtggagcgacagatgcccagggatactgagtctcacagactagtcaagcct

SEQ ID NO: 629783 - DNA, 534 bp, Homo sapiens
ggaaggcgtggccatgacgtgatggagcataggcgagagcacaatcgtgctatgcgctgacgccaacgatccgtacagtagagcgtggttaacttacaggaccgtggaatattccaacaggtacgactttaccttgtcagactgctgattctgtaacaaggccttgcacatcaagtttctcctgctgacttaatccacagtcttatttttgtagccagcctgtgagacttaactaatccagtgaaggcagccttggatatgcttgagactaatgacgacagtattgttgcatacatctacaggatacccagaggaacattcctgattgagccgaatggctactagatgagctacccgaatgaatgcgatatgatgttgaaacagtagcttaacatttaccaatggcctcataatattatgagtgtacgcaacgctttaaagtccaaatatgtttagacaattaagagttagtgttataagataacttcagggtttagggtgatcaacaccagttagcgtattttgcttttttgg

SEQ ID NO: 629784 - DNA, 131 bp, Homo sapiens
ataaacacatagcaagggtagtcctcatttaaaatgtattcaggtcgagggtgatggctcacgcccgtaatcccaagacttggggagcctgaggcggggggatcacctgaggtcagagctcgaggccagcc

SEQ ID NO: 629785 - DNA, 150 bp, Homo sapiens
  misc_feature (16)..(16): n is a, c, g, or t
  misc_feature (21)..(21): n is a, c, g, or t
  misc_feature (39)..(39): n is a, c, g, or t
  misc_feature (44)..(44): n is a, c, g, or t
  misc_feature (60)..(60): n is a, c, g, or t
  misc_feature (62)..(62): n is a, c, g, or t
  misc_feature (64)..(65): n is a, c, g, or t
  misc_feature (87)..(87): n is a, c, g, or t
  misc_feature (133)..(133): n is a, c, g, or t
  misc_feature (137)..(137): n is a, c, g, or t
  misc_feature (140)..(140): n is a, c, g, or t
tgatgctagaagcctnataantgttctacctccaaggtnagaantaaaccttaggataantntnntaaagtgattttccccagtgtnttatatgaaacatttccttttggtttaacctcagtataataaaganaaancantcaaaaaaaa

SEQ ID NO: 629786 - DNA, 1064 bp, Homo sapiens
  misc_feature (706)..(706): n is a, c, g, or t
  misc_feature (709)..(709): n is a, c, g, or t
  misc_feature (756)..(756): n is a, c, g, or t
  misc_feature (783)..(783): n is a, c, g, or t
  misc_feature (841)..(841): n is a, c, g, or t
  misc_feature (847)..(847): n is a, c, g, or t
  misc_feature (942)..(942): n is a, c, g, or t
  misc_feature (1062)..(1062): n is a, c, g, or t
acgtattgagtaattgattatttatagcatgttagatggcagagtgccgtagtgttgtgtacaggatgacgacttgggctgccagtatgatgacgggcgaattagtatattatgttgtcaagacagatcttgggttatttgatgcccctcccgttgttagataccatggatccggaaaaggtgttttaaaagtgctttgcgtggaattgtttctcgcccgagatcttgattgttgttttccgaattcggaattttgggtttcctgtgtgaagaagagggcgtgtcgcagccctcggagatatttttattcgaaagttgccgtttgccactgggcagttattttcgggaacacattttggggaaagggttttcgcccactccttccagattgattcttgctttttaaggaggacttaccatccgcgactctgtgttctaattggggccacagaggatttcgcttaagaaaagttgaagagccctttcagcactttctcatctgtggagaagatggaatcttgaaaaacctttggaattttatctgttttaccagtcccttgatggcctaagttccccccgttttctgctgtttgatctctaaggaactccccgttgctaaatatgaagagtatggaacattcaaatagtctctgtgaagcactggggggagggaagacatttctttttcttataggctttatgctcnaangtcatagtctcctttcaaagaattgtgttgcattttaaatgcacccngcttaagtagaagacattaaggatgcntaattttcaggaactattttgaattatgaaaagattcccaattgaaaaaattattcancaagtnaaagctaagaaatttcattgaaatcataaggcagtttaagcataaattgataaaaatagctgtgtactactaattaatagaaaatcattcaaccnagagaagagtcaagtgaatatcgtttgtttatttgctagtgagtttctttgtaacgttgattttattaaatgataatatttggttagtatgtcctatgttaataaaaatgaacaaaattnaa

SEQ ID NO: 629787 - DNA, 754 bp, Homo sapiens
aatgctatgtatgagtgctgtgttcaaatcaggcagaggctttgagctggataagctgaagaggcaggatgcagattgcctgtgactctctataagatcctagacagctgcaaacagctgactctgtgcccagtgtggcaggtgagtgaggatccgatgtggcatgtgtgaccatcatcacatggccttccactggacaaccccatgctgtgctttcatgtgccgccatgcatggcatgccctgcatggcctgcgtgcccacgccatgtgtggacatcaatgaattgttctggacttcgtacaagcagttggaaggaaattaggtttgatagcttgagccaccgcaagtgcgcctgcatgttgggtgcttgacatccatgatctctccgtgcccgtccgcgtggcaagccatgggaaccaggtacagccgtgttaggtcaagcacccaagacaatcacctggccatggagctttcaattgtcaagctgcagacagccatgtggatagttgcacgtggccttaagaccttgagctcaatgcaatgaggccgttggcaccggtgtgcaaggtgtgtgccccacaaagagggtaaggcccccggggtacaatgcgagagacagaggcggcttgcagtgagggatcacacccatttataggcgagtagagccccaagagagaaaacgggcttacaacgatggacaacaacgtgcctgagaagcgggaacaaaaagtgtttggccacatatgtgggagc

SEQ ID NO: 629788 - DNA, 1088 bp, Homo sapiens
  misc_feature (706)..(706): n is a, c, g, or t
  misc_feature (709)..(709): n is a, c, g, or t
  misc_feature (756)..(756): n is a, c, g, or t
  misc_feature (783)..(783): n is a, c, g, or t
  misc_feature (798)..(798): n is a, c, g, or t
  misc_feature (813)..(814): n is a, c, g, or t
  misc_feature (865)..(865): n is a, c, g, or t
  misc_feature (871)..(871): n is a, c, g, or t
  misc_feature (966)..(966): n is a, c, g, or t
  misc_feature (1086)..(1086): n is a, c, g, or t
acgtattgagtaattgattatttatagcatgttagatggcagagtgccgtagtgttgtgtacaggatgacgacttgggctgccagtatgatgacgggcgaattagtatattatgttgtcaagacagatcttgggttatttgatgcccctcccgttgttagataccatggatccggaaaaggtgttttaaaagtgctttgcgtggaattgtttctcgcccgagatcttgattgttgttttccgaattcggaattttgggtttcctgtgtgaagaagagggcgtgtcgcagccctcggagatatttttattcgaaagttgccgtttgccactgggcagttattttcgggaacacattttggggaaagggttttcgcccactccttccagattgattcttgctttttaaggaggacttaccatccgcgactctgtgttctaattggggccacagaggatttcgcttaagaaaagttgaagagccctttcagcactttctcatctgtggagaagatggaatcttgaaaaacctttggaattttatctgttttaccagtcccttgatggcctaagttccccccgttttctgctgtttgatctctaaggaactccccgttgctaaatatgaagagtatggaacattcaaatagtctctgtgaagcactggggggagggaagacatttctttttcttataggctttatgctcnaangtcatagtctcctttcaaagaattgtgttgcattttaaatgcacccngcttaagtagaagacattaaggatgcntaatttttttttttncttccccccacgganncaggaactattttgaattatgaaaagattcccaattgaaaaaattattcancaagtnaaagctaagaaatttcattgaaatcataaggcagtttaagcataaattgataaaaatagctgtgtactactaattaatagaaaatcattcaaccnagagaagagtcaagtgaatatcgtttgtttatttgctagtgagtttctttgtaacgttgattttattaaatgataatatttggttagtatgtcctatgttaataaaaatgaacaaaattnaa

SEQ ID NO: 629789 - DNA, 1452 bp, Homo sapiens
taaacacgcttaattcactttatttttctggttataaaaaccctagtgttgtagccacagcgggagcctgagtccgctgcacggagaacctctgtggtgtgtgtgggttctttgacgaggtgtggtcaggtgaaattccgtggatagggaaactggggtgaatacagtcttcctttccagaaggttcgggggttcaggtagcgtgatagagttttaaaaagtggcatcaaagggtggccttggggaaagttgtgcccagggtgtggcagtgtgcagccccggggctgtgagggtgttaccagctcatctcgaataccagccattcagtgaggcagctttcttataggcacagggtgcggaaacagagtgccagtgtgcccctgtgggtgtgcagggaatagagggcgttaccagacaacagaagccagaagaggcgccgtgtgtcaccttgttgtcacaggtgacaggtgtgtggggtatgatgccggactcttggtgttccccccagataagccctctgtgggcacggggagacacatggcgaagacgctttgggccaaggattgattgtgccccaaggagattggcgggtgggcacacctatccttgtgtgaagcaccttataaacaccacaagaccagacggtggggcccatttgtgtaatgtacaccagcagataagcacaaaaaatgggcgctttgaaaacctggggtggccgctgggccggggacagagggggtcatgggtatcatgggcaatctggggcataaactccttcaaaagacactactatccctttggaggaagatgagcgcccccaaggtgaaaagaacattcaaagttgaatcctcgtaagataccctataaaagtggggccacgagggacgaaaacacaggactacagattcctccctccaaggaggaacttagaactcttatcaacttgtttcccttttgacacaaagtcggggccccaaattaggtgtcagacagaagcaactcacacattcctttaatccctatcggggcatttcggcaccaccaggaggaaaggacatcacaggggaggcgccatctagacaccagcggcgccccggcacaaaggggcgcagagaccccagatgaccccggaaattggcacctaggcggaaaaccactcccggcggaaaagcacagaccggcgggcgtaccgcacaacccaagtggggaacaacaagggcgtccaccggagacccccgccaggtcaagaacacaggaggaacgccagcagctaatagatgggagagcaagtgagaaagagtcatatctgagaaacaggagccggacaaaagaaacacacgatgaaaaaaacagagcaagagcaacatcgcacccaaacgaacatactctgagaaacacaagcaaaacgtagtagaagaaacgagagcaaaagcagaggagcacataagttga

SEQ ID NO: 629790 - DNA, 471 bp, Homo sapiens
tggctctaaagggggtaaagggggtgctatagggtaaatacgggccctattctcaaagatttttaggggaattaattctaggacgatgggcttgaaactgtggttggctccacagatttcaaagctttgaccgtagttataccccccggtcgtgttagcggttgaaaggtggtttgggtttagacgctccgggaaatggcattcgtgttttaaagcctaatggggttggggacagcctcagtgaggtgcaagacgtctggtgatgctaattattatacgaagtggggggctctccaactcgggaggtactacctcgatgtgtcaacgctcaaggagtcgcaggttcgccggggtcataggaataaagttgggggacagctatgtcggagttggaagattagtccgccgtagtcggtgtactcgtaggtttcagtaccatggggggccaatcggatttgatggtaaggcgag

SEQ ID NO: 629791 - DNA, 608 bp, Homo sapiens
gggtttcgcatgtttccccagaggcgctccacatctcaggcgatggcggcgggagagacgctccttacttcctagatgggatggcggcgggaagaggcgctcctcacttcctagatgggatggcggctgggacgagacgctcctcacttcctagacgggatggcggccgggaagaggcgctcctcacttcctagatgggatggcggacgggcagagacgctcctcacttcctagacgggatggcggccgggaagaggcgctcctcactttccagactgtgcagccgggcagaggggctctccacatcccagacgatgggcggccaggcagagacgctccccaattcccagacggggtggccagccgggcagagcgtgtaatcttaagcacgtgtggcaggccaagggaggcagcgaacaatttcctaatgaagtactggaaaagacaacctttttctccattactatttggaatagtagatcacatacatcaagtgttccaacaccacgagtcgaataaataatgaatcttgtgataaagagtatccgtcttggagggatattcccgttgtagagatgttcacttgtggcggatatccacatatcttt

SEQ ID NO: 629792 - DNA, 1556 bp, Homo sapiens
acaaactgtgaagagtgtgcgcaatagcctttaaccagatcctcagcgccttgactcgacataagatgattcatactggagagaaacccttccagatgctgaagagtgtggcgaaagcttcctaaccggctcttcacgacccttacgtcaagcactagagataactctcagtacctagagagagacaacgcctacataactgtgaagagctgtggaaacagccttacaggccgcgctccttcagcatccttacctaacacatagcacgacgagacttcatgactgagagagaagggcgctacaagactgctgagtgcacacctcattgccacaagccgtccctacactggctccatcagccctctcgtactacccctctacctcaggcactacacgatacactctcagtacgtggaacgcacgaaaccccctacaaaagtgtagaagaagctgtggcaacagcgcctcttagacccgggtcctctcacctaccttatttcgaacagataagaatacatctcaataccctgggagtacagcaagacccgcataagaccacactgctgcaaccggacgcctgctggcgcacccacgacccgtactacatccacgacttcgttcaaccacctttctacccctccaaccctagttccccactactctttccactagcctgcgcgcgacgaatggcccccgtagcacaaacctggctcgacaccgacaacacggctgggcccacagacgcccccctactacaccacgcgcgacccttccacccacccgcgttccaccatccacagcctcgtgacccgcaactacaacagtctcgaccaaccctggcgaaccgaaccaacaaaccctccgctaccacaaccggtggctgtgatgagtacacagactagcgcgaacaggccgtagcgacaactccgagcagacacattcaactaaccgcgtcaacgcaggctaacagttaagcggaagaacactctccaccgacccagggcacgcaagagagcccacccacgcccaagcatcgcatgaaacgaaacaggcggcgacacccagagcccatggcagaccaatcaaccgatccacaagcgctccaccacccacacaaccaacatgagctacaccgacgcacgcaacctaggcccccaacagagcgcacggaggagacacgccacctagggtacaacaacggaccgtagccaccacggacactcggcaaacgcaccacgctaccgtagcaccaactaaagcgccaacactacactaccaccacacgagcaaccccgacacaaccccgcgccaagcacaccccgaagcgacgggccgcgtacaacgcaatacagtcgctcacaccacatacaccgacgcgccaacccaaccaccgccgggcgccaaccaacaccaagacaaggagacagaaacggtcgcatagcaacctaaccaagagccggccacaccagcaccccgcagccgctgcctcaacatccccccacacaacacaggggagcacacgacgcagacccagcgacgcaaactgcgagacacag

SEQ ID NO: 629793 - DNA, 1033 bp, Homo sapiens
  misc_feature (126)..(126): n is a, c, g, or t
  misc_feature (195)..(195): n is a, c, g, or t
ggctggagtcgccgatcccgccggaggcgccagtgacaatggtggacccgggacgacgagttcgactacctacttcagaagtggtgctcatcggcggtactcaggcgtggcgctaagagcaacctngcttgtctgcgcttcgacccgcaacgagttcaagcctggtgacgagctaagatgcatccatcgtgcgtngcgaagttctgccacccagtagtcatccagtggggacagtgcgagaccatcaaggcgcatgatcttgggacaccgacttggccaggaatgccgctatcctgcgctcatcaagcctaccggcgttacgtacgcgtgagttgcacgatggagacgacccatggcattggtggtaacgggaccaattcgcgcaaggcaaccttgagcactagtggagcaaaccgtgtgcttggcgctagagcttgacatggacgtctgtccgtgcgcaccagcggaccatgatcgaggccatatcagtcggttcaatcccattggcgttgaggtgcgcggccaaacctaggaggaaagttgagccgtagccagtcgctacccttggcgggcgacattgtggcgccgaccttgaacggaggggcccccgggcggccctttcgggccacaaataggaggaacaccacatcgttttaggtcgcctttctatgcggacgaccagctcatggcccttatgtggagtttccccaccggtagacccggtgaggaaagggaaaccgcacactttcagcaagacacccaggtctctttcaacaaggtaaggtaattccttaacctggacaaatgctgtttgtctccaccggagggaaaaacaccaagtaagtccgccaatcgaacctccgggccgggtcgttagcccgccccagaccgaatcgtgagaggttccccccccggtgggggggaaccacacacagttgggtggtggggaaagcactttccaagggcgagattggccccaggggccccatgcccatgcagggacaacggggcagccaagagaaaaagccccccg

SEQ ID NO: 629794 - DNA, 160 bp, Homo sapiens
cccattgagtgttgagttggtcgtacggaatcggggtatgctgttcgaattcataagaacagggaggtcagaagtagggtcttggtgccaaaatatgttgtgtagagttcaggcgagagtgcgtcatatgttgttcctaggaagattgtagcggtgaggg

SEQ ID NO: 629795 - DNA, 675 bp, Homo sapiens
ctctggtggaagacaagccaggtcatgacccccaacataggccctgttggaactcctaacgacctaactccttgcacttggagtagactgcctatcggttacgctgatcatagtactgctgctaaccgacctgttaggcatatacgaatgatgatgcactgagccaggatatgagtaatgcgatgatgactagacaacagctgtttacgaaggcccttgtggtatcatactaactatttgccatgaacaagttattgacgcaggagattccaggcccgaatatgagtccagcataggctataccgcgtaactagcgctacgctggaacccagcaggtgtcaccttgatgaataccctgggctcatcaacacgtctgacatgcttagatcgttgcataatgcgcttcaagaacccgtgctggctaataccgagaacggaccaaccgtcaccacagaatcgacgcactgtttattgccatttacagggtgacgatggtagcttgagacatgcctcagagtaacttcagttttggtacaagctatatcgacgggcatttgctactcaacatttttttgaggacagaggcctatgatgcacttcaaggcaagtatggaacaagtcttcctgcattatctgagttggccggccatttaagttgtgattgacttccccccg

SEQ ID NO: 629796 - DNA, 417 bp, Homo sapiens
gcggtacagctgaagattcagactaaagtcctatgtagaatgtttcctttaaagagaaataaggtcgggcatggtggctcacacctgtaatcccagcaccttgtggaggctgaggtgggctaggatcacttgagaccaagagttcaagaccagcctgtggccttgaaaaaccccatctttactaaaattacaaaaattagctggggtggtggtacatgcctgtaatcctttatactcgggaggcttaggtgtgagaattgtctgaacccgggagacggaggttgacgtgagctgagatcgcaccactgtactctagcctggatgacagagtgagatcctgtctttcaaaaaaaaattgctggtcataattcactgaattgattcatggctcacaaaatgggtcgtgacccacgggta

SEQ ID NO: 629797 - DNA, 100 bp, Homo sapiens
ttgggtatgtcgaccggccgtcgcggagctcagcggcgacggtcatggtgtcaccatggacgccttcgacgtccacgagttcgaccaggtacctgcccct

SEQ ID NO: 629798 - DNA, 162 bp, Homo sapiens
tagaagggtggtcatccccatgagggcttggggtggcatgggacgctggcggcatggacagtgtcaagccaagagctacttgcccgaaggtacggggagccaggactgacccgggtggacatggcagagcctgagacgcccttctcttgaccccttcgactg

SEQ ID NO: 629799 - DNA, 1283 bp, Homo sapiens
ctcgttgtttgtgtgaggagcgaatgaatagaagatgggttgtcgtttgaagagagaaagtggtcgccgccgatggcccgtgtgggtgacaaaaataactgagttgggtagagcctctgttggttgtgtgtttagaggaggcccggttagattctggcgtcgcacaggtatgaagaaccagatggagggttgttggggggggctaatcttcgtcccacgggttaatgcgaagaggacgtgtgtggtgatgttttccttttgttaggagcgaggttggcaagaccccctttttgggtgctaaaaatggtgggcgctttgtggacgagcgatatgtttcttgtggggacagaagtaccctcccagggaattggggatttatgagtggttcccctgtagatgtgttggttcgggtgctgagcggaaggtttttgtcggttagttggtgcaagccggtgttgaccaacggctgaatgcgtgcttttaaaataggggcgagtgttttagaatgtcttgtttgtagataagacccagtttataccttagtgatctcgagggtagcaagattttggggttgacaaaaggacaaaattttgtaaagtcgcactcgtcaaagtgtaatctctggctataatagtgtaatatataggatatggagactctgtgatgtgttagtttctgaagaagttttatccacatttgggttccacgatatatgtgaaacgccacccacttgtcgccccttctgagttaagtaaaatgcgtaattcttataataggagaatagtgtaaaatttctataatgtgttcttattgtgttctataagggccacaattttcgtgggcgctttctggggttgtttcttctaacaccgtgttcacagataatttattcgccttatataattgggtggtataaataattgtggatagataacaccacggttttccccttgttcttcttaaatgtttgtgaaaatataagcttaccacaatagagtatcttaaaaccacgggcttaaatgggtaaagccacaacacgctgtgtaatcaccacaacctagatgcacgagggaggttcttgccagcactcccaaattctctgtgtgtcccctcttgacacactcacctgtttcccccacgagctaactatcctgacgtatggtaattctccctctgtccttttaagaattattttaccagttatgtgtataacaatatggtttacattttgctcacttttgacttatataaaaactagaataatactaaagaaaaaaaaaaaa

SEQ ID NO: 629800 - DNA, 106 bp, Homo sapiens
ccccgatggcgcgtcctatggacacggagctgccgtgcccgtagtagagatgacaggccaggctccgtctatgatgggacgcatctcctacgctgctgctggtggt

SEQ ID NO: 629801 - DNA, 387 bp, Homo sapiens
  misc_feature (256)..(256): n is a, c, g, or t
gcggctgaagatggagaaggagaaggagggcttcccagatcacgtcgctgagcggagatcaacaccatcctacaaggcccagtcatcccaacatcgtcaccgattacgagagattgtcggtgggcatgcaacataggacaacgatctagcatcgtgatgaagctatgtggatgcacgaacctcaagagcctagatggagaccatgcaaacagccacttcctgaccagggtgacggtgaagaccctgcatgatccangctgctgcgtggggatgaaacacctagcacgaacaactgagatcctagcaccgatgaacctcaacgaacgtccagacctagctggctgagaccacgaccggtcatccctcaagtgtgcggtgactatcgag

SEQ ID NO: 629802 - DNA, 354 bp, Homo sapiens
gtacagtagatagagactaggacatcatatcaccacagagaggaaattatggccagaggcagcaagatgtctatggtagactactagtgccaggagcaagactaacgccagagagacaagactgaacagttatcggtgttaactatcggagaagccaggacaacagcttagcaggttaatggtaaggctgaagagtaagaacaggtgaggtcaaaggacggaaccctgggaaacaatatctgctgtgtgtgtatccggaggacggggcaaacggcacaggagacagactataaaaagaaccagtagcttaattaaatggagggagaggtatgtatcaataataaacaacaagag

SEQ ID NO: 629803 - DNA, 891 bp, Homo sapiens
cggtcccccttttaacaggagggtttctcaccttttcgcggtgtcccggaaaaaaattccccccggatttttttgcgccacttattccgcccccggggggccccacatatttggttacctctctcccttgcgccaaacccagggtatcttaccttctcgccccgcagtgagtttgctggcccccccctcctggcgggtccctacgacgtgatacctctttggggttagcggagttaccttggaactcactctctcttatatttcgcccctctgcgcggatatatatatatttcacgctcgccaagtcgaggaatgtttctccgccgttgacgtccgccgccccgctccctccgagcagagatccggcgcgcccttcagagaaaaaggcgccccatagggtggccgtctgcgcacgaacctactagggagacggcgctttcttccggaggattctgaccccagcagagcacccttcccaccgcccgggccgacccatcggttctacaagacagacgcacaccagagagggcggcgccgcaggcaccctcgcgcccgcccccaacatggtcgttctcgcgccttacatccagtgagaaggcagtcctccacccagagaggtttcgagcggaggcaccacaggggaacagacccacccgcggagagagtccccgagataacccggccgatggtttgtcgaccccactcacagtgaattcccccccaccaccctttccaccaccgcggcaggatgacccaccacggaagacatcgtccccgaagcgctccctccccgaacagaaacaaccccaaggcggcggcatgagaccccccgaaaatgatcaccccccgggacagccccggatcggcggataaaaaaacccccaaaaaaca

SEQ ID NO: 629804 - DNA, 761 bp, Homo sapiens
tttccaaaacgtatatgggagaaatatggggcttggatgtgaggacagcatcaattaatgagggatcctctcccttggatcaaaacaccttccaccaagaaccaactttaacgctgagcattacctctcaaaggtgagatttgggcaggggactaatatcccaactggtatccacatctgaccagggggttcacaacccagaatatataagggagctataacaattctatatgaacataccaatgggcaacagggcatatgaaaagggactccacatcattgatccattagagaaatggcaatcaaaactacagtaagatatcatctcaacccaggttaaaatggcttctctccaaaagacagattataacaaatggtgaagaggatgtggagaaaagggaaacctcgtggcactggggaaatggtattagtacaaccactatggacaacaatttggaggtacctcaaaaactaaaaatagagctatcatacaatcccacaattccactggtagttatataacccaaagaccggcaatcagtatattggagatatatctggcccgggtttcctggagaccaatcccaatagcccagattgggaagcacttaagggctaacagcgatgaaggctcagtcatatgggtcttaaaccaggggtttaatcggctgaagtgaccggcctggcgcctttatggcctagacctagggaaagcggcagagacgactcctgttggagttgtgggcgcgacattagggagg

SEQ ID NO: 629805 - DNA, 476 bp, Homo sapiens
atctatatcgacaggctgctttgaactcccgacctgaagtgatccacccactccagcctgggtgacagagagagactctgtctcataggaaaaaaaaaaatcagtgctgctcccgtggtgcacagctggtggttggtcatcccaaacctgacaaccagggaaaagagaagagaagctcagaggagccagataaaggaggaacccaccttcggggtcgggtaggcctggacccggatcaggggcttgacggactgcagggtgtggctgaggggaagagaggaggacgatgtgatgtagcggagaccactctgcagcaggggccacagacggtcgtctcgagggctgactgcttttgcgggcccatttggtttggcccgtgccgggttctttaaaactgggaactgaatgtcttaatatggagaactcactctttccttccccaaagaggtcaccatccccgtattctatcctgatct

SEQ ID NO: 629806 - DNA, 147 bp, Homo sapiens
atccccgtcaaaaagtagaaaagatgaaaagcaggcctggacgccgttgttcacgccatgtcatcccagctactttgggcaggctcgcaggccggcggatcacgtaggtcaggagatcgagacctctcctggcttaacacggttgta

SEQ ID NO: 629807 - DNA, 176 bp, Homo sapiens
ctcatgagcctaaactattccagactagcccctactcccccaattatgagggtactggcccccaatcaggcatcaccccgtataaatccctctagaagtcccactcctaaacacatccgtattactcgcatcaggattatcagtcacctgagctcaccatagtctaaatgcaatca

SEQ ID NO: 629808 - DNA, 339 bp, Homo sapiens
agcaattatccttaacctttgtggcaccagtgaccagtttcatggaagaccatttttccacgtacctgagatggggtcggggaggggtttcatgattattcaagtgcattatatttgtcactagattctcataaagagcatgcagcccagatcccttacatgcgtagttcacaatagggttcatgcccctatgaaaatctaatgctgctgctgacctggcaggaggtgaagttcagctttgctcacttgccagctgcttacctcctgctgtgctgcccagttcctaacaaaccacagagcagtaccagtctgtggcataggggctggggaccactgtac

SEQ ID NO: 629809 - DNA, 271 bp, Homo sapiens
agactcggacagcagatggccggagaagatcacgctctctgcatagcacagtggaactggggattctccacggcatacttaaacagcattcccctctcgggctccctggcgtgcaccatgctctcttctcatagcagtccacagctactggcgactggactccagtaccccctaactccttctggcgcctctgaagccttgcacagagcctgtggtggctgccagtgccagacctgcaggcgattctgtcaataaagacagtatgaatgcg

SEQ ID NO: 629810 - DNA, 251 bp, Homo sapiens
gtgctttcggttgcaatccagcaccttgggaggcgagacagataatcatgaggtcaggagttcgagaccagcctgaccaacatggaagaaccccgtctccaccaaaaacacaaaattagctgggcgcggtggcatgtgtctgcaatcccagccactcaggaggctgaggcaggagaaccgcctgaactggagaggcagaggctgcggtgaaccgagatcacgcgtttcccttcagtcctaggggtcaatat

SEQ ID NO: 629811 - DNA, 204 bp, Homo sapiens
ctgtctctatccagcaaagtgggcttctgaaagacgcgcaggaattgctttggcgagtgcctgataatcgaatgccgtcgcggcaccggtcgtatacatcttccgcagcgtcctcgagctgcaggcacagttcaagcaaggcattgtggtgtgtttccagcctaatgatgtcggatgcatgaagaggggagccagctgtcatgt

SEQ ID NO: 629812 - DNA, 690 bp, Homo sapiens
  misc_feature (2)..(2): n is a, c, g, or t
  misc_feature (157)..(157): n is a, c, g, or t
  misc_feature (181)..(181): n is a, c, g, or t
  misc_feature (196)..(196): n is a, c, g, or t
  misc_feature (292)..(292): n is a, c, g, or t
  misc_feature (294)..(294): n is a, c, g, or t
  misc_feature (351)..(351): n is a, c, g, or t
  misc_feature (366)..(366): n is a, c, g, or t
  misc_feature (377)..(377): n is a, c, g, or t
  misc_feature (383)..(383): n is a, c, g, or t
  misc_feature (388)..(388): n is a, c, g, or t
  misc_feature (395)..(395): n is a, c, g, or t
  misc_feature (397)..(397): n is a, c, g, or t
  misc_feature (401)..(401): n is a, c, g, or t
  misc_feature (403)..(403): n is a, c, g, or t
  misc_feature (406)..(406): n is a, c, g, or t
  misc_feature (411)..(414): n is a, c, g, or t
  misc_feature (416)..(416): n is a, c, g, or t
  misc_feature (420)..(420): n is a, c, g, or t
  misc_feature (432)..(432): n is a, c, g, or t
  misc_feature (439)..(439): n is a, c, g, or t
  misc_feature (444)..(444): n is a, c, g, or t
  misc_feature (446)..(446): n is a, c, g, or t
  misc_feature (454)..(454): n is a, c, g, or t
  misc_feature (461)..(461): n is a, c, g, or t
  misc_feature (465)..(465): n is a, c, g, or t
  misc_feature (487)..(487): n is a, c, g, or t
  misc_feature (490)..(490): n is a, c, g, or t
  misc_feature (532)..(532): n is a, c, g, or t
  misc_feature (535)..(535): n is a, c, g, or t
  misc_feature (539)..(539): n is a, c, g, or t
  misc_feature (595)..(595): n is a, c, g, or t
  misc_feature (677)..(677): n is a, c, g, or t
anattcatattactatccatataagaacaaatacatttagtcaactatataaggataacacaaaaggtttttgtttgttttaggcttctcagttgaaagaaaacatcgagtaaagaaaatgaatttccagtaattaagtattaacaatataaataanaaaaattacttctaaatgtcttanattttgacaactttnaattatacttacatactaatatttccaaaaatcatttaagtaacaagggtaactgtaagggtgaaaatatattttgaaaagctttttaaagatatntnattattatgctttaacatcatttcatttattcttggcacatacggcatcttggaaantaaaaatacatcttnccaattttctnctattnttcanttacaananaaananaanttttnnnnanaaanaacttttttcanttactanctttntncaaaattnttttgangctngttaattacctttttgtgcttngantaagaataaattaaataatgcatattttaaatgtacagcatnggnactnaataaatgatatactttaccttatttattcacatttatgtaatatcaaaatatcanagtgctatgttgttgtacaatttgaaaaactgaaaaaatttggaaattaaaaaataataatgtgttttgaaaaattgcactntttataaataaat

SEQ ID NO: 629813 - DNA, 107 bp, Homo sapiens
cagagtccacaacagtcccagctcataccatatatcctgaacatacaaaattaatgttttgcttttaatatgaatgttttattcaccttaatttctacatgtctata

SEQ ID NO: 629814 - DNA, 216 bp, Homo sapiens
cattcaagtcatggggtacgtcctgtggcccagataatgagctgcagacggacgggaatgtgcaatgtggagacacgcgagccttatggtcccaggacctggcaggacatgaaatggagtttcttaagagggtgaaacaagattgcatggaccaattcgtcccgtatcgtccaagcgcaggataaacaatatcccaagcatgcgtggatggagccc

SEQ ID NO: 629815 - DNA, 575 bp, Homo sapiens
gctcattcacacagtcttgtagactaagtctatatgtctctgtatctctacaactatcacgtgtcgagcacatggcaggtgctcagtaaaaaattctaaatgggctgggtgtggtggctcatgcctgtaattcccagcaattttgggagtcttgagggtggggtggatccaggagggtccaagaaggtagagaaccatcctgggctaaacaaagttgagacacctttctcccactaaaaaataacaaaataattagccgggtggtggttggtgcggcgccctgccagttcccagcccactacgggacggctgagggccaggagcaatggcaagggagggcggagctatgcagtgcagctgaagatggtgccactgccactaccagcctaaggcaaacaacagcgagacctctgttctcaaaacaacaaattgtgaaggcttctctgatttttttcccaacagttgttctgaatctttagccatgcccagtaatttttacataccttctaataatggtagtacaaccataaacttaatgatcttaaccatatttaagtgtacaatagtgtcaatat

SEQ ID NO: 629816 - DNA, 276 bp, Homo sapiens
catctcaaaaaaaaaaaaatttacaacctacggagaagctaattaaggatttgtaggtcctcaataatttacaaaaacttagaaaaattacctctaattaggtcttaagggggctttggttacggagggacttaaatttggtaaggtcattaattggactgtcatcagacaatgcctgtcctgctctgattctggagtcctctaagggtgtatgcgcctatctccatttcccccgaggttttggagcaacagagtgctggtataaagagctgggca

SEQ ID NO: 629817 - DNA, 183 bp, Homo sapiens
taattacctgtcgctcctattgttgcagttgggtaataagccgaccttttggccatcgtccttgcgtaagattggagggcgttgggtttttgaaaaatcaagtgccacaaagcacaatgctgagcatgatgctggggataaagggagctctcaatgaacgttgagtatgactggacagtgaag

SEQ ID NO: 629818 - DNA, 879 bp, Homo sapiens
gcctttcggccggtaatcgccatctttccagtaattcgccataatgacgatcacagagggaaagaggggaggcactccgatgtatgtcctctatggcctctattactatacatagctgtggcacgtggttccttcgtgcctactatatatgccgaaatcttttaagcataagggtgactatagtatcacatcataggtgaaatggtgtacgtgttctcatagggatgcctccctacaagggtcatcatgtgcaaatacatggtaacagtctacaatgttaccctacgcatgcggtacgagtattagatggtaaagctagacaatagttgcatgggcatatgatgtcgtggcctagagaattaatgtgcagtctggagcactttatggactcggggagccgaaataccgtcgtgaatgcgttgtgaggggaacatgattgcacgtaataagagcacaatgcaaacgtcctctgagatccggtgtctgggttcaaactataacggctccatgcccttagctctcatgccaagagaagctgactttgtgagaagcaatgggaagggagcctgagtctggatggtacttctatggccctatgtaatgccctgggattccggggtgtgaattcttctttctctgggctttgtgccttttacgggtggggcttagatcaccagtgtggggtcggggctcccagggactttgaccttgagtcccagtgggaagcgggcctaggacttgtagtcctggtacattcttgctcatggagtctctgtgcccacgacgggggtgccttcactccaaatctctggttcgctatctttttgcccgatagggtgcgtccttgggtccacccggtcgggctatatgcccgcgggg

SEQ ID NO: 629819 - DNA, 132 bp, Homo sapiens
atagcggtccaactgcccaaatacgatcgatccgcgcaataaagtttgatcctctgttgtcctcaaccgctcccatttactcccggactcgatcacagtagaacatccaaactcgattttcgcggcgccacc

SEQ ID NO: 629820 - DNA, 672 bp, Homo sapiens
ctagaggatcccgacagaagatcacctcatcaaaagaaagctgtaaatatgaaagaacaaaggttatttcctggagaaaagacaatttattcaacatatagatgacagattaaagcactgttaatgaaaaattatgaaattgatgactacactatggttatataagaaaatattctttgacatacacactgaaatatcctgggggtaaagggctacaatgtatataatttatcctcacatgattaaaacaaaattttgtgtgtgtctgggtgtacacatgcaagtgtgtgtgtgtgtgtgtgtgtgtgtgacagagagagagtgagagagagagaaagactgagcatgcaaaagtataagaaagagtgagcatataagtgcatatgcaaatggagaaatggaataaaatgtgttaacaataggtgaatctgggtaaagagtgttgagatgttctttgtattatttatatgtgtgtaactttgtgtgtatttgaaattatttccaaaaaaagttaaaaaaacaaaaacaaacacaaaatctttgttctacgtaattgtggttctcccaagaaataagcactgttatttccacatttgcgtatatacatttctgtattctctgaaaagagaataatgagcacatattatttttaaatacagaaaacagagaaag

SEQ ID NO: 629821 - DNA, 210 bp, Homo sapiens
  misc_feature (35)..(35): n is a, c, g, or t
  misc_feature (56)..(57): n is a, c, g, or t
  misc_feature (91)..(91): n is a, c, g, or t
atctagaggatcgcctgggtgatgatgtgtgttgncgcatcatagaacattctatnnagagctaatcaagagggagaaaaatgttagtatntattcaggaaagaaaaattatatgtattagattattggttttcttctcatctttacatttttaactataaatacttttatgttttgctttaaaatgtgatgcttcaaattaacacatat

SEQ ID NO: 629822 - DNA, 259 bp, Homo sapiens
gaactagtctcggtttttagtttgttagctgcctgggagtgttattttaagaaagcaggagcaccatcatttgacacacttctttatagatacacacacactttaaccctggactttttttgtctctcacattttttcaaagagggggtgtaaggtcaagatgtaagggcccatttttctttttctcggggaggtgctcggcggggtttttatttaagggctctttcaaatgaaaaaccccccaaaggaggaaaagggg

SEQ ID NO: 629823 - DNA, 167 bp, Homo sapiens
cattatctaccaggacttcggaatcatctcccatatgtcacttactactccggacaaaaaagaaccatttggataccataggtatggtctgagcatatgatatcaattggcattcctacgggtttactcgtgtgagcacacccatatctttaccagtagatatcgca

SEQ ID NO: 629824 - DNA, 109 bp, Homo sapiens
ttcctgtaatcggagaagacctgaaacctcaccttgcacagtcacagggagcaagatgaagctactaaacttatacataaagagggccagaccaccaacagcacatgct

SEQ ID NO: 629825 - DNA, 146 bp, Homo sapiens
gtgttctcgcggctcttcgtgcgcaggctagagccgtctcggctagctttttgtccccaagctggtccccagggtcgcttccatggttgtcctccgcattccaggttcagccatgcaggcaggtcttgctgtgctcagtgcagtcc

SEQ ID NO: 629826 - DNA, 871 bp, Homo sapiens
tgcgcggtgccgcgcgggcgggaagcgaagaggctgggcgtgccagcgaggagcgctggagtaagaaaaggcgcgagcggtcaggagggctcaggccgagacaccttgcaatgccggcgtctgtcatcgaggcctgcgcgtgtgctcactgatcctgcctccaggccaccgccatgtcgagccgcggtgcgtgaagaagatagtccaccaagacgtccaggtctgccaaagcaggagtcatctttcccgtggggcggatgctgcggtacatcaagaaaggccaccccaagtacaggattggcagttgggggcacccgttgtacatggccgccgtcctggaatacctgacagcggagattctggagctggctggcaatgcagcgagagacaacagagaagggaccgggtcacaccccggacatcctgcttggcttgtggccaatgatgaagagctgaatcagctggctaaaaggagtcagcatagccagtgggggtgttgttacccaaaatacacccgagttgctagcgaagaagcggggatccaaggaaagttggaagccatcatcaaacgaccccagcaaaaaaggcagtctccatcccagaagaaagcctgtatctaaaaaaagcaggaggcaagaaagggggccggaaatccaaagaagcaggggtgaaggtcagtaagggcggcaagcgcgacaggaaacgagggcaaacttgcgagggttacagtccttttcacgaagagctttcttggcagaagttgacctaattcggggaaacaggaataagcggttgaggaggaggaaaataatctacatgtgatttgataagttaccagaaacgggaaaagggggagagtgggatgctgacg

SEQ ID NO: 629827 - DNA, 364 bp, Homo sapiens
tctataacagatgcagatgtagtacaggtagtacccccatcacctggcctaactaagagagaagggccagtagatgaggccacttggctggctgataacatagggcacaacatgacaaagctacaaaaagctaaccaaagtctaggtaagcttagcactcataaataagatcagtaaaacggtattctattcattatggaagtgatacagacaaacaacagaaaggtgcaatttgcaatagatggctacagtgtcagaatgaataacactctcaagaaaggatggcaagacagattgctgttccgcacatctctgctcctgataaacgtatatatcagtttacagcagcttctcccaaagatgc

SEQ ID NO: 629828 - DNA, 340 bp, Homo sapiens
  misc_feature (134)..(134): n is a, c, g, or t
  misc_feature (166)..(166): n is a, c, g, or t
  misc_feature (215)..(215): n is a, c, g, or t
  misc_feature (231)..(231): n is a, c, g, or t
  misc_feature (241)..(241): n is a, c, g, or t
  misc_feature (246)..(247): n is a, c, g, or t
  misc_feature (251)..(252): n is a, c, g, or t
  misc_feature (257)..(259): n is a, c, g, or t
  misc_feature (266)..(266): n is a, c, g, or t
  misc_feature (275)..(275): n is a, c, g, or t
  misc_feature (280)..(280): n is a, c, g, or t
  misc_feature (302)..(303): n is a, c, g, or t
  misc_feature (314)..(314): n is a, c, g, or t
  misc_feature (323)..(323): n is a, c, g, or t
aacaaccccggacaagacgctggaggaccgattctttgagcacgaggtaaagctgaacaagttggccttcctgaaccagttccactttggtgtcttctatgccttcgtgaagctcaaggagcaggagtgtcgcnacatcgtgtggatcgctgaatgtatcgcccancgccaccgcgccaaaatcgacaactacatccctatttctagcgtcctgncccaaggctctcaatngcactctttntgtgnngtgnntgtgnnngcgcgtntgtgtgcgngtgtntgatgtggtcttacaagcctgnngctcacctgcntgtccgggnttgttggaccaggctcg

SEQ ID NO: 629829 - DNA, 1122 bp, Homo sapiens
  misc_feature (161)..(161): n is a, c, g, or t
  misc_feature (580)..(580): n is a, c, g, or t
  misc_feature (602)..(602): n is a, c, g, or t
atggcggcttcgcgagagagcgggacttcaggctagcggaggcagcaccgaggaaacagtttatgaccttgcgtacagtgaggtgaagacaaatagagaagagagactcggttctaacttcgacaaaatcacgattgacagaggactgacctcgtcctggnatccgtcttacttcaatttgaacctcatttgaggttcgttgcaggataggatctctgaagttactaggagtgaaggaatatagataaaagatggtttcgtggaggtatatacagatctaggtgtcatgcatgatagaagaatacaaggatgatgcctgactaggagctacatacaatgagctgttgagaagcctgctggcacaaacgactctacagaggtctgcatacgtggagtcaggtagcacaaagaccgaggagccctggcattgtagatctcagggcacggtaaagatgcaatactctgtgacactactacgtgttgcacaggcagacgagaaaataagtaagttagacaggaaggcagaggcataatgcttaccaagtagtagcaggcatggcatgcatccgtggatcgtgtngcaaaaacaagcgtgtaatatngtaatagacaccatgaaaactcgtattgcaagcagttggtagcattataagagggaagagagaggagaaagtcgataagagaatgcattgagacagtgagaacggacgaagtggacagaaataagatccggaacgtcgtcgaagacaaacaggcaaagcgtgcaacagcaaaagtggggcaggacacaacttttggcgcgacaagacgcagactgggccgtgatgcgacccggcttgggcgacagccatcgcagagcgcaatgtaggaaaggcggaaccacaacagcagcagacacatcgggggacacctttcacggggacacaaccgggagaagggaaaacacctggtgggccaacagtggagatgtgacagcgccaacagtgtgtacagggcgcaccacgagcacattttcggcccgggaattaatgccgcacgccgacatgctagacggacgacacatctatatgctcccacgaaatcacgcccacgcagaagagaagcacagtatgagagatgcta

SEQ ID NO: 629830 - DNA, 176 bp, Homo sapiens
actcatagaggatccccatcaggcgaatacttcgcgtgtacgtggtccaggatatcagtgtgaagaatgagtaggaagggaagaggatacggagagtacggatgctgggatgagggaagcacttctggtaagactgaattcgggattttttataagagagggcatgagagtaatcg

SEQ ID NO: 629831 - DNA, 321 bp, Homo sapiens
  misc_feature (321)..(321): n is a, c, g, or t
gaggaaacagcctcctcactatctctacatggcaagggtagttatcgcttatcatattccaaatatgatacttaccaactattttcgtcatattcttcacagaaggaagatcgtgatgttgtgctcacaacaactcttgtggatgatatacaagctatgccaactacctatgatgagcgagaatattatgcctctctggcctatggaactcactacagtagctctgtgtctctaggaggactctatgaactaatatatgtatcggatacagctatcatgatgcggataggtgttgctactagacatacagagtgccttgcn

SEQ ID NO: 629832 - DNA, 1333 bp, Homo sapiens
  misc_feature (797)..(797): n is a, c, g, or t
atgtagcaacatttctttattccagtagctactgaagaacacattggttgctggtaagtgttggtgtattattctgttctcatgctgctaataaagacatacccaagactgggtaatttataaagggaaagaaaaaagagttttcttacacaattttaacattttaatattaaaatgaaataccattttttttttaatcccaactttagcagatcagtgaaggaacaaagaaacctactttgtttcctttccctcttatttcaatataatttatcaagaattgcctttcctaagaatacttaaaatttggactctttaagaggagaataggtaaactaaattagtgacagataatgtgtgttgacagagatcttttttaaactttgagtcatcctgtcatgaaacctaatccttttcagctatattttatttgcctactgactctatgtcaggaataactggagaacatgcatgcatgcaccacaagaatcttcagtatcgtcatagaaacactatccatcatgaaagccttagagaaaggtcttaatattgggcattctagtataactgttctgatcaacagcacatgtaaagcacaagtcatgtcgatcgcctcttacaatagatctacgccgcgagccctctccagcatgaatttctcggaagtccacaggaacaccgccaacctaggctttggacttcacctgtccctcctcaggtttccctactttacgacggttccccccgtcaaccttgctgacacccctgtcttcggtctctcctttcaatacgatctnactcgccatacacctctcgcgccgcttcccacacctatcgatgctctacagcctctcctgactactctcccatctcctcctcacctacttgcacccttgctttactccctctctcgtccctctatccccctctcttctacctctctccttctcttccacctctcgcccgcatcttgttccccgcttctttcactccgctctcttcgtactctctatcttcactccccttccttcttcttcatctgacctatatgcccacatgagccaccctctctctctagaccttcttctgtcgcctctcatactccatcctcttctgctcactatccctcttcaccctctccctctcttcgacactcatcaccccgtctgcctctgtacttcactccatgtccctcacgctcccactcttctcttctctgtttctctcttactctctcttctcgcatcgtctcctctcctacgcctctcctcatcttctcgactgctctacttcgttactcacgcctatctctctcaccctcttctcctccccc

SEQ ID NO: 629833 - DNA, 709 bp, Homo sapiens
  misc_feature (469)..(469): n is a, c, g, or t
cctcctgccagcctctctgttgttgttgtcctcttttgggtgcgtctccgctctcgtggttctctcctcctcgttcctctgcgtggccccctcccattgtgttgtctcccctcttgatgctgtgttttttctcagagggggccctccttctaacgggcgcccccctcttttgttctccacagtacatttccctcgtggaatccctgcagttatggagcccacgggtgggccttggccctctatggggtagccacacacgccctgggtccaatttttcacatgggacgcacagccccttgtttaagccacgctggcaaagtaatggataagaccacaacatggtgtgagtgaaatttttttatggggctcgaacaatcccctcgttaactcacagggccaatacacagaatggttcctaaccccagacttaggggtctaggcgagcgtagcgtacactactcttgtcccnagatgctgacccggtagccatccttcccaggatacatagcccctgggagattgtggccccacaccaccattttctgacattgctgtttgaaaaaacaacctggactagttaccagctgagtattttggcttttctcacagggccaagaataccaggccttctgctgaggtcactccccctttttacatgtctgcttaaggggaccacaaataaaggtattcgtatttttaaagattaata

SEQ ID NO: 629834 - DNA, 291 bp, Homo sapiens
taaaaaaaattaaaccccttttaaaaaaaaaaagaacacaggagattccagtctccttgagttagcataatacagaagtcccctctcctttaacttttccaaaaaaagtaccctgacctaatctgatgttaaccaaggtatttatttctggggttctgtttccttgttccaatttgacaaaaccccctgttcttgtattgtattgcccagggggagctatccctgtacttgtagaggggggctgctttaattcataaatcccaaataaaagccaattagctttattcctta

SEQ ID NO: 629835 - DNA, 103 bp, Homo sapiens
atgaggtctacacatgggctcttctctgtctacctcagcgccgataccagagtggcagcgtggtgatctttggtggcattgactcttcttactacactggaag

SEQ ID NO: 629836 - DNA, 245 bp, Homo sapiens
  misc_feature (93)..(93): n is a, c, g, or t
atctggggtgatacaggacagggagcatcattcctgcctgggaatctggaagacttcctgcaggagtcagcgttcaatcttcaccttgaagantggaaggatgttctttttacgtaccaattcttttgtctttcgatattaaagaagaagtacatgttcattgtagagaatttggaaactgtagaagagaatcaagaagaaaaataaaaatcagctgttgtaatcaccaccagaatcaccaccag

SEQ ID NO: 629837 - DNA, 196 bp, Homo sapiens
  misc_feature (70)..(70): n is a, c, g, or t
ctgcgctggtccttcccctttgtctgttttgtttatttttgtctttttttacgacgactgacggtcttgnctcggtaccgctggaccggactggactgactccacgttccctacccgtcctgacgctcccgaccgtacctgggacttcccctacgtgacgcccggggactcctctacgacgtcgaccctgcacggc

SEQ ID NO: 629838 - DNA, 300 bp, Homo sapiens
  misc_feature (3)..(5): n is a, c, g, or t
  misc_feature (27)..(27): n is a, c, g, or t
  misc_feature (49)..(49): n is a, c, g, or t
  misc_feature (52)..(52): n is a, c, g, or t
  misc_feature (62)..(62): n is a, c, g, or t
  misc_feature (70)..(70): n is a, c, g, or t
  misc_feature (77)..(77): n is a, c, g, or t
  misc_feature (79)..(79): n is a, c, g, or t
  misc_feature (81)..(81): n is a, c, g, or t
  misc_feature (96)..(96): n is a, c, g, or t
  misc_feature (152)..(152): n is a, c, g, or t
  misc_feature (176)..(176): n is a, c, g, or t
  misc_feature (182)..(182): n is a, c, g, or t
  misc_feature (186)..(186): n is a, c, g, or t
  misc_feature (225)..(227): n is a, c, g, or t
  misc_feature (230)..(230): n is a, c, g, or t
  misc_feature (233)..(233): n is a, c, g, or t
  misc_feature (259)..(259): n is a, c, g, or t
  misc_feature (286)..(286): n is a, c, g, or t
  misc_feature (290)..(290): n is a, c, g, or t
tcnnngggtgacacccatggcttctanaaccactgttgtgctgataacnccnaaaatccatntccacaanctgagtncncnttttgtggtgccagncctgtatattcaactgtctagtggacattccatcattgagaggcacatagcatatngaaaagtggttaacagtaaggatnctcatnaggnatggtgctcacgcctgtaatcccagcaccgtgggtggtnnntgnctnaggcaggcagatcactggagcccaantttgagaccagctgggcaacattgtcnagcnccgtctctac

SEQ ID NO: 629839 - DNA, 182 bp, Homo sapiens
gcggccgcctactactactactgctcgaattcaagcttctaacggtacggggacatgcttgtaatcccatctactcaggagaatctcttgaacccgggaggcagaggttgcagtgagccaagattgcgccattgcactccagtctgggtaacaagagcaaaactacatctcaaagaaaaaaa

SEQ ID NO: 629840 - DNA, 311 bp, Homo sapiens
cgacaccccaatatcttacatctcaatgtcccatcctagggaagcactcatactttatgcatccccgcagctacacacggacaacacacagcacacgcatgaacacagcacacacacgagcacagcacacacacgagcatacagcacacacacaaacgcacagcacacacagaacacagatgagcacacagcacacacacggggcgcacagcacacacacgcacacacatccacacacagcacacaaacgcacggaacacacaagcacacacatgcacacacagcacacacgcaaacgcacagcacacaca

SEQ ID NO: 629841 - DNA, 492 bp, Homo sapiens
gtggtgtggtgggcgcctgcaatcccagctacttgggaggccgaggcaggagaattgcttgaatctggaagacagaggttgcagtgaggtgagaccatgccattgcactccagcctgggcaacagaatgagatgctgtctcaaaaaaaaaaaaattgccattctacagtgtatatatagtgtacatatttcaaaacatcatgttgtataccgtaaatgtctacaattttttgtttttacttgtcactctaaggacagtggctgaggattaccctttcccacttattggacaatcactgactaaaattttaggtcctagtgcacctgtattaaactttagagctatgctgtccggtatagccactagccacatgtgactattgagattcagtttaaattaaatttgcttagttacactgccacatttcaagtgctcaatcgctaaatgtgactagcgactgccataccagacagtgacgtcctatgcaaggat

SEQ ID NO: 629842 - DNA, 808 bp, Homo sapiens
  misc_feature (142)..(142): n is a, c, g, or t
  misc_feature (350)..(350): n is a, c, g, or t
  misc_feature (563)..(563): n is a, c, g, or t
  misc_feature (581)..(581): n is a, c, g, or t
caccccactctcctttagtaaatgttgagaaaatgcctttgttgtcatgctccaaatcccacactataatggccctattcacttctaagggcccaatttttcctttctcagtggttattatgttaacatcagaaaaggatgnccgtgcttgaggaggaagaatgggttcaagatcatcatattcatcagaaggggacactaaatagaacccttaacctgttgacttgccaaaattgagaatcagagatgtgtaaaatgcagcaaattaattataatgtaagttaagatttgctttttgccaagttgcaaagttgtatccacatcaggtcactgtaaaaatgtattatctngtaaaacttatgtaaaaaaaaaaaaaaaaaaaagggcaaagatccttaaaaaattttaagtcttcccgacttttatttttctccttacaagtgtgttttagaaaatgtgcttctctgtgggaattggcataattatttattctgtggctccttgtgggaaaccggttattgtgaaaaacacgtggcttaggtggatatttaacagctttttangcaaaccttccctcacangcgcggattgagaggattaaaaataccaactaattttgggtacccctattaggtgcctagaagcagtcccaaggtgctaaataaattattttacctgatttaaaacccaaactatagctactcgggaggctggaggaggactcgtttgagcccaggattttggaggccattctgggcaatatagcaagaaccctgttgtccgaaaaaaaaaaacaaacaacaacagg

SEQ ID NO: 629843 - DNA, 244 bp, Homo sapiens
gcgtcccagcaaggaaggtaccggctctactgccacctcttccagctccaccgccggcggacaggggaaaggcaaaggcaaaggcggctcgggagattcagccgttaagcaagttcagatagatggccttttggtattaaagataatcaaacattatcaagaggagggacaaggaacttaggttgttcagggggtcttttggtctgtttagagatcgcttaattaccactcttcttcctcagca

SEQ ID NO: 629844 - DNA, 519 bp, Homo sapiens
tgattccagggtgaagcacttgagtatgatggataagcttttcaatgtgctgctggattcagtttgccagaattttattaaggagtttaccttgatgtcatcaggatatgaactgaagttttctttttttgttgagtctctgccaagtttcggtattaggatgatgctggccttacaaaatgagtaagggagacatcccttttcttcaattgtttggaatagtttcagaaggaatggtaccatctcctctttatacctctggtaaaattcagctgtagatctgtctggttctgggctttttttttttttttttcaatgggcgggctatttatcagggcctcaattccaaaactggtaatgggtctttccagcgattaagcttcttcggggttaagtctgggaagggtgtaggtgtccatgaatttactccattaatttttaatttcctagtacattggcatagaggtgtaatagtatcctcggatagtggtcggcatccggggcagggatatcccctta

SEQ ID NO: 629845 - DNA, 871 bp, Homo sapiens
agcgggtgtgcgtcgacgtcagcgtgctgacgtcacgggccggaggtccggggctgctgggtgcgggcggtgggctgcgcgtgtcgctggactgggtcccggtcacgccccgacaagccccgccctcagccgtgggcgcgaccgggatccacgcagttcccgggcagctgggcggcggcaggaaacacccgttaaggtgtattcgtctttacggatggtgaggttggaaagaaggcatcctgtatagccgtcctccaggatgaaggaaactgccagaagacatggagaacagctctcaccagggagccagagctcccatgcttctctgtgcgaatatccattccatcaatcccacagaactcatgggcaggattgagtcctatgaaggaagggacaaagaaaggcgtatctgatgtcaggaggacatttactgtggtgtgttgtcagctttgagcgtcttattcgtaagcattactgtggataatagagttaaatgtgaatggaggcacttgagaacacattagagaaggaggtgatgcagtatgactacatatacttcatatttgagtatatttcttctggcagggtttcgatttaaagtgttaatacttgcatatgcctgtgtgcagactgcgccattgggggggcaaatagcgttgacaccggcagtgaccagatgctttttactagcaaaagtgatcctttcgaagctttttctctcacaggggcattagggataatgtgctggcccatccatttcatttaattccttggcctggattgagaacgtggatccctggatttccaaagtggtacctccagaagcagaaaagaaaaagaaacctggaaggtcaggatgctttcgaaaggc

SEQ ID NO: 629846 - DNA, 428 bp, Homo sapiens
  misc_feature (74)..(74): n is a, c, g, or t
gagattttctgcagaaattgagttccagcctctctcgaacctgggaagacctggcaggaggggctgttttcggngcccaagctttcaccccccccgtaggatctgagcgccatccatcttgacacggcagtgctgttggtttcctgagtgtacgcaggtcctcccaggttcggtgtgctccgagcgcgcttggcctaatgccctggcctgtgaagtggggactcctgggccctgtgagcccctagaaggcaggcccaggaatgttcgggtaggacagggaactcctttgccccgggtctgagttttgcctaggtgaaaccccctaggacacagatgggtccctcctcctcaggagtgcatgccagtcccccgttgcaggacagggtgatcatgcccataaataacccttcccgtgtctaaaaaaaaaa

SEQ ID NO: 629847 - DNA, 736 bp, Homo sapiens
  misc_feature (14)..(14): n is a, c, g, or t
cctggtacggtcgnctaggcgtgttacgtggagggaacggattactcttactttgttctaagacgccataggaagagtcttccttgtccgtggctgtaactatataagaactattgtgtcacataaaccaacaagaatgaacctttgctgcttcagataagtttgattattccagacaaggaaattaataagtaactgattctatcaggcgatagaaacaactgagaagaacttaagtgcaactgtttcttcactagcaaaagccaatcccttcatttctgtttcattgctccaaaacccagtttttcaactaatggtttactcattaaactaacatgtctacgaaaagttgtatagagtaagactatatttctttatacatagtcctcctgataccagtataagactatttagtaacagtgcattatgtatggtactatctaaaagtaagttagataagatgtaagagaatcgggtagctgccggaacaaacattaggtattattcctaaattagggtaacaggggaaattgaccaccaacaatcatattaaagcaaatagcatgtactattaagccttattcagaggggtcacagggcgttaaaaggaaaactggatggcaatcctaagggacctagcttagaccccagggaaaaatgcgatatattaagcataccataatgtcccctaacaagttcacaaaaatatgtacaatggatacataaggaaccacag

SEQ ID NO: 629848 - DNA, 883 bp, Homo sapiens
gggtctctctcatagaggggagctgcagctgagaacgtggcgagggcccttcctccaaggtccctagactggctccccgggtgaacctgaggtggcatggttcaggttatcaagatggtgaggtctcgcatgtctgctggacagtgacattaggctctcagaactcatgggtgtggagctgggcctgtccctgggccagttgagccctgctgtgtggccgtgagattaggcggtgctgtgaggcctggttatgcactggcaggatgtgaccttgatttggatccagactcatgtaatccatataaccactgtgaggtctggagagatggagaaagagactagggagggggacccgaacatccattcaagcaccgacgatactgccaccgtaagcttgatcgccattataacccattgaatggacctgtggccagacatgaacttcggccactgaacatgaaggacatcccacttagcaagggacaacgacaccttggaggatagctgaagcttctggagcccgatcgtcattcatatttcacccattcttgcgattgggcgaaacaggctgtggcgcattttatccacatcagaagcaacccattggcttccacaccacgggacccacgaagaagggaacatccccgaaactgatatgaatggaagggccatcaacgaatatcggacacccaaagaccggattgtgtcccctttgggggcgaaaacccggcaaaaacggcaaagcgccatggcaataaagaccatcgtgtgaattgcctagtcacaaggggcacaagatgaacgcagcaccaagagagccaaaaaacagaaaacgtcgcacacacgcaggaaaacaaggagcacaaacggaagaaagcagaaa

SEQ ID NO: 629849 - DNA, 344 bp, Homo sapiens
cgagtaatgcgaatgtgtttagaagtggaacttatagggtattaaccggggtaatgcctgttggggccatgtgccctcataattggggggtagggtctagcctgaagtggtaaaaggctcagaaaaatcttgcgtgaacagttggtgtgtggtgcccttggtatgtgctttctcgtgttacatggcgccatcattggtatatggttagtgtgttggttagtaggcatagtatgagagagcgttatgaagtgaaagtgatatcacatggatagcccggaggtcattaggaggtctgagagggcccctgttaggggtcatggtctgggtttcactatatgatagcc

SEQ ID NO: 629850 - DNA, 208 bp, Homo sapiens
ctagaggatcctgatatgtgttcactggcatttttttgaatggattggtgacattttttacatggatatgttaaattttatatatgggttaaagtatattaaagttaattttacctggttcttttactttttcttttttttcaaaaaaagtaagggcaggtggagcagctcagtcctgtagtcccagcactctgcggggccaagggga

SEQ ID NO: 629851 - DNA, 216 bp, Homo sapiens
gaccgcagtctgtgacaatgcctgccactgagaccaaaaaggtcagccatgtggctgatacaagaggtcaatacgaagaggctcgaggagactgagggctgcaccctcgtcaggccccagacagatgaaccgtgagccgtgcgagtgcagcgtgcccagatctcagagagaatcacggatactccggcccaagtgtcaaacgccaacgaacagccc

SEQ ID NO: 629852 - DNA, 206 bp, Homo sapiens
gctcgacattttcttttattctcttgtagttcctaatcctttaaaatgagtagtgaatttaggtaaaccttcatagttaaattagaaataattgtatgtacatgattaccctgaaaacatttgggagtaaaataaaatgtattagagaagcactaaaagattacggaagaccttttcttttttcttttgttcctcccccgtcgacg

SEQ ID NO: 629853 - DNA, 302 bp, Homo sapiens
  misc_feature (184)..(184): n is a, c, g, or t
atccccgctgcgtacgcgacggcgccaggggatggcagacagtgccatgcacggagtttaggcacacgatgtggccattctgcagctccagcatacagttgctacgaaagccttgagtggtccacgaactggacccaggggtgttgattgtcgttgggacttgagagagggcatcatcatcacntgtccattaacgctcttcccatgtgaccactggtgcgccttgttcacctacggatggtgtatgtcaccctaccttctcccgggacggcctctgggcgctctggtacacctccttcccg

SEQ ID NO: 629854 - DNA, 705 bp, Homo sapiens
catgagtgcctgcgcaatgtcggtgcgctgtaggaggataccagggcgtcttcccgcggattgtgcagcggttccttggtgaccgcgtgctgtccactgctaggtcgcatccccagtacttgactcgtcatcatatctcagctgcgacacgatctatcccaagacctattatgactcactcacaactcgtagaccaaggctggattgactgttgcaatcgcttgaacgaactcttgagacacccatttcataacagaaacagaatcgtacaatacatttactacaggggttgacaatatgtgagtctctcaccttctgctgaaactgcattctctcgaacatcagagaaacagctagactatacgtacctaacattttttcggcacgcaacaaaaacagcattgtaagactcgttatcatttcgtaaccgtagccctttgacgtatgtaccctaatgtacaactgtataagtggcaactacaccgctttaagggtaacgttgcttggctccatgaagccccgagttggccacacagctttattcctgttcaggcaccagcattgaaccgtactatggttggccaggtctttgattaagggaatcttgattgaaatcttttcaccccccaaactaccctacaaatccttactgcatcatctaatagcatgtggtgaattgtcttgtacagcctaaccgggaccaaa

SEQ ID NO: 629855 - DNA, 813 bp, Homo sapiens
tccccggaattctgccattatagcccggggtagcccatatttttccacgaagtaggggcgggccgatatcatccccatcacacatactagatctgtacactatctgacataaatctatccaccctaaaaaccttactaaactcctcctacatctaaaagctcagcctattataatgacagtcccaggaatctaggtacttaccaatcgccctcttacgtattaactggagggggcgataagaaactacgatggtccgacatcactcgagagctattatgcatggtatcattctgtcaaacttaccctaaattactttactacaagtatgactcaccctcaatatagtctaccgtcatgatcgcatactgggatctattagttctctttgcctaatgaatcttctaccacgtcctttcatgtgaagaatatcaatagctaccctttaccaactgtaaacttatataagaaatatttaaaaatttacatacccaaccaagtcccagattagaaaagataaataatacgcaaaatacaattacaatactttaagctattgataacctaatatgtcctaatactatattctctaaattttttgttttactcagtactacaagttatactgtaatcttctatatagcacaatagcgttgatctctacttctcagtatggttctacttagtaatataataaatcacaccttcaagaaagatgaactattagatattaagatacagagatatattgattatgattctccagccaacaatactgcactacttatctttttgcctcgccatcatccttcaag

SEQ ID NO: 629856 - DNA, 716 bp, Homo sapiens
tatcatgcagctgcatgtcagaagagccagaaaggcggggtcctcagaaaatggagcttctttaaacaactcttttaactcctgatcagacatgactgcgagggcgagtaagaagcaaggacacaaaacgaagaaagaaagccagggtacacgaaacagatcagacacacgaggaaagacgacacacagcagacaaagaaacaaaaaaaaaaaaaaacacaaacaacagcaaacagcgaaaaagaacgagacacaaaaaagaaaaaacaaaaaccaaaagaaaaaaacacaaaagaaagaagaaaagacaaaacagaaaaaaaaagcaaaaacaaaaaaaaagaggaaaaagaccacagcaagaaagagcaagagacgaaagaaaagaggaaaacaaactaagaaagaaaaagaacacaaaagagagggacacaacagaataacaagacaacacaacaaagaacacaagaagaacagaagacaaagaaaacaagaacaacacaaaaagaacaagagacaaccacaagaacagaaagaaaaaacaagaaaagcacgaacacaacacacaaagaaaaaagacacgcagaagagaagacgaacgaacaaaaacaataaacacgaacacgacaagcagacagaaatagacacacaacacacgacagagagacacaaaaagagaacagaacgcaacaagcacgaacaacaaagaaagagat

SEQ ID NO: 629857 - DNA, 360 bp, Homo sapiens
tgagatggagtttcactcttgttgcccaggttggagtgcagtggcacgatctcggctcacccaccgcaacctccacctcccaggttcaagtgattctcctgcctcagcctcccaagtgactgggattgcaggcatgcaccaccacgcccggctaatgttatatttttagtagagacagggtttcaccctgttggccaggctggtctcaaagtcctgacctcaagtgatccacctgcttcggcctctcaaagtgctggaattacaggcatgagtcacagtgcccagccgcaaagtatatttttgtaaaatttcatcaagataaatctggctaaaccaataaactaataataacaaaacttg

SEQ ID NO: 629858 - DNA, 196 bp, Homo sapiens
gttgacgtccactggggctctcaaatttagtcttcaaaacaaaaatattgcatttttcccccagttcattcttcattttagtaagaacaaccttactctcctgtcaattgatcatgtcgaaatgtctttcctttttttcagtcacctgattaagtcctgcggtcaacttgtcgatatacgcccgagatccgtcgcg

SEQ ID NO: 629859 - DNA, 249 bp, Homo sapiens
  misc_feature (136)..(136): n is a, c, g, or t
  misc_feature (146)..(146): n is a, c, g, or t
  misc_feature (165)..(165): n is a, c, g, or t
  misc_feature (215)..(215): n is a, c, g, or t
ggcacgagaatttattctaggttgcccagttttgtggcatatggttgctcacattagtctcttgtaatctttttcatttctgtggcatctgttgtactgtcacctatttaatttatgattttagtatttgagattnctcttttttncttaatatagctgtgagtnttaaaatttttattgatctttaaaaaaaacaaactcattgtttttttccnttttttttctgggtcttattctgcttatctctgc

SEQ ID NO: 629860 - DNA, 315 bp, Homo sapiens
agaatatgcctgcgccatctcagtacccaacttcaggtatatagaactcctacgtgaaggacaaaacatacaaactgcttagtggctaggacatagatggctacacacctataaatactcttaagtactgaccacctctccccatactactcacctaaacgactccaaaacattacagacctggtctgactgaatcactgggacggagaccagatgacactagtagtagcagtacactgagagctggtagtaaactactcaggaatcaggccggacgcgggctattataaactactggtggcttgcagtcagccc

SEQ ID NO: 629861 - DNA, 342 bp, Homo sapiens
ggttcgacccgacataaacataaaaatgtaacaccagccaagccttcactacgccccattgttttcttttcatcagaagcgcgtgggtttccacacaccctatcccagcggcccttttatgctttatcatataaagcacagaaacgaagttatatatcaaggccccaacaaatgttattccactcaaatttctatacagtgtcacattgaaagggccggtgataacgggagcgattttcacacccacactatcaagaccgctcatcacaggacctataaaaaaatccaacaccttagtcagggacggaaaatagaccccacaaaccgcataaaaagtcgacg

SEQ ID NO: 629862 - DNA, 1108 bp, Homo sapiens
  misc_feature (405)..(405): n is a, c, g, or t
gctaagacccgtgtgcagacagcggcggcggcggtagatggcggtggcggtcggcggcagtcgggctcaggagtgcagactggttgggctcgacgagcgcagcggaccgggcgtcgacgttcacgtgctgttcgacgcgagttgggaatcggaacgctcgtcttaagagatggcagtatcgacttgggactgtcgtagcacgaggaggatgcgagggagccttcagcgcagcgcttgcccgagatgctagtagctccagtcgattcactgtacaggagatgcgctttcgtggctgcgtgcaacagtgcgcggccagtgtgagagagtcgctccgagactgatcataccattcgcaacagactggtcaaaagctgcggtctcatcgactcatagggttgccagtcnttggattcgcgttacttagagccatcttgtactgtggacatgaacactactgcaagggatactcgtgtcgcgcggtacaatcctcaattaactatggggcattggtcctcctagattgataccatacatatgtggaatcggaccttaaccataggctgattaggccatccagagggatgcgcgtacgcatatttcacctgcgtctcagtgcactacgccgtggtgcagcgttaccgtaggagcgaccattgtgatctccctctgaagaggcagtacgctgtgtgcgaaaggtagacttggacgccacgacacgtgaccggactcgtgcgcacgacacgacgaattccttgaatcaaacgggtggctaggtctagcccaattgaccagcgacggcaggccacgcatggtatggcaaatacaaagtggccaatgtgacaaaaacttaaactgggacttccgccatgagatctgggcagcggtaggtatgggcgagcaagttgaatctcgtctagaaagccctgacaggaaaggacacacgcattctcccggaaggccatggggccctgggactactggagcccgtggtcccgtaaaggcatgggaacttccgtaccttaccaacaaattttaatgtctggacggcttttcactttttgggattatacacccaagacacacctcacatactgttcgggggagccac

SEQ ID NO: 629863 - DNA, 557 bp, Homo sapiens
gcaggcggcaagatggcagtgcaagattatccaagaagaggaagtatgtcagcgtagagtggcatctttcaatagactgagactgaatgagattctcatttagctctgctgatgctggctgaagatgagcttatgtcgtggaagatggaggtgtggaggttaacacacaaggcaggagacatgaaagtcaattatcattagctcgacgcagaaggacagaagtgtacttgagtgatgatagggcctgggggtgattgtcggggaatgtggatgatgatagttcataaagaggtattggcttgcctagagggaaatgtccgtagcatgactctataattgcgttccatagcaacgtggtgccaagtaggacgagtccttgtcgatgcctcatgtggcccacaaaggctatgaagtcctctagacagtcttagcgaataacttctctaatgggtagcgggtcttatggcctcgtccgtcgggggccgaggggccttaggcaataaaagggctcggtgactggacggagatcgctagtcctagtggccgagaaaggattg

SEQ ID NO: 629864 - DNA, 359 bp, Homo sapiens
gcacgaggagaattccagtttctccacatcctcatcaacagttgttattgtctgtcttttttattatattcatctgtaatgtgaagtgtttatctcattgtggttttgatttacatttccctgatggttgatgattttcaacatcttttcatatacttattagtcattatgtatcttctttggagaatgtctgttcagatcctttacctactttataattggtttatctttttaatattgaactgtaatagtttttaaaaaatatatcctaaatacaagtctcttatcagataatatgatttgcagatattttctgtcattctatgtactgtcttttcacattcttgatgatagacttt

SEQ ID NO: 629865 - DNA, 483 bp, Homo sapiens
  misc_feature (215)..(215): n is a, c, g, or t
agcacctttgggaggctgagttgggaagaaattaattagcttgaggccagggagttcaagatcatcctgggcagcaaagtcatacactcttgagggaagagagagaccttctcatattgttttatattgttttatactcagtacctgttttaagaaaaaaacaaggaagtgaaatcaaagacaggcagcccggcaccaggcctgaaaccagcccntggcctgcctggcctaaacctagtagttaaaaatcaacttacgacttagaacctgatgttatccgtagattccaagcattgtataaaaaaattgtgaaactccctgttgtgttctgtaccagtgcatgaaacccctgtcacatatcccctagattgctcaatcaatcacgaccctttcatgtgaaatctttagtgttgtgagcccttaaaagggacagaaattgtgcacttgaggagctcagattttaaggctgtagcttgccgatgc

SEQ ID NO: 629866 - DNA, 233 bp, Homo sapiens
gtcctacagacatcgtgttactcgcatccggagtatcactcaccttacgctcaccatagtctaatagaaaacaacgcgaaagcagatatattcacgcactggttattacaattttactgggtctctattttaccctcctacaagcctcagagtacttcgagtctcccttcaccattaccgacggcttctacaggtttcgtcggtcagggtaccgacggctctgaattcgtaat

SEQ ID NO: 629867 - DNA, 420 bp, Homo sapiens
  misc_feature (130)..(130): n is a, c, g, or t
  misc_feature (160)..(160): n is a, c, g, or t
  misc_feature (186)..(186): n is a, c, g, or t
  misc_feature (196)..(196): n is a, c, g, or t
  misc_feature (213)..(213): n is a, c, g, or t
  misc_feature (230)..(230): n is a, c, g, or t
  misc_feature (237)..(237): n is a, c, g, or t
  misc_feature (309)..(309): n is a, c, g, or t
  misc_feature (320)..(320): n is a, c, g, or t
  misc_feature (350)..(350): n is a, c, g, or t
  misc_feature (352)..(352): n is a, c, g, or t
  misc_feature (355)..(355): n is a, c, g, or t
  misc_feature (382)..(382): n is a, c, g, or t
  misc_feature (407)..(407): n is a, c, g, or t
aaccgaagatcagccctcggggacctcgccggggacaactcccttggccttgggccatttcgaacttcggggatctcaccttttcctcaggttggggggctccctccgggaaccggggaaatcaaccttnccgtaacaaaagaatggttttttttttccngttttggcctcctcagtgccctcccnctttggtacntgatcttcggggccccngctagcttgaattctantggggtngaatggttttgaagaagaaaaaacctgctttttgactgattttcccttgaaggaaaaaagaacctttttttntgcatcatttnccaatctttccccccaagcatttttttttngnacnttttattttttcataaaattgctaatnccaaagcttttttttaaaagaaatnattttttaattta

SEQ ID NO: 629868 - DNA, 640 bp, Homo sapiens
gattcggagctgcaggatccgtccgagatggcagaggtggaggaaacactcaagaggcttcagagccagaaaggagtgcagggcatcatcgtggtgaacacagaaggcattcccatcaagagcacaatggacaatcccaccactacacagtatgccaacctcatgcacaacttcatcttgaaggcgcggagcactgtgcgtgagattgacccccaaaacgacctaaccttccttcgaattcgctccaagaaaaatgaaattatggtggcaccagataaagactatttcctgattgtgatccagaatccaactgaataagccactgtctgggcttcctgtgtcattccttaatttaatgtcccccaagaataatagtgctaatcatgtcagtgggcacgtggtggccacctgagcctgtgtagaccatgccattgatcaagggtcgctctgcccaccccacaaggagtgcctctgatccagtcagcccctggggaatcagttcgcccttgcaggctttggaatgagagcttatgataagcccacacccagctcttcaaactttcagttcaccttgtccacccctttggaaaaagcctgttttatgtttttttaaaggttaaaaaaattactttcaaccccc

SEQ ID NO: 629869 - DNA, 277 bp, Homo sapiens
ttttgggccccccccccccccccccaaaaaaaaaatttaaatccccctgggccggtttttatttttggcaaacccgggcccaaagggctggggggggctttttttccccctctccccaaaaacccccctttttttgggaaatttttggggggggaaggaatagggccttttttttctccccaaaagtttatttttaccccccaaatttttgtaccaaaaaacccttgattttttttttttttttttggggaaaaaaacccctttgggggggttccca

SEQ ID NO: 629870 - DNA, 146 bp, Homo sapiens
  misc_feature (23)..(23): n is a, c, g, or t
ggacctggcccacgccaattggnatcctgcctatccagccccctccgccgccagcaacaatagcaacagcctgaatgtcaataacggggttccggcgggcggccgcgcactcctcagccaccgtcgcagctgcctccgccaccacc

SEQ ID NO: 629871 - DNA, 766 bp, Homo sapiens
tggtcgcgctttgcctccgtccttccccctactcccgtcttacctgacttcctttacggaggaagatccttgaagcagccggacgttgggacaaaggatttggataaacccagggctaaagtcgacgtgtatcctacctttaagacttagcctacaatcatgttcactcgcatggtcagttcccgatacccgccctaaccacactatttatagtcaatcaacctcaattgagaagatcaatgaagggatgagtctagacaaaatgtccctgtactgccatcttctcccaggtattggcgcaagatcctggatatcctggtatcactggagcctgaagattatgggccattgtctttgtcatcttcaaggaggtctagcagcgccacgcaatgactcctgtcgctaccattgcagggttctcccgtttctatgacacaatcctatgcgtaatccagtatgccatgatacgacctcacgatatcattgccaatgatgtagaggcaccttcgtgtgagcgggaccggcatgcgggagaagagtgaagcccaacgaagccatggagatccccggtgcactcaaaggaactgcttgtgcacagggcgtgcgggaatgtcacccccccgtggttgggggcatcgtccagggtgcctgttcacggggtcattgccgcctgatgtcctcagtgcgcccgtctattatgtcccgacatggccgggacatgtcgccgcttaatttccttgcctgcttttctacgccgaccatgctt

SEQ ID NO: 629872 - DNA, 80 bp, Homo sapiens
gccgtgtattactgtgcgaagtatcggactgcccgcagctcgtcctactactttgactactggggccaaggaaccctggt

SEQ ID NO: 629873 - DNA, 674 bp, Homo sapiens
accagcggtggtggctaagcagagactgtatgtagcggcgacagcgactgatggcagcgatggctggggcggggccagcccctgggactcccgggtgcaggaggacccgtggtcccagtggtcctggctgctggcatcccgtggcaaagagcagtgctgatggagacgcttgagagggaaagtgtgaggcgtgagattgtgcccctgttttgagtcacgagaatgttctggtgtggctccagtacctgggaatcccaagctgcatgtgcgcttgcggttgcccacatgtcccacactggtcccgcacatgtagatagcgatgacagggtcccagtcggctcctgtgatcctgcccgatcttatcgcgaccagacagcgataccagcaggtccagtcggactctggaggcccgagcgatgctgctgcagcgcacagtagttcctcccattggtgtggtggccctccttttgtaggccctgttggctttgggcctggtgatctggagtcacctggaacaggccagaggctcgagaagcatgttcctgcggcgggcagctgtggccccccagagggcccctatctgcgtcagccttcgtcccccacgtgctacagagagcagattccgctctctcctctgcagccgccgggcctcgccggatgctcttcggacccaa

SEQ ID NO: 629874 - DNA, 348 bp, Homo sapiens
agctgtgctatccgaggaaatcattggtcactaatgtggtgtttatggcgtggagtgacatgccaccgggaaatggctcatgttcatctgaggatgctgtcctctgatttagctgctgcctccagccgtctggcttgagaacttagcgtaaaggcagcttcgttcctgttaaaccccgtgtacactctccataaatttggtgattctctgctaggcctaagattttgagttaacttctcttgaagccaaactccaccttctgtgctttttgcttgggataatggagtttttctttagaaacagcgccaagaatgacaagaaattaaaaaaaaaagaaagaaaacaaaa

SEQ ID NO: 629875 - DNA, 129 bp, Homo sapiens
gatgattcagaaaaaaatgtagtgtgttccatttataattaaggcatatggcatcatcataacgataggaagccacaatgttcttggcccatcatgcacatttgtctatgcattaactgtgagctattg

SEQ ID NO: 629876 - DNA, 728 bp, Homo sapiens
agcggagtaaaaataggttctgaaacatgttgctatgccagagtgcaagaatgcttaaaagtgatgaagtggccgggcctgtaatcccagcactttgggaggccgaggcaggcggatcacgagatcaggagttcaagaccagcctggccaacatggtgaaaccctgtctgtactaaaaatacaaaaattagctgagtgtggtggtgtgcgcctgtaatcccagctactggggaggctgaggcaggagaatggcttgaacctaggaggcagaggttgcagtgacccgagatcatgccactgcactccagcctgggtgacaagcaagactccgtctcaaaaaaaaaaaaaaaaagtgatgaggttatgttaaaagggatacagtaggcaacttgaaagggactcccacgggctaaatcagagaaaacgtgtcaaaaaaaaaccagtattagtaacgggataggggtccattgaatagggaatttacgagttcatactggatataattttaaaaagcaaaagatgccgggtgcggtggctcatgcctgtaatcccagcacttggggaggccaaggccggtggatcacctaaggtggggagtttggaggccagtttgaccaacatggagaaaccccatctctactaaaaatccaaaattagccaggcgtgggtggcacatgcctgtaatcccagctactcagggaggctgaagcaggagaatcacttgaaca

SEQ ID NO: 629877 - DNA, 1670 bp, Homo sapiens
  misc_feature (443)..(443): n is a, c, g, or t
ggtgccctgagccctgtgctgggccctttaagtgtgcctgtgggtgctggtgtagctgtgtgccctgccccctccccgcggctgccctgcatgtcctgttaatgtgctgatgcccctggctgcatgtggtgcctgtgatcttggcctgtgtggtgcctgtgctgtgctgtgtgtgtggatgctggctgctgtcagtgtacaccagtcaccaatggtgtgcccaggcaatgcattggtctgctgcaggccgcccgtgcactatgtgtccacactgcagagcatgcaggtgttgtgatgtgtgcctgtgcgtctgggcggatgctccttgacaattgcctgtgcatgccacgctgcctgacctgaacctctgcaagtccaccactgctgtgagcgcaagccctttttgctgcatgccctgcctgtgtgagctccattgtggcccnccttggtctgatggtccatgggggccaatgtgcctttggttgttacagacttctgttgttgagatttgtgcctgggctgtgggcccgccacttcacagctgatcacacacaagtaccgtttctggaggtgtggaccccaggtgaggaaacccttagcgagcatggttgtggccccaactggatgtgcatggacatttgttcacagccatatttgtttggtcgctgagaggccacttggtgaccatcgccaaagtggttgccaaacaaggcaaatggccttgggaatagtggtttggtgcccccgagggccatggtggttggattgtgggcgtgggtgccccaaattgtgtccctttgattgcacaggtagcctggtctgtgtcatgcatgtggaacagcctcccaaagatcccccctggaggcttttgacagcgaaaaccattttcttgtttggccccccagtttatggagcccttaagagactggaaagtcggcgttgggggctgccagcgcaagggtttccacttgtgggcctgcacgaaattccaaccaagggcgttgggttatccgctatagtttgggggctttgactttggtgacagagggggtgacaggccataggcttaaccaatcggtggatcacggacaccgttggttccgccctaagtggcacgcaactgaacaatggcagtttgtgggactggctcgctttggcaccgaagtcccacacgttgtccggccttttggttttggggagttggccccgaggccagacacccttagagaagtttggccagggcagcatttttggtgacctttcttggcgaccacgttgttatcttttcccctttttggaccactgggattagtccccaaaaccactgcggtttggcccgatttgggcccaaatggttgccctgacgccccgtgtgctttaaagcataaaagggacgattggctcacctttgtggcgccatgtggagaccaaggagccacatgaccccctttgtgggtatgggatgagagaggacgagccaacggggtacgcacgcagtgcggaggactgcgtctcactcatggagatgcgaaagcacggaagcactgacacacgcaagcgagcgctaccctatgtcatacgctgcggtctaagcgtaacgtctggctagttcgactacgtctgacgcgaaggaagtgacatgcagcgcatgccatgtcggcatgcacgcg

SEQ ID NO: 629878 - DNA, 260 bp, Homo sapiens
cttaggtacaagagaagtacaaaaggccagaaactcaaagctgagggttagcgtaacaaacctacagactgaacagtacgaccctctctcaggtacctttacgtaccccacggcccagtgtgcacatacccccaggcaggagacgggagggcacttctctggtgaagcagtgcagccccatgtgcaggcaagggacggcgtgtcactttcattcagcatcggggtgtcacctagcaaaatagccaggacctcaccaaatc

SEQ ID NO: 629879 - DNA, 147 bp, Homo sapiens
  misc_feature (6)..(6): n is a, c, g, or t
gtgcantggcttctaagtgttcaaggggaatggaagaatcatatgtctctactgaaatcaaaagctagaaatgattaagcttagtgaggaaggcatgtcaaaagtcaagacaagctgaaagctaggcctcgtaagccaaatagccaa

SEQ ID NO: 629880 - DNA, 307 bp, Homo sapiens
tggatattaggcattgagagttttataatttatatttcttttaatattgttgggctttgttttaggacacagtgaagttacttggaatcagtttgtttcttttgaagctaatttttaagcttttatagggcatgttcagaacctttctactaaggcaatgtccttctagattctacttgattcctcttacatgtggagatctttctactctgactgattgaaatgtagaatcttcccaatcctattttcaattccaaggattgttgtacttattccttttctttcttgtagttctttcctcagcttc

SEQ ID NO: 629881 - DNA, 138 bp, Homo sapiens
ctggggcggtctagaggatcccaacaagtcagttcttctacgctaggatcggaagtcatccggggtggccgccagatggaattccttggatatcatggcgtggaggtcgccggcatgcctgaagaactgactgggtgg

SEQ ID NO: 629882 - DNA, 300 bp, Homo sapiens
tgttgaaactacgagttttcgcgtgtccgaaaaatcccggattcggcattacgcccgggagacgttttgccaaagtctcgggtttcctggtaaacagggcttggacggaacccggggttcgttccccaccccggccggccgcccatagccagccctccgtcacgtcttcacccgcacccctcgggactgcccccaagggcccccgcccgccgctcaaagcgccgcgcagccaccgccgccgcccgccgcctctcttaagtcgccgccatgacgaccgcgtccacctcgcaggtgcgccag

SEQ ID NO: 629883 - DNA, 1009 bp, Homo sapiens
ttggggtagcgcgtgttgagacttgggtctgacaagggatgcggggtgcgcggtctggagagtttctccggggtgttgtgttgtccacgcacgcgggtcggtggacggggtcggtgttgttgtccccttgtattattggggtctgtgtctccctcctcgttgggtggttgcgcgcccgttgagtgtcgtcgtgttggttctgatgtggttgttgttaggtcccgtgttgtggcgttgtttgttggtagatccgttgccgccgccacgtctggtgtgtattgttgttcgagctgggtttttcctggccggtccgggtggagttttgaggcgcgccctcgtgtgggttagtgtctgttggctcgccgcgatccgtcgttgttgtgtgttttgtgttgggcgcctttggcgcttactgctcttgctcctttttgttttattatagccgcaggcggggggtgttatcggtgtgctccttccctcgctctaccgttccctatgacttgtggggccgccgccaccggggttgtgtatgctccttccgggttgataggccgcctctttggtgggcggcggcgagctttttttttcaatgcttctcaacatgtttgttttgcccccgttctttttgtttgttgatgccgagcggcggctcgctctgcgcatccttttgtgtgtggcgactcgcgggggtggtgtcttcgtgcgcttgagcgccccccctgctgttgttgtatgttgctctcccctcggcgtcttgtcgttgtcgtactgtggggggtccccccccattggtgttgttaacgcagatggctgtttctcccgggtggtgtgtacaccgaccagcgtttcctgcggacaccgcccccggggggtggtataccggtcgctcgccgctttttagtattttggggggcccccccccttttttccccttttttgttttcccccaaatttttttataagggcccttttttccttttccccccccttttccccttttgggccccca

SEQ ID NO: 629884 - DNA, 156 bp, Homo sapiens
atgacagtagaacatacaaaacccacccgattcctccccacactcatcgcccttaccaggctactcctagcctactccccatatctaacaacgtaaaaataaaatgacagtgtgaagcatacaaaaaccaccccattcctccccacaatcatcgcc

SEQ ID NO: 629885 - DNA, 301 bp, Homo sapiens
acacaacataccaaaccctatggatacaacaaaagcagcactaagaggaaaatttacagcaataagcacctacatcaaaaaagtagaaaaacttcaaataatctaatgatgcatcttaaaaaactagaaaagcaaaagcaaaacccaaaatcagtagaagacataaagatcagagcagaagtaaataaaattgacattaaaaaatacagatcaatgaaacaaaaatttgtcttcctgaaagacaaacaatgttgataaatttaggccaacttaggaaaaaaagagaggagacactaataaa

SEQ ID NO: 629886 - DNA, 400 bp, Homo sapiens
tacttgtatctccacttagaggtatttgtaatctccccaaccttaagaaggttctttgtaattctccccacgcttgagaatgtacttatgtgagatccacccctgccgtgcaaaacatggctcttcacgcctcctatcccaaacctgtgtgaactagtgatcctccaccagcctttgctgactctcttttcggactcagcccgcctgcacccaggtgaaataaagagccatgttgctcacaacaaaggccctgtttggtggtctcttcacacgggaacgcgcattaaacaacacgattgcactttcaagggcttggggggaaagagctagaattcccatctcaaaaaaatataaaatacccaggagtcaccctcccccgagagggcctctgaaccaaccc

SEQ ID NO: 629887 - DNA, 479 bp, Homo sapiens
ttcctttgtcttactgtgactacaggaacctcatgtttgaccctactaattctccaacctcctcttcttgtattgccccctttttgttcactctgctctaaaaacactggtctgttttctcttctgcaaacttatcaagttcattcacacctgagaacatttgtactgcttttttctctgcctggaatgctctctgcttagcctctttgcatggctgtccccttttcatcattcaggtttaaagtcctcagaaaggcctactctcactactccaattctgcgttcctcttctccaaggcatacttgaaatactctgttttattttaagcctaatacttatcattctctgaaattttcttatgtgtataaacaggtttgtagtctgtcttcccctccaatatgttcatagctatatacccagcaactggaatagtgcctggcacataggaaagccaccatagatgagacaaagggaaaca

SEQ ID NO: 629888 - DNA, 163 bp, Homo sapiens
ctgattttaaacaatcagattcaagttgggtaattttaattatgtaacaacctgacatgatggaggaaaacaacctttaaagggaatggggtctatggtttgaattcacttaggaattttaatttcctataacctaagtgccattaaatggggtttttcatgt

SEQ ID NO: 629889 - DNA, 550 bp, Homo sapiens
gggaaaagcatttcatttttccctgaggatgataagccattattaagaagcgttgctaatgttatacagcaggctgggtgtcctgtcccagaatacataaaaggttttcagaaacttctaagcaaccaaaagaaaaagatgtttaagaaccccttggaaagggagggccttagtccacctccaaaatgttttttagaaaaagctaaggataaacaaaaaaaggtccctggtcagaccagcaaaaaaaaagtagcttttgaagccaaaagttaaaaacagcctttaaaaaacctgtcccagaaaggtgattttatgttccccgcaggaatgttattttcatggaaaacttgaagttttccagtcccctgtcccaaacatttgaaatcaactccaagtacatggggctggtgataaatgatcctaaactatcaagccagtttcaatttgtaggggccttttttttttcctgtggaaatgagggtcttcccatgttgtccaggctggttttgaactcctgccctcccccgatcctcctgccttagcctcccca

SEQ ID NO: 629890 - DNA, 370 bp, Homo sapiens
tgagatggagtctcgctttgccacccaggctggagtgtagtggcgccatcccagctcactggaagctccgcctcccgggttcatgccattctcctgcctcagcctcccgagtagctgggactacaggtgcccgccaccacacccgggtaattttttggatttttagtaaaaaccgggtttcactgtgccagccaagatgggctcgatctcctgaccttgggatccacccgtctgggcctcccaaagtcctgggattacaggcgtgggccaccgtgcccgggctaactggtctgatatttttaaaaaaggggacttggattaaagtatgcaaactcaaggagtagtactagcccacttgagtgaagttagc

SEQ ID NO: 629891 - DNA, 669 bp, Homo sapiens
agagatcataaatgacgtggagctacacgctgtaaagttatatatcttatgctagcagaggtatgaaataatatcgcatatggtgacgtactactccgctacatgataagaatatatccgtttggcatacgtgatgtatggtgcgtgaggcgtgatgcatatggcgatttgagtgtctcggtaatgatgaaattgtgtgagctatacggatgattatggaaagacagaaaaagatagtgtgaaaagttagaaaagatatattgccttatgtttattgataaaattatgggattaatcctagaggagatcgaagctattccaggtggaaatactgaaaacaatatcatggaaagcagataatgaaaaatgatctgcatgcagagcatctgaggccctaggaattcatcgtttctttttcaccgtatggtggcctgactggcatggtattagcaaactcatcactagaacatcgtactacacgagaccgtacaaacgatatgtacgcgtcacttccaacaatgttcgtaatccaaataggagctgtattgcgccacttcataggaggctgcattcactgatttcccctatgctcaggcgtaacaacctaaaagcaaaacatacagccaaaatccaatgcactatcattatacatcggcgtcaaatctaaga

SEQ ID NO: 629892 - DNA, 711 bp, Homo sapiens
agcgggtagtctggagctatggtggtggtggacagcgcgccgtagacccggacgacgggcaccccgtaaacgttctgcttctgtcggggcatgcccagtgcatccgcccggcggaggccccggccggcacaggccctggcacgctcatggtgactcatgcactcacgatggaggggaccagcccggaggcatgcgatgcggggggtcttgacccaggcgcggcaagcgagagtgcctcagggcacctgagccccgaggagaaggcgctgaggagtgaaactgaataagacagagtagtcagctcagactgccggagatcgaagagaaggctcgaattgagtgagctggagcagcaagtggtaggatttagaagacgaggaactcaaaaatgtattgctagactaatacagacttttatgagagaaaactcatgggcttgtaattgagaatcaggagttgagacagacagcttgtgggatggatggcgctggtggctgaagaggaggcggaagaccagggtgcactgatgtgagggcacgttggacgggggttctgatgagttccagccagcagttcaggatcgactgtggcgcgctctggcaggcagtgttccaggtcgcagtgagtcaaacacctgccagaagatctataccatggattcgggcggtatttgagctcttcatgattacagagtctggatatcctggtggg

SEQ ID NO: 629893 - DNA, 257 bp, Homo sapiens
gggggagagggtgaccgaaatcagaataggtgttggtatagaatggggtctcctctatcttaggggccatcaatttcatcacaacgaattgatcaatataaaaccaccctgacataagcccaataccaaagcgccacctaatacgactgatacacgaaacgtaactcacacgacagaccatagaaacaacatatatcgtcaccagatacataaacgacagaaagtcaagagaaaaaacaacagaacgaaaccaaaaa

SEQ ID NO: 629894 - DNA, 464 bp, Homo sapiens
  misc_feature (353)..(353): n is a, c, g, or t
  misc_feature (398)..(398): n is a, c, g, or t
  misc_feature (406)..(406): n is a, c, g, or t
  misc_feature (451)..(451): n is a, c, g, or t
aatttttagtagagatggggtttcaccatgttgatcaggctggtctcgaactcctgacctcaaatgatccacccacctcagcctcccaaagtgctgagattacaggcatgagcaccatgcctggccatcagtttcttaaaaagtaaacacatatctgccctatgagttagcaattccactacaaggtatttaatttacccaaaagaaatgaaaactttcataacaactgtattaagagccaaagtaggctgggtgcagtggctcaggcctctaatcccacgttttcaggggctgaggttggaggatccacttgagggccaggagtttgagaccagcctgggacaacacagcangaccccatttctggcaaaaataaaataaattaaaaatttagccanttacagtnggcacaggctgttagttcctactagaggggctaagttgggaaggntcttgagtccggg

SEQ ID NO: 629895 - DNA, 326 bp, Homo sapiens
  misc_feature (144)..(144): n is a, c, g, or t
tcgaccgctttgatgtatcgccacacagaagtattgtgtctcagcgtgtctagtctctttgcagatctctctccacacgctgaagaagtggcttacaggactctggggtaggatggaatagatgtcttccatctcacccttggnggggctgaaaacctggggtggaatccttctttttgcccttaggtgctggtgactcaggcagctctcttggcctctctgagcattcatttcctcatctctaaatgaggatgatagtatctgcttccaagattgtgtgaagattattttcttcttcttttcttttcttttcttttttttttttt

SEQ ID NO: 629896 - DNA, 192 bp, Homo sapiens
aactgtccctctacagtatatcatcttcacaattctaattctactgacttatcctagaaatcgcatgtctgccttaatccaatgcctactgtttgcacactctcaggtagagctgacttcctacactattaaagtgtaccacaaccaccagcccatcatactctttcacccacagcacctaatcctacctgg

SEQ ID NO: 629897 - DNA, 197 bp, Homo sapiens
tggagacagaatctggctctggtcacccaggctgggctgtgcagtggcgcgcgatctgggctcgctggaagcctctgcctcccggggtctcaagcgattctcgtgcctcagcctcccgggtagctggggataataggcgtgcgccattggcttctgggctaattttcgggattctcagtggggagacggggtttcac

SEQ ID NO: 629898 - DNA, 878 bp, Homo sapiens
  misc_feature (254)..(254): n is a, c, g, or t
ggccccgtctctaggtccaccaggtggtataaagggagatggcgaggtcctagaggcaatctggtaaccaaagaacgacgacagagcagatcaacaagcaagccaccatcatagccaccatcaccctccgtaacctctacttctacctacgcctaatctactccaccctcaagtcacacgtacgtcccccatcatcttacaaacgctagaacaataacatgcacagttctgaactatacaaaacccacaccacnattcctccccgacaacttcatcgcccttaccaccgcgtactccatacctatcgtcccctttttatacttattaatcttactagtaccatagatcataacctactattagaaccggcagaatagaataatagagcttggaaggaaccctttgccaggagtagcggggcctacaagcgcgaatcttcaattgaggacgacgggggacaccaattgccttggagacacaccttggactcgaaagctttgtccttgagatccaaaccggagggctgagcactgcacagtccgtggtgcgccttccactgtgaaattagttcaagagcgacacgatctctaagtaacttgtggaaatttgaaccctcgggcggaaggaagccgccggccttgtataatgcgaaatgtggcacggttgagatggcattttacccaatttttgggaccacacacacaccgttgcttgcacaagcttccaaggatccaaacgttaccttggggaataccgtggtcagcacagcaccttggggcccaaccttggaaccaagaacaaattggaacccccccccaattcttggtggtggaacttatccctttggaagggaccccgcattcaacccttgaaactgg

SEQ ID NO: 629899 - DNA, 170 bp, Homo sapiens
ttggtagaataggtacagaggctacagatggagttgcgttgttatgaaagtatggcggtgggttttctttcattgtaatagcctcatatgtagaagcatgggtccactgttaaaaccacatgtgtatgtgcagctttacattttatttaacgtgaagcatgtgctcgtgg

SEQ ID NO: 629900 - DNA, 174 bp, Homo sapiens
tccgcgtctccatccaacattccttctgggggtcacgtcgcatgccgttggccagcaggtctgcggtgatccgctgtttgccgtggaccctctcctccaggtgagtgtgtccgccttggggctgccggggacgatgttgcccaccttgctcaggcgtttcataaactcgatgtc

SEQ ID NO: 629901 - DNA, 346 bp, Homo sapiens
gaacactaaaagcattctgaaaggtaaaataaggctggaaaatgtatcactctcctccattacttggttaaataaataggtgtactaggcctgatagttagcggtagtacataccctttcactaagtgtatagagtaggcacaagcgcacataataccatagagcaaagaagagattgatatcataaaaaatgaatataggctagaatggcttatataattggaggtaacgggatttcaacatactctgtatcgtcactagtaccactagacacagaacaaatacaccctagaataggttattacaataccaatatttctaacaagtaccataagctaggtaccaa

SEQ ID NO: 629902 - DNA, 628 bp, Homo sapiens
gagctggtgagcggagatgcgtgaccccagagagccctgagcagccccacctgccgcctgcctgtgcctagattaccatcacacccctgtggagtgagcctgcatgctgccgcaagcctgtgccccaagtcaccatcacctgcaaccatgagcatgcgatggcctgagacccaagcatgcctgaccagacagaaacacacacaacgaacagcacacacctgaaacacctcgacgactgcgcagtaccagacaaaccaaacgtcgcccgagacaacctacaggacccatacggaggcagccaaagagggcacagccgaggctgagacacactgtataccggagaccatacaaacaaatcaggccaagaagaaccaagaaaaaggacagagagatagaaccacgacgaacgacgggggacaccacaagagcccagaaagcaccaccggcctacccagcgcgaacaccaacccaaacccaccatcggcccacccccacgccggctacagaggcagccacaggcgcactaactcgggcagaaccacaaccaaccacagcacgcccgaacaacagagaaccaagcacaaagagcagagcaaaccaacccacccacaatcaccaccgtcaaaca

SEQ ID NO: 629903 - DNA, 455 bp, Homo sapiens
  misc_feature (185)..(185): n is a, c, g, or t
ttcaggaccatggtgaacgtcctgggtgatgcgtttgggacgggcatcgtagagaagctctcgaagaaggagctggagcagatggatgtttcgtctgaagtcaacatcgtgaacccctttgccttggaacccacaaccctcgataacgaagactcagataccaagaagtcttatgtcaatggggnttcgcggtagacaaatctgacaccatctcgttcactcagacctcacagttctagatgcctgacctcagattgaggcctgggattgtgaagggcgtctccacaggagccatctcctagcaaactccgacattaaggaacgagaaggacactaagagtcaactgtacatttagtttgataaacagacctccagattattttctatatttgactttatagccttggttctctgggtttagggatttggggtgagatgaactgaaaggaaatta

SEQ ID NO: 629904 - DNA, 463 bp, Homo sapiens
  misc_feature (292)..(292): n is a, c, g, or t
agagagacaatctaaacattctcttaggctgcagataagagaagtaggctccattccaaagtgggaaagaaattctgctaagcattgtttaaatcaggcaaaatttgttcctgaaagttgctttttaccccagcagacataaactgcgatagcttcagcttgcactgtggattttctgtatagaatatataaaacataacttcaagcttatgtcttctttttaaaacatctgaagtatgggacgccctggccgttccatccagtactaaatgcttaccgtgtgacccttggntttcagcgtgcactcagttccgtaggattccaaagcagacccctagctggtctttgaatctgcatgtacttcacgttttctatatttgtaactttgcatgtattttgttttgtcatataaaaagtttataaatgtttgctatcagactgacattaaatagaagctatgatg

SEQ ID NO: 629905 - DNA, 144 bp, Homo sapiens
gcttcagtgtgagcttagacgtctaccctaaaatagttaaccgtaatgctaattgtaactcattattatcgctttaaggcgtattagggggaatgtagtgggctataagtacgtcattcttagtcaagtctgacacgcggggtc

SEQ ID NO: 629906 - DNA, 243 bp, Homo sapiens
ggggggtttttgggggccttttttggggggggggggtggccccaagtttggggggccttttttcttgtggccccctgcctggggcaagggggttggttttttgggggggcttttgggggttggggttttttcctttttggggtttggggctggccccaatttcgggggtttttggcccggccccccccccctttgggggctttttgtggttttgggggtttattttaataaggttttccccca

SEQ ID NO: 629907 - DNA, 700 bp, Homo sapiens
cccacgcgtcgacaaaaaacaaaacaacaaaaaaaaaaaaaaaaaaaaaaaaaaaaaaaaaaaaaaaaaaaaaaaaaaaaaacagaggggggggtgtatattttattttttttatttattcatctttattatgttcgcctaatttatagtgagtgagatagagcgagcgtcagacctcctgttttcgagatctttattttctttcctaccacaccgctgcgcccaactatcactaaccaagcagttctctcggcgcgacgaaaatcgtccttcaattgtgtgtgatgtcgtatgctgctggacagccgacgcgcgcgcgcttccgcctggtaggagcggaagcgcaagccgcatggtctaaacctcattcttatattttccatatcctcctcctgattacggcctctcacttcacaaaaaattatacaaagacgatgaacaatcgaagccctcccccaacacctcccacccccctccctctctctcccctaacaattctcaccctcctcctctcctcttccccacccccactccgactcacactcaatatctctctccttctctatcatctaactctatatatttcaacaccacgcacaaactcccttccccacctatcataaactaatacacctcttccttccttctttcccctcctcccctctctcctctccccccctcccccccacccccccccccc

SEQ ID NO: 629908 - DNA, 241 bp, Homo sapiens
tgcagcggtgtcacggaacatacgattattcttggtcagtccgctgctttttctggtcctgctgcacaattggggattcaattacacgctggtgcgaaggtctattttgattacattaacttaacaggcggagtatttggccggaagattgagttactccgacgggatgacaaatacgaagcggaaattgccgccgttaataccaaggcttttatcgagaatgatgacgtttttgccttgt

SEQ ID NO: 629909 - DNA, 400 bp, Homo sapiens
gcttttgctgttgtgtcaggtgggcagaagtcacttgatccaactacagagatattgtatttatgacggtagacaaactggatgtacttatgctctgccagcccaccaggtactctgttgagcttgtcgttgtccaaatgaagctccctcacatgaggcgtgttggccagagagccattgtcaacagcatagatgctgttgaaactcaatcccaacttagccaaattatgcagtcctttcaggctagctgcatcaacactgctgattttgtaggccatcaagatgtaattccgtaatggaaggaggaagaccttgaggaatgctggtgatattggtatcaccaatgcgcatgtatcagagcttcttcattccctggaaagccccattttcaatacctgag

SEQ ID NO: 629910 - DNA, 175 bp, Homo sapiens
ccctgtgccggcattcagccctttttatttgaagtgtcatctctacgggataaccacagcttactttatatggttggtcatagtttacacaagcatgtgaacaatcttatgcttttcaaaaaagtgtctgtggggtagggtgtatggtgtgggttctcttggggggactcctcta

SEQ ID NO: 629911 - DNA, 1358 bp, Homo sapiens
  misc_feature (73)..(73): n is a, c, g, or t
  misc_feature (509)..(509): n is a, c, g, or t
gccgggcgtggtggcacattcctgtggtcccaactactcgcgtgcagtgctgacggcaggagattcgcgctgnatacctggtgaggcagagtgttgcacgtgaggcctgatgagttgtgccacattgcactccagccttgggcgacagacgtgaagactcctagtctcaatagagttggatatatataaatagaaacttgtctttggaacttgggcgataataggtggattgcgaaggcatattcaatatcagcattgcgtaagagaatcagtacgtttggagcaaaacagaactagtggcgaattcgtcattgcatgtgtccggcaatccacgatggggtcgggggggaacagttggcccgatgtacgggtgagatcagcacagaagggcgacacttctattgatggcttttataatggacctgtcaaattacttgttagagagacgtgatcttccctctaattttcaataaaggtgtgcttgaatgagtatgtctaagagcgcgcantaccatggatcctacccaggagaggtttcctaatgggtcttttataccattgtgttttctaaatagagtttacctcttttatatttttaaccgtgggtgaccgttaagagttgggtggacacagagggtagtttaaacggcagattccccagtatttcaattgttttccgtactcgcgctaccttaacaataccttatttttaagctatctgtgtggggtccatattaataccggcataagactaagtgggtcgaccgagtagttgaagccttcctttaacccacgaaattaacttccatgggtgtacccccttttgtgcgttttcctaaatttacttagggggctcccagtgtggcttaaaataattacttgttggttgcaacatctaacaaggttactaaagctatgaaggcatcgaattggttagaaaattccctggggatggggtgcccctggaaattccaactggacgtatactttactttcggtgcacacgacatggctgcgaacaacacggtggggagacccattaagggtgtcgtaaaagaggcttgaaccacacattttggggagtgggcgactctagagggttattacaccgacaatcgtggggcgttcacaccacacgacaatttttggccgggttcacagagttgccccctatatcgtgcattctttctaacagagaagacgacgagtcttccccactcctcgttgcacccccggggtctgggaggcgcactaccagaggggaggagatattacgggctctgatctgagcagcccgcacaaccatctgtgccccctctggtcggtaacgctgcggcacgacagacatcctccgtgac

SEQ ID NO: 629912 - DNA, 820 bp, Homo sapiens
gaggctgaagcagaagaactgcttgaacctgggaggtgaggttgctgtgagccatgatcgcaccattgcactccatcctgtgtgacaaaaatgaaacaccgtctcaaaaaaataaatatacgattaagtaaaaaaacagtacattcaaataagcataacatgttttcgggcgggacgcacggtcctcgagagaaaagtattttcatgacccatgcgttttgggcgcgccggcgtcccacggttctaaagcatcgatgggcgttatgggagtgcccttacgacactggggtcacaaaatgtgtgcggggatgaaccactccgaagagaaaagagacgcccgggaggcccagccgattagtttccaataagaaagcccaatgcgttacaggacccattgaggggctcttaaacagggggaagcgcaaaaagggagcccacaaggtttgctagttgacaccccgcgcgtgggaaggcagaacccttttaaacaaggagtataaccgaaggtgatttaaaagacccttgaaaattcatgacgcagggaggaaatggggggttattataaaagccaaagttaacggctttactaaagagcagacgaaaattggaacgattattggggagtgctaggatgaaccattgtgagaagattgacgtttgaggtggaaacttgcaagacaggaagtcgagaaggggagacaagaattaagagattggaattaggagatacaacattcttttgagaagacaaagtaaatctacctgaaagttgagcgaaaaaaggaacgctggacacaaagctggaatgtcaaaaaaaata

SEQ ID NO: 629913 - DNA, 1015 bp, Homo sapiens
  misc_feature (38)..(38): n is a, c, g, or t
  misc_feature (66)..(66): n is a, c, g, or t
gccgggagggcacgaggctctagaaatgcccttcactntctcctggtgtttttctctctggacccntctgaagcagattttggacaagacctgcagcggaagggactctgggctgtgcctgaggctggctgggggcaggacaacacagctgcttccccaggctgcccactctggggacccgctgggggctggcagagggcatcggtcagcggggcagcggggctggccatgagggtccaccttcagccctttggcttcaaggatggagatggttttgccctccctctctgccctcgggtggggctggtgggtctgcagctggtgtgggaacttccccacggatggcggtggagggggttcgcaccgtgctgggctccccctgactgtagcacggagtgttggggctgggggccagctccaggagggcttgagagctcagcctgcctgggagagcccttgtggcgaggcattaaaacttgggcaccagcttctttctcggtggcagaaattttgaagtcagagagaaacggtcctttgttggcttctttgctttctcgtgggtcctttggcaggcctccctttggggagagggaggggagagaccacagccgggtgtgtgtctgcagcaccgtgggccctcaagctttcctgctgtcttctccctcctcctcctttcccctttctctttcctcatttcctagacgtacgtcaactgtatgtacataccggggctcctctcctaacatatatgtatatacacatccatatacatatattgtgtggtttcccctttctttcctttttttaagcaacaaaactatggaaataataccccaacagatgagcgaaaatgtattattgtaaagtttattttttttaatactgttgtctataatggggaaaaaggacattggccccgcagtgccctgccccagtcagcctggctgggctctggtgggggctcctgatccgcatccaagcttaaccaaggctccaataaacgtgctaggaagca

SEQ ID NO: 629914 - DNA, 143 bp, Homo sapiens
atttatccctgatcctaatgctgaaaaacctgatgacttgaatcatcaagccagccagcaggtttaacaacacgtgaacctgcccaaatagaagattcaagtgttgttaaacctgctggctggcttgatgatgaaccaaaatt

SEQ ID NO: 629915 - DNA, 1136 bp, Homo sapiens
cacacttgtcagagtgtgtcaatgcccccagcaccggtagttttaagcgctatggctgcgtttttcaggggacaaaccagcagatcaaggcccacgaggccagctccgccgctgcacgcagcgtcacaccctgcttgcacaggcatgtgcgacgccacacatccgtcctctgacacacacgcaacgcgtgttcccgttgctatgccacgcaactgcaacacggtgtacgacaacacacaacacagagtcatacacaagctcttgccacaagtcacgactactgctacgcctctcgcaacattggaagactctgacgcacgcacacaaacggacaacctgcctctcgcaacactacatgaagtcccacaaactccgttcacttctacacgcgagtgactagacagccaagcagagaaactgaaggagcttgacaaggagatccggcccttccggcagcaactgggcaggaacgcagacagccatgacagagcagccgtggcagtccctccagaaccgcgtgaccgagctggagagcgtggacaagagtgcggggcaacgtggctcggaacacaggcctgctggagtcccagctgagccggcatgaccagatgccgcagtgtgcacgacatccgcctagccgacatggcacctgcgcttccaggtcctgcagaccgccagctacaacggagtgctcatctggcaacgatcgcgacctacaagcggcggaacgcagcgaggcccgccacgccggaacaccctgacccttaacagcccagcctttctacactggctacttggcctataccatgcgtgcccacgctcaccctgacccgagacggctcggcgcacagcgacccacagcaccactgaacacacgcccacacgtcctcgccaccaatgccgcccggcaccccaacaccgcgtaacgccaacacgaccacgacgcccgcagccctccggcccccaccacccactgagccatcgctccaccccccccagcaggcacacgcaccccccccaacacaatacctacgaacaccaccacaccgatctacacggcacttctaaccacacaccacaacacaagcagcacaccccagccgcaccccccaccacccaatcactcaccacccacg

SEQ ID NO: 629916 - DNA, 411 bp, Homo sapiens
tgtgcttgtccaggtctttaaaattggttacgttacagttacatcacatttcagttgagactagccacatttcaggtgttcatagccacatgtgagaagagggtatagtattggacaatccaaaaagtcttttcaagtgactttttcattaatattattattagaaccaaagtgatacacaggtttacaaatatttgttaaaagtaacaagtcaacatttacaatttttacaatatttacaaaatttacaatttttttcttaataatttttcttttaaagctaattctttttttaaaaaactgatacaggcatgagcccccacgcctggcccagattattatttatctttgtgtctgcagcaaatagcactggcctagtccataacaagtccttaataaaccagaatctga

SEQ ID NO: 629917 - DNA, 462 bp, Homo sapiens
cgagtcgaggacagaggcgggagaactaggctcggggctgcctgccagggcgttagggataggatagggcccagcttcaggtagggggcaccttccaggcgggcggtgaacccctaacgggcaacgagcgggggtactgatgtcccttagccccagggacccagaagcaggttcaatctgtgcctcacagcaccaccgtgtggcttccccggggcatgcagccgcctacctgggtgtggccctgcagtgtggagctggctactacaagtccttaggaatctgtcgcatctacactcagtgcaaaaggcccagaacctcagtttagagcagcagtttattcgaagccacacatagtagcaggcccaggctctcacctaggcaagccacaacttcccaaagcaatggcaagtccagcccttccgtgtctcgcaatatgtcaggcatcaccgtcagggcagcagg

SEQ ID NO: 629918 - DNA, 180 bp, Homo sapiens
aaaaagcagctgctgagttagcattaccacagacatcaatatagtccatctgcaatcacaacgcacatagccaggatacccaccaactcccctgagatctgcagcccacacgtgggagctctggctgtcaccttcacaagccacagaaacggccacaacatattcggttgagcggagaga

SEQ ID NO: 629919 - DNA, 134 bp, Homo sapiens
tgttcccggtgtggtttgctgtagaacgctgccctttccatataccttgaatactatgcacccagcatggggtctcgggaacagcttggaatatgcggagtttgcaagatcactatcttgtaatccccaagtaa

SEQ ID NO: 629920 - DNA, 264 bp, Homo sapiens
  misc_feature (138)..(138): n is a, c, g, or t
tgactgtacttggtcgaatggtgacccctaaaagtcatgtccactgggaagctcagagtgtgaccttatctgtaaaccatcttggcagttatgatcatgttaagatgcactcacgctgggttagggtggaccctagtncaacaaccatgttcttttaagagacagaagaggagaagacagagagaaggccccatggaaaccgaggcacagactggagggaggcgaccacaagccaagaacgctcagagccgctgggagctggaa

SEQ ID NO: 629921 - DNA, 120 bp, Homo sapiens
aaaaattttgggggggttaaaaaagtggttattcggaaaaaacaattttaggtccctttgggacttaaggaaaaaacattttttccatgttacagtcttaaacagaattttatggctgca

SEQ ID NO: 629922 - DNA, 420 bp, Homo sapiens
  misc_feature (282)..(282): n is a, c, g, or t
acagtggcgcgatctcggctcactgcaagctctgcctcccgggttcatgccattctcctgcctcagcctcctgagtagctgggactataggcgtccagcaccacacccggctaatttttttttttttggtattttaataaaagagggggtttcaccgtgttagccaatatggtctccatctcctgcccttgtgatcctcctgcctcggcctcccaaagttcggggataacaggcatgagccaccgtgcccggcgggtaatgtcgggggggggagggggtatntctgggatagaggagtcctgtccggtgagccccttactttgtcacaccctaaaattatctcctaatatatcccccacctgcttagattataataattacagtaaggccttctagacaaggatcatgttaaatattgta

SEQ ID NO: 629923 - DNA, 162 bp, Homo sapiens
  misc_feature (5)..(7): n is a, c, g, or t
  misc_feature (55)..(56): n is a, c, g, or t
ttttnnnttttaagcactagtgctgtgctttgcgaacagaatcaagacattaacnnagatcagcttctctgaatgaaaagctttctatagaacaaagactgctactgtttcgctgccattactcgctccaaagctggaaaagaaaatatttcaaaatcaagg

SEQ ID NO: 629924 - DNA, 829 bp, Homo sapiens
  misc_feature (36)..(36): n is a, c, g, or t
acagaatccgactggtaccgaatcaagcagagcatngactccaagtgccgcacggcgtggcggcgcaagcagcggggccagagcctggcggtcaagagcttctcgcggagaacgcccaactcgtcctcctactgcccttcagagccagtgatgagcaccccacctcctgccagcgagctcccgcagcacagccgcacgcaggccctgaactacgcgctggccaacgcacagcaggtgcagatccaccagatcgggagaaagacggacagtgtgcaagtaatcccacagggacaccttccacatcgcccaggtgccgcaagggggagcaaggtcctagtatcacgcacggacagcgagggcaacctccagatccatcaacgtgggggccaaggcacggtcacggtgctgcaggggtgcacaagctgatcgcgggtggcctccttcggacccccggccggcagggcgggccgtgcgattgggttcggccaacttccatggtgacagcggactattcccagggtccaaggtctacggtgcaggcttggccgccatgttgaagtgaccacacggccgggggcacaagaccgggcgaaggccctgaagcccaggctaacaggccggagattgcagctcgagccacggtgggccattccagattccagggaagcgggtgccccatggcaaccagggagcccctcgcgggtctccgacttacgggccgggcccccaaagcgcccgggatctacaggggctcggccacaggcagcgggctgcacgtgttctgctagaagtggtttgaagggcgtgcctccggggaacaacctctatg

SEQ ID NO: 629925 - DNA, 372 bp, Homo sapiens
aaaaatacagggcacacatttgagataaagtttctaaacagtctttgatgggcactggaaacacttgcatatattcattccttacaccccgagtatgccacttggggttcaatccagtagttgcgttaagtttaaaactgcactggtctatattttctaggttttaggctattcccacttccgagcttgtttttctattaatgcaaaatatttcttttagaacccagatatcgaaaaaatccacgcgttaaaaatagcagatatatataaaacacagtattcaagagcgcacccacagcgagaacccccttttagtatagtcacatccccatagagcccgctttacacagtatttttctcacacaaaaacct

SEQ ID NO: 629926 - DNA, 178 bp, Homo sapiens
tcactagagatccccatactcatcaagtggcatcttttttttttgctttttttcttatggagacagaagtattgtctgtcgcccaggctgagtgcggtggttgtagatctcggtcactggaacctccggctcccaagtttgagtgattctcctggctaagcctcccgagtagctggga

SEQ ID NO: 629927 - DNA, 808 bp, Homo sapiens
  misc_feature (460)..(460): n is a, c, g, or t
  misc_feature (474)..(474): n is a, c, g, or t
  misc_feature (598)..(598): n is a, c, g, or t
taagctgcttgcaacacttcgttggccacaggctgtttcgccacaatcgcgggccttgcaccagaacaacaactgcgcacccttggcctgcaaagcttcgcgcgttgcggtaaaggcggcgctggagctgtgttcggcgggcaattcataggtgattgcagtggctgggccgcgtgcgatggcctggccttcataacgcaactggccgtcgatctagcggatcgcgcccatggggtaaatgcgttccttgtcttcagcggggcggtaatcgacgatttgcgcatcaacctgacgggctaccgccggtagatcctggctgccgggcagatcggcggcaaataccatggggctgaaacaacaaaggcccagggcacggatacatcctttacccaggctcatcggatcagtgagccctggccaatgttggtcacagcgatatcgagtgtgttcatggttgacnccctttcaatccgnccagcctcggcagttgaccccgccaagtcaaggcgtggagaagaaccgattgaaacagtctgcaacaagagccgcaccgggctcgtcattcaggtgtaaatgatggccgcctggcagcgtggtnaccgtgaagggtagctgagaaagcaattcggaatgtttcgccagcatgccgttagccgcgaccaccaactgggtagggcaccctacccttcgcacgaaagccatggcttgctcgtcggtcaggcgcaccggcgacgccagggtcaggcggctatcgctgcgccagggtgtaaccgcctggtacgcgtccgtacgcacgggatcctctaga

SEQ ID NO: 629928 - DNA, 413 bp, Homo sapiens
  misc_feature (18)..(18): n is a, c, g, or t
  misc_feature (23)..(23): n is a, c, g, or t
  misc_feature (48)..(48): n is a, c, g, or t
accacttaccaattattnaaacnagaagaaagtttcacattcattccncggtctcgtgaagagcttccagacaactttccaaaggaaattcctgggatctgctatttcctggaggtaaggactggtccaaagccaccaaagccttctctttcttcgtcgagaataaaaaaggtttcctacaacatcggcaccatgttcctccgggagacaagcctctgagacctgctacagatcaaagactcctccaaaaagcacaagcccagaacatgggtcaccaatggggggtggaaagagattgtgtctctttcattgctttgttgggaacaagcagcaaaatttctgtattatgtcaggcaataatcctactaaaaggtggaggtgaccgctgtcaataaaaagccggaggatgaggg

SEQ ID NO: 629929 - DNA, 769 bp, Homo sapiens
gccaagtctgttggaggggcccaaatttgtgtgccgatcattggaagtccccgtgagccaccaagctaattggatcgtgttcagcggtagagttccccggttggcccgctacactctctctctgcggtccggaccggcagtatgtgtgctctgaagcaagtgacgaagtagacgcccacggctgctgcccaggcgtcatcgtctcctatcacaaactaagtgagggtgctcaacgcaaacttcggaataggggttgctgtagggataacccatctctcgccccgctcgcacacgctcggtgcataccatggataagccccgcgctctctaccaattctttgcaatcggtaggagatacatgtgcgtgtgcaatggtgaaaaatccttcatatgccgtccactcgctactttcgcatcgtatgaaggagtcatggaaatgaccacgctcctgggccatttatggtagagttgtcccattccgtaagaagggattatgtgatgcagaaagctgtccttcgacttatgatgtgcctcgcgcctctggcacgcgcccctgcatgagatgtagatgcacgctcggtgatgccctggatagtttactttgtggttctaccctatgcgagaggtgctttctgatgtatgacttggataagaagaagacagagagagaagcaaggaactctccttcttatttgcctgctacgggtaccagcatcacccacaacacaaacataccgaatcaaataaaacaacacgacatagacgcaga

SEQ ID NO: 629930 - DNA, 738 bp, Homo sapiens
ggcaaacccggcgagcagggcagctcgcgtgaccctggctcctctgcctgccccctcaggcccccgcctccttcaggatgaggctggacgtggggccggaggatgagctgtccgactgggccgactgcaaaagagttttaccagaagtacgaccctaaggacgtcatcggcagaggagtgagctctgtggtccgccgtctgtgttcatcgagctactggccacgagtttgcggtgaagcattatggaagtgacagctgagcgtgctgatgtcctgagcggctggaggaggtgcggggaagccgacatcggcgagagacagcaactagtgcgttcgcctagggtcgctcggcctaggccccacatcatcaaccctgcatcgagttcctatcgagctcttctagcgttcatgttcctggtgtgttgacctgatgcggatagggagagctgtttgacttatcttcatgaggagacaggtggccctcgtctggaagacatggaaaccaggtccatcatgcggtctctgctggagatgccagtgagctttcatccatgccaactagacagttgtgcatcgagatctgaagcccgtagaatattctcctagatgacgaatatgcgaggatccgactttcagcatttcgggttctcctgtccacttgggaacctggcggagaagcttcgagagtgtgtgggaccccaagggtatctagtcgccagagatccttaaatgctccatg

SEQ ID NO: 629931 - DNA, 248 bp, Homo sapiens
cgttgcgcgagatcagctacctgacgagagactgcatatgcggtgtggagtgtctagaatcgttggaaggcgtgtatcttaagctccaagttcacaaggtgtactagtacgtgcagacctgaaccaggcagtaccagtactctaggttctctgccctagtcatatgaagatcctggctcgaggattgtaaaccgtaaagttttgaaagcttaaagtttctggacagtctttaaactactctgtatggg

SEQ ID NO: 629932 - DNA, 724 bp, Homo sapiens
gtagcccccacaatcctagggctacccgccgtctagaactgatcattcatatgtccccctctattgatgccgctacctccaaatatctcatcgatagaacacgactaggtcaccacccaacagagtgacgtaatctagagcgtaacctcggaatacgaaactgataaccatacacaacactatgaggacgaacctgatctcttatactaatattcgtaatcatttctattgacacaactatcctcctcggactcctgtcctcactcattatacaaccaaacgctacgccaatctatgctagttagaacgctagtcgcacggccatccccttatgagcgggcgcagtgatttataggctttcgctctaacgtataaggtaatgccctagcccatcttcttattgacaaggcacacctagaccccttatccccaatactagttatcatcgaaaccatctggtctactcattcaactcaatagccctggccggactgcctaaccgctaacattactgcgggccacctactcatgcacctaattggaagcgcaccctagcaatatcaaccattaaccgttccctctagacttatcatcttcacaattctaattctactgactatcctagaaatcgctgtcgcctttaatccaagcctacgtttgtcacactttctagtaagccctctacctgcacgacgaagcacagtaaacaaactcggacacaacg

SEQ ID NO: 629933 - DNA, 151 bp, Homo sapiens
ctacaaatgatgtgatgaaaatgacatagttgcatggcacatggcagaaatgaatacgatgcacacacactcgccatcgcatacgatttgtgacggcataccagatgtgcgttatgaccaacggcacattgcatagcgaagttaatagata

SEQ ID NO: 629934 - DNA, 432 bp, Homo sapiens
  misc_feature (432)..(432): n is a, c, g, or t
atataagtacatattttaatacataatatatatatatccccctttcaccatacataatattttttacacgggaaccttatttgtggcttatgcttaagttctttttttttcttttgagacgaatttttgctcttgttgcccaggctggagtacaatggtgtgatctcggttcaccgaaacctttgcctcccgggttcaagtgattctcctgcctaagcctcacgagtacctggggttacaggcatatggcaccatgcccagctaattttgtatttttagtggagacggggtttctccatgttggtcaggctggtcttgaactcccgacctcaggtgatccgcccacctcggcctcccaaattgctgggattacaggcgtgagccactgcgcccagctgtgtttgagttctgtagtctgtccggtggtttttn

SEQ ID NO: 629935 - DNA, 134 bp, Homo sapiens
gggctaatgaaagtttttagcatgataggtttcttaatctattatgaatgggaggtattcatcccattctagttttaaatgaaaacccaaatttaatgcattttgccttgttggtttcaaccatcacaccaaat

SEQ ID NO: 629936 - DNA, 1124 bp, Homo sapiens
gacagagtcttgctttgttgccaggctggagtgcagtggcgcgatctcggctcaccacaatcgctgcctcctgggttcaagcaattctcctgcctcagcctcccgagtagctgggactacaggtgtgcgcacatgccaggctaatttttgtatttttagtagagacgaggtttcaccatgttggccgggatggtctcgatctcttgacctcatgatctacccgccttggcctcccaaagtgctgagattacaggcgtgagccaccgtgcctggccaggccccttctcttttaatggagacagggtcttgcactatcacccaggctggagtgcagtggcataatcatacctcattgcagcctcagactcctgggttcaagcaatcctcctgcctcagcctcccaagtagctgagactacaggcacgagccaccacacccagctaattttcaagttttcttgtagagacagggtctcactatgtagtctaggctggtcttgaactcttggcctcaagtaatcctcctgcctcagactcccaaagtgtagggattgcagatatgagccactggcctggccttcagacagttctactgtgaagtaaaattgtatgtggaaagagtagatttcatggtctaccatttatctcaattgtaactgcgggcagccatgttgccatatacggacgtcaaggaggacagcatacggcaccgggacacccagcctggccgccctggctcctacctctatacagactcctcactcgcatcgaaaccgtgacgaacacaagaacgcaacattaaccacagtctcaccagcacaaccccacacgccacaggccagcccacaagagcagggggcaacatcgacgacacaacgcaactacgaagaattaaagacccgggcacccaccgaccagcaacaaaagacacccaacaccagacagacagcaaacgacggaccgccaccgagctcccgacacctcggccccagatccacacgcagaaccacgcaaagcaacaccacccaaggagagcggccaccaaccaagccagccaacagcgcgaccaaacaaccagcaacacctccagaacagacaatgaaagagaaactcatgacatgcgcg

SEQ ID NO: 629937 - DNA, 305 bp, Homo sapiens
  misc_feature (64)..(64): n is a, c, g, or t
  misc_feature (110)..(110): n is a, c, g, or t
  misc_feature (177)..(177): n is a, c, g, or t
  misc_feature (186)..(186): n is a, c, g, or t
  misc_feature (190)..(191): n is a, c, g, or t
  misc_feature (196)..(196): n is a, c, g, or t
ccgccgttgcccctctgaaaagcccatgctccccaccatgtataggcctttctgccgtgtcccnccacctgccctcctgccgtgtccctccacctgccctcctgccgtgnccctccacctgccctcctgccctcctgccatgtccctccacctgccctcctgccatcatgccatgtncctccactngccnncctgnctagtcaattccattccagcgtagactagtagcactagtccacggttggctgagaatgagtgtgaggcgtattataccatagccaaccgtggatatcgccaaccagtgg

SEQ ID NO: 629938 - DNA, 86 bp, Homo sapiens
cctttttttttttgcacagtaatcaaaattacaattctaaaatttacatgaaactaaaataaatccttggactagccaaagcaatc

SEQ ID NO: 629939 - DNA, 95 bp, Homo sapiens
tcgatacgactttttttttcccatctttcaggtgtatttactgggtatgttttcaaagcttgttccaaaagcttctgtccttctgtcgtcttctc

SEQ ID NO: 629940 - DNA, 283 bp, Homo sapiens
  misc_feature (67)..(67): n is a, c, g, or t
  misc_feature (263)..(263): n is a, c, g, or t
ggcacgagcttccctttgtatgggagctgttttcatgctatttcactctattaaatcttgcaactgnactcttctggtccatgtttcttacggctcgagctgagcttttgctcaccgtccaccactgctgtttgccaccaccgcagacctgccgctgactcccatccctctggatcctgcagggtgtccgctgtgctcctgatccagcgaggcgcccattgccgctcccaattggggctaaaggcttgcattgttcctgcaanggtaaagtgctgggggtttg

SEQ ID NO: 629941 - DNA, 189 bp, Homo sapiens
ctttccacgcgaaaaccacacgccgcgagtcgagaggtcctgatggacgaagttgttgcatatccgggtgaggtcatggtggacgaagttgttgcgcaacaacttgtccacaatgatttgcaacaacttcgtccatagtgacttgtgggagcgggggggcgtgtgcagtttggttgttcggcgtgtgca

SEQ ID NO: 629942 - DNA, 1128 bp, Homo sapiens
tgaatcctgtacggttctgtagtaaacctcagttctttgtctccttcagaagaagagaatgaccaaggggcttaaggtatacggagagactgaggcaatgtcataagtagcaggagtggaccctccatttgtaaatagctttagcgtgacagcgaactgaacatggaacggtaatagcacaagttactgcttgcaggagggccgagtgggcagctcgacaggagcacgtgcctggtctagctggattcttttttggaccttcgtattctagtaactgattgttgttatttagacttcattgtatgttctttgctctttcaagtcaacgtatctttaacgctggaccatcttttcctacgacacgagaacataagcacaccaataatgtcatcaattgtctggtgagcctccaatgtgaacgcatcctaaggagacagtgggcacttgtcatggagttccgcaaacaaacgtactcatatctattaacttggcgcactgtttaaaacaactgtcttctcaggcgtaagctgctcaatcctagtggcagcgtacctatactgctgagataaaaccccatttgaagaaaatcattgtacagaagtggaaaagtaattggtgtggaaactctgaaggagcaacatcggtcgcgtgtaagcagctctatcttgtgatcccctagctaccgttaccagatgggggtcagaaagaagtgggccaggtggatcacgaagttatttgcattcgtcagccaaccccatcaaggaccccaatgatgtcgaatttcctggcggatccttattccaaaagaatccaagtcacatctgaaagacgagaatattgacggtctggcaatgatcttccttggggcgcgacaggtatgcggcccgagcggaggctcatggctgctgcgtcgaccacctggtgtgtaccacgcgcctgaagaaacacgcgcgccttgtgcctgggtgcctggtcgacactgtttctcaggtcctctgttctccactggcgggcaaccaatttttgtcaggtgactcattgacggcgtcgccaccggccacgctcgtcgcccacggtcagcttctgttatgttgcttgtattctgcttctgtgctgtcggatagcgcg

SEQ ID NO: 629943 - DNA, 466 bp, Homo sapiens
ctttggcttcaaaaacatgtatgccaaggtctctgggtccattaatatggacagccccccccagggcctcttccgtgggctctccagacaggcatcccatcaacatatgggttataaaaagggcccccatgttgtggaaaaccgggaggaatgtggccctctgcccattgtggttgcgtccccccgggggccctttaggaaggatccaaagccaaaaaattaggttccatacgtcaaactgggctgggaaaatgttaaaactgcccagggaattaagcgccctgtgtggtctaattttaaaaaaacccccccgtaacctctctggccttgtgcaaccagttcctgttctgccctgcccctaggaaagactcagccccccccagcctgggatgttcccctgccttttgtttgtttttagggaagtttaatctttaaaccctttggaaataaataattatagccttcc

SEQ ID NO: 629944 - DNA, 644 bp, Homo sapiens
gggcaggtggctgaggcccctgggctggtgtggacgtacctggtgggcaccctgatcctcaggctcctgtgtccctggatggctagtccccagcaccaggacctcgctgggcagcggttggtggtaccatgaactcttttcccagtgtccttcagggagatctgtgatgaggtgatagcctgccgctgactctaccctgcagccagccctctgcctgtatggtgcatcgtccgaaatgagaccagtgctgggcgagccattgccgagttctatgtcagtgcaggctgacttctgatcaggtgaggaatcactagctgagtgggggacccgagggccacgagctctatcaggaatcattcttttgtcgcgacgacaacagaacgtgtcgtgatgattgcccgagacggatgatgtgggcgtgaactctgcaccactcggccatagaggcgcctattcgatccgtcttacaaccggggttcatgggagatgtcccagttggagtggcccctagaggtccccaggcccgtactcctcgccggcgtctgaacaataagtaaagcggacgtttagttccttggatcaagcagagtctatagaaaatgaaaagaccaactttcaaagttgcaagatgtaggggacattac

SEQ ID NO: 629945 - DNA, 88 bp, Homo sapiens
tttaaaaaaaaacccgtttaaccctttttaattgaaaaatgtttcaggcaaacattgggggggacaaaaacgtttgtggaaaacttta

SEQ ID NO: 629946 - DNA, 166 bp, Homo sapiens
cgaacacatagaagtacgtatatcatatggcacattatgacttgtaacatctgtacttcataatacaggtataggtgtgtggtatggaagctaggaaaaccaacagtagtaggctattatagcaaaagatctgatgttaagatataaagatcatatagcctgattt

SEQ ID NO: 629947 - DNA, 447 bp, Homo sapiens
  misc_feature (74)..(74): n is a, c, g, or t
  misc_feature (125)..(125): n is a, c, g, or t
caggaccctgaagatcctaactggacacatccctaatcagtccggtgacctcatttccaagatcagaataggcnccagcctggccaaaagggcgaaaccttgtctctattcaaaatacaaaaatnagctggatgtggtggtgcacagctgtaatcccagctactcggggggctgaggcacaagaatcacttgaacctgggaggcagaggttgcagtgaatggagactgtgccactgcactccagcctgggcgacagagcaagactccatctcaaaaaaataaataaataacataaatgggggacaagaggacctcacttgggtcatgggtcagaagtacagatggctgcctcgaacagcatgcctccgacggactcttgtgtcggtgtaagtggtacttctgcgcacagtaagagcagggagttcccgcctcgtagcagctggtaga

SEQ ID NO: 629948 - DNA, 604 bp, Homo sapiens
agcggatgctgtatggcagaccatgctgatgtgcgtgatgagcggcagtcaggtgacaagtatcttgggaaacgcagttcaagctctatcacgaattagtgacgagttctggctagacccatctaaaaaaggtcttgctctaagatgtgtgaattcttctcggtcagcatatggatgtgtcctgtcctctcctgtgtttgatcagcatcatcaatggtcagctttagtgcaaaatgagtgaaaatgaacttgagacaacactgcatttaggaatgcaaatctgggaatttgaagtcaagttttgccccatcttgtagatgtctgaattacccttgaatagaagatatagagaagtgcctgaatattcagccagatctgataacactgcacaagtagcttaccttcaactttcttctaacatgacactggtattaagataggaactcataagtatatgtcttctcaggaaacgtcaggcctttgcaagcttagtttgtgtggacaagaatggtttggtactaagtacggctaaattgatttcaacccaacggattgctctgcctgaatgtccatatgcttcctttcatgaaccactcaaggtcaa

SEQ ID NO: 629949 - DNA, 521 bp, Homo sapiens
acgacggcagtgcaagctgtcatccttgctaggtgatcccatagaggatccccagaggttcaggctttcgcttcgaagctcctgaaccttatgatcccgccacagcctcccaagagtgttgggattacaggtcatgagcctctgcactcggtctgtgagttacttatttgtctcgtgtattatctgtctcatccccactataaagtcagctccatgtaaggcaggtgaattgtatgtctacttcgttccctgttgtctccaaagtgtctataacagagcttagggcctgtgtggtcctcatctatcagtaacagaatgaatgaacatcagacaaggagagagggctctgaaacacaaactcacagtcagcacactctggttcagaactgttcaatggacttccaatcgcacttgaagtacaggatgagatctcttactgaggcctatgtcaggccttgcctgatctggcccctgcgcacctctctggcttccccttgaaccaggctcactctctgagcagc

SEQ ID NO: 629950 - DNA, 103 bp, Homo sapiens
aagtaaggtagggatatgtactcgcctgatagcggacgcctgatgctttgagctcggcactaatcacggccacatgagggaagtgctgtgtcacaatggctca

SEQ ID NO: 629951 - DNA, 130 bp, Homo sapiens
ggtttttcggaggatctctctccgcgccgatcctatgttctagtccacacagttctgagctacaggcacggcgcggatgggagtccctggacgggtttaaaagagtacttttgtagcatgttagacgtca

SEQ ID NO: 629952 - DNA, 1058 bp, Homo sapiens
  misc_feature (401)..(401): n is a, c, g, or t
  misc_feature (544)..(544): n is a, c, g, or t
  misc_feature (557)..(557): n is a, c, g, or t
  misc_feature (631)..(631): n is a, c, g, or t
  misc_feature (633)..(633): n is a, c, g, or t
gctaaaaccaagtctcccaactcctaaccatgggatggatgggagaggcaccccgagtctgatgtttctgctggggtgatcctccaccccactgatttagaggctgtgggagggtctggggcagggtgctgggaagcctgccaggctcagcttgcagccctccagccagagctcttcctgtggccccactcacagaagggcattacctgctagttagcatagcctcccaccttctggggttgttatggaaaccaaacctggaggggaagggaggaagggcagagaggagggtggcaattcctgcagtcactaacggcgtgggcttcaccatctcaagataagggaggggcaggaagaaggcttccctgcagtggggctggtgatgggataggattctcaancaccaccctttgctctttctgcccctgtctgctgtccagctgtctgcctctggccagcagcttagccatcactgaaggagcagactggcttggaggagggtttgccagcctgagaggggcaaagctctgacccctcacgtgancccaacttgccanctctgcaactggccctgtgtcataccaagcattcctccagccctgcacactcagaggaccaaaagaggctcagngnggatctgggtagaataaaagaggcagtagcacaccaagtcagcaaatggtcccagacattccacagccttaccctgtaagtcctctttttaagacttcctctaactcatgattgtctcccaaggaagaacaacggccaccagtggaatcctataccagccatcaggtggttggaagcatggccggagaccagagtatggccacctaatacggaatagagggccaggacctggaaaccatgcatagaggacgaaagaatgaggcacaactgtcagacacggagcccgcaggagaagtacccgtgacgggacagggagacacaccacaaagggcagtccggggcacaggaacagctatagcacagcacgagcgacaacaagcgaacgacagaaccagcaaggaaacacataggggccacgacaagca

SEQ ID NO: 629953 - DNA, 498 bp, Homo sapiens
caactgcaacactgtcctgtctggagaaggcaagtaggttgtatggcagacgttcattttaagaacaacctgactggccaggtgcagtggcgcagtgcctgtaatcccagcactttgggaggctgtggcgggcaagtcacctgaggtcaggagttcaagaccagtctggccaacatggtgaaaccccgtctctactaaaaatacaaaaactagccaggcgtggtggcgggtacctgtaatctcagctactcaggaggctgagtcagggaattccttgaacccaggaggcagaggttgcagtgagccgagatcgcgccactgtactccagcctgggcgactgagcaacacttgtctcaaaaaaaaaaaaaaaaaaaaaacaaacttcaattttgcccaatcccccttgtattggggaccctaaattaggggtttaatttcggggggtttatttccctcttctgattctggtgaaccaaaagcggttttgggaactttct

SEQ ID NO: 629954 - DNA, 400 bp, Homo sapiens
ggtgtctatagagattatcatctgctgagggtaggcagagggagtagagcagacactcaggaggtgatatgagattatcatccgctgagggtaggaaggggagtagagcacacactcgagaggtgtcttgagattatcatccgctgagggtggaaggggagtgcgcacacactacgggaaggtgtcttgagattcatcataccgctgagggtaggaaagggagtgagcagacactacggagaggtgtcttgagactacagggagtaatacagaaatagaatgttgttaagtaaggaggaggtggctggtggcccatcctagtattaatcaagtaacagctgtgaggtaacgggccagtaggagcaaacctgaagaatgacgatactccgctaccgacatt

SEQ ID NO: 629955 - DNA, 142 bp, Homo sapiens
tgggagctggctgtgcactggcagtcctgcgtgtccagatagctgaatcatgcccggagtggaagctgaagcctgcacagtgtccaccgtgttccactcccatctttcttccgggacaatgaaataaagagttacctccagc

SEQ ID NO: 629956 - DNA, 698 bp, Homo sapiens
  misc_feature (44)..(44): n is a, c, g, or t
  misc_feature (62)..(64): n is a, c, g, or t
  misc_feature (123)..(123): n is a, c, g, or t
  misc_feature (127)..(127): n is a, c, g, or t
  misc_feature (194)..(194): n is a, c, g, or t
  misc_feature (255)..(255): n is a, c, g, or t
  misc_feature (268)..(268): n is a, c, g, or t
  misc_feature (288)..(289): n is a, c, g, or t
  misc_feature (292)..(292): n is a, c, g, or t
  misc_feature (303)..(303): n is a, c, g, or t
  misc_feature (305)..(305): n is a, c, g, or t
  misc_feature (317)..(317): n is a, c, g, or t
  misc_feature (332)..(333): n is a, c, g, or t
  misc_feature (337)..(337): n is a, c, g, or t
  misc_feature (339)..(339): n is a, c, g, or t
  misc_feature (342)..(342): n is a, c, g, or t
  misc_feature (354)..(354): n is a, c, g, or t
  misc_feature (362)..(362): n is a, c, g, or t
  misc_feature (365)..(365): n is a, c, g, or t
  misc_feature (371)..(372): n is a, c, g, or t
  misc_feature (390)..(390): n is a, c, g, or t
  misc_feature (396)..(396): n is a, c, g, or t
  misc_feature (398)..(399): n is a, c, g, or t
  misc_feature (417)..(417): n is a, c, g, or t
  misc_feature (447)..(447): n is a, c, g, or t
  misc_feature (466)..(466): n is a, c, g, or t
  misc_feature (469)..(469): n is a, c, g, or t
  misc_feature (488)..(489): n is a, c, g, or t
  misc_feature (491)..(491): n is a, c, g, or t
  misc_feature (503)..(503): n is a, c, g, or t
  misc_feature (514)..(514): n is a, c, g, or t
  misc_feature (526)..(526): n is a, c, g, or t
  misc_feature (534)..(535): n is a, c, g, or t
  misc_feature (538)..(542): n is a, c, g, or t
  misc_feature (546)..(547): n is a, c, g, or t
  misc_feature (550)..(550): n is a, c, g, or t
  misc_feature (552)..(552): n is a, c, g, or t
  misc_feature (554)..(555): n is a, c, g, or t
  misc_feature (557)..(557): n is a, c, g, or t
  misc_feature (560)..(560): n is a, c, g, or t
  misc_feature (611)..(611): n is a, c, g, or t
  misc_feature (619)..(619): n is a, c, g, or t
  misc_feature (626)..(627): n is a, c, g, or t
  misc_feature (629)..(629): n is a, c, g, or t
  misc_feature (691)..(691): n is a, c, g, or t
tttcagataaaaataaaatgacaagagcacatacgaatattggnattattcattgagctatnnncggcgttagaaggggggggggcttttggtgtatttgggtccgacctccttctgtatgcngggntcacttctggatgtctctcgtttctttcttcggggggtggttttccagggggttcccggcctcctcngatctttcccaagtttgttgcacttcacctcttagaaataatgtatatatatttatttttnttttttttttttngggggggggtcttgctctgnngtncgtggttgggngnggcggcgtggtnggggcgcgcggcggnngcgncncgnccgggcgcgggngttcctcncgnctcggnntcccgggtggctggggtngcgggngnncgtctcccctctcgggtnttttttttttctctctgttgtgatgctgtnttgcggtgcggtgcatgcnggnctcagacttgtaggctcanntnatcctcctgccncggcctcccantttgctaaaaanaaaagaannaannnnngtgnnttngngnngnctntttttaatcattaaaaaaaaaaaaaaaaaataaggcaggccggcttctctntttttttnttttttnngnaaggtctcatccttgaagcagctttgttatatgcagagcacagtactggcttcaaaaaatanataaagg

SEQ ID NO: 629957 - DNA, 1174 bp, Homo sapiens
ggagagaactagtctcacggttttttgttttttgttgttgttgtagatcacagttttttattcttaaggtcccaagcgggagaaaaatctcacattcatactaaaaatttccaacataaactcaacgggaatgtgaagctctcatatttgggtaagtggaaagctcccagccctccgcgggggcgcggtccaggtggtggtgtacgggtacacattccacacctcactcttcactcgagggttccccggaaccgggcgtggtccgtgccgtggggaacacgtggaggataaacaagccctcgagggtcacggaccacatagggaggggtcatacacttatacaatagagggtccgaggataaaagcctggagtggcataggcgccgagggccgcaacccgagaacccctctccatatcggataaccgagggatattaagaggcctggagagggttcaaccttccctctcgcgctcaggcggtgccaccacgccgagacccgagggatattacacccacctcggcgcgcctcgagggtccacaagaggcggggggcgacgggggggccacgccggggtaaaaccagttctataacgagtcccacaatatattttgaaaataacaaaaatagaaagaaattaacagcagtatagccccaaatttacaccgaggtgggccaagcaaagaggaggcactcaaaggatcccccccagggggaaaaaggcgtggcacggagggggaaccgggcatctttgggagggccccctctttttctgtgggggcgcccaaagggcgatataaaccatattaaacgataaataccgagcgcataaaaatctcccatagggtttaaaatacggcccattataaataccggtggtaaaccgcacccttcatattggaaaccccaaaggcttggacacggggaacttttctaaaaagggggcgcacttttaagcgctataaaattcacgacaaaacataacaacgtccttgggtgttaaacaacaaagcggttttaaacaaatcgtgttcaacactctgtcatcaatgtgaaacaacacacaggggaattttcaataggtattcttcccccaacaagagagggtggtgggcggggttgaacaaccgacaaagggaggctagtggggccccggggggctaacaagtgggga

SEQ ID NO: 629958 - DNA, 256 bp, Homo sapiens
ctggcccagagtcccacctgggggatctctccacccttctcagagttctagtttcaagcagagtaccaaccaatgggctccatcctctggattctggtcaatggaaatatctccctggcagggtcctcttctttgcccagagatccaccccaaccaggggcttttagttaatgggggagttccaggaaaatcgggggttggggtttggcttcaaggaaaggggataattaaaggattggggggccttaccatccca

SEQ ID NO: 629959 - DNA, 614 bp, Homo sapiens
ccctagacccaccagatacgcgtgtgcataggctatacctggagccaacctggttggcagcacccccacgcctggcaaggccaccccgcttctatgaggcgggtgaggagctaactggacccggggccgtggccgctgcccgcctctacggtctggaacctagctcacccacttgactctacaggcgcttggctcctcacaccaccacctgctgcggccccgggaacccctcaccttctcagcaagaccccaccgggagccctataaggagggcaccagctccgcttgtgcccgccccccggcccagttccccaccataggggaccctggcccagcatcgggcatgacaggtgaggggaacggggaggggagtcggggcacagctccatctaccccttccttaacccaggtccaagggctgaggttttccgccagggcctgccagggccaaggtcatacacctcaccagccacctctgcaggtcatggcaacctgggcaaccagcacgcctcaaagaccacacagcaccaggccatcacatggcgtgaaagggtcactagggagagccaaggtcaacagcctctagaggaagggagcaggggcgtgtgcatagg

SEQ ID NO: 629960 - DNA, 424 bp, Homo sapiens
  misc_feature (9)..(9): n is a, c, g, or t
  misc_feature (38)..(38): n is a, c, g, or t
  misc_feature (110)..(110): n is a, c, g, or t
  misc_feature (135)..(135): n is a, c, g, or t
  misc_feature (137)..(137): n is a, c, g, or t
  misc_feature (146)..(146): n is a, c, g, or t
cctggcccntatggcgtggaggctaatacgcaaaaccncgatccaggtggcggcggttccagcagcagcatagctatggcagtggcagaagaaattaggaaacaagcttngcaggagaggagagccgagaagtgncngggaagctncaggttacaacagatttgtgaactcagccaagcacagtggtggcgggcctagctgctacaagagacatgttttagacaatactcatgtgtatgggcaaaaaactcgaggactgtatttgtgactaattgtataacaggttattttagtttctgttctgtggaaagtgtaaagcattccaacaaagggttttaatgtagatttttttttttgcaccccatgctgttgattgctaaatgtaacagtctgatcgtgacgctgaataaatgtctttttttcc

SEQ ID NO: 629961 - DNA, 120 bp, Homo sapiens
ctctgaggatccccgtcccaacgatgcggaagtgatctccaggcgactttgaacccattatttggcagtgtccatattattaaactagtcaaaaatgctaaaataatttgggagcaattt

SEQ ID NO: 629962 - DNA, 221 bp, Homo sapiens
ctctagctcggtaccccatccagcttctgatcctccaccaaaatctgccgcagttgcttgtgggccttggaggagccaaacaacaccccatccggcacaatcaccgctgcccgacctcctggtttgagtaatcggagaaacaacgccagaaacagcagctccgtctttttagttttgacgatttgcagcaaatccttggctgtgttctcatagtccagtga

SEQ ID NO: 629963 - DNA, 339 bp, Homo sapiens
aaacccccaactttttttccccctttgttgaaagaaggggcggggggaagttcaaatttgggggttaccctgggcctcccattagggtttgaagagggccccttgttgggatttccccccggcccccttttaaaaaacccccgcctttttgtttgggggaaaaaaagggccgtggaatttaccccccttggcccccccccccccgggggtttttacaaaaatttttacccggtttaaagggggggttttataacaaaattgcggccttccccccgaggccttttcccccctagggttttccccatttagaagggatgaaaaaagtttttaaaactttta

SEQ ID NO: 629964 - DNA, 117 bp, Homo sapiens
cgcagtattactctccattttacgaggaggaaaagcaagcaatgtacccaagtcccacagttcccatgtgtcctaggtggaggtgctggtgggggagtcctctccattcttcagcag

SEQ ID NO: 629965 - DNA, 283 bp, Homo sapiens
gctcatgcctgtatagactttggggagcgccagaggcgcagaactgagcttgggagttccgagaccagcctgaccaacatgcagaaaccccgtttctactaaaaatacaaaaaattagctgggtgtggtggcgcatgcctgtaatcccagctacttgggaggctgaggcaggagaattgcttgaacctgggaggtggaggttgtggtgagctgagatcatgccattgcactccagcctgggcacaagagccaaattccatctcaaaaacaaacaaacaaacaa

SEQ ID NO: 629966 - DNA, 540 bp, Homo sapiens
atgtagagtctggacttctaaacatcatggactttgttccgaaaaagttctatgtgctgtgtggggtaggactcaccgagattggagcaagactcagtaccacgactgcagtgcccctgacccctggcctgtggggtgccctacacctgctgcatcaggaacacgacagaagttgtcaacaccatgtttggctacacaactatcgacaaggagcgtttcagtgtgcaggaatgtcatctacgtacggaggctgcaccaacgccgtgatcatctggttcatggacaactacaccatcatggcgggcatcctcctaggcatcctgcttccccagttccttgagggtgctagcttgaccgctgctgtaccattagaccgggtagagaacatcatcatggagcactctgtcactgatgggtcctggggcccggtgccaagcccagcgtgaagaccgcaggcacgggatgctgcttagtgctaacccaattagggcccagactgccatggaagctccaacaaagaccgtctgggatagcaactct

SEQ ID NO: 629967 - DNA, 894 bp, Homo sapiens
tattgtactgcttctgtggctcttcacagacctcacggagtgtgaccggagatgagtggcgatgaccactgtttttaaaggagaacgagagctcctggtggggccctcggggatggtctcagtgtcccatttgcagtctgtcaacagtgacagcgcagccctggtccgagatgcgtggtgagctttgtattgccttctgggtcagctttcgctgtgtctcctgtgtgtgttagaatccagagcccataggaagtgcaatgcgggatcctccgacaacgggtggagcagcctcttcgcggtcgctgcttggacgacagcagtcgctgtgattcgctgtagcaggggagttgttctgaacacaacttcctgagatagtccggcgcttgtcaagtgaggtgcttgattttccctttaagacacgtctgacagtatttacctcgtcactttccagaaccagaagcagtgacgaggaaggagatattgtggggtccgtttaacatcgatagaaacgcgcagggtggatgggccccggcgcggggttcttgacccagctcagctgctgagccacaaacgccctgggcgatgcacttggctttgcttgatctggacttcgctccgtccgttcctccttcatgacccggcgggtgaactaggaaaccgttggtgataaaagagcatccccacttaccgcaattcgtgtagacaccatttgttaatgtgggagccgactgtgacagtcctgccagggctcaacgtgtcatttcacagcttggcgtacctagtcgactctagacaggatggtacttcgagagcttagggatcggcttgttgaatttacctttcagtgggcatcctaccgctgtgcatcgcatggcggaaacggcaggcatgccc

SEQ ID NO: 629968 - DNA, 161 bp, Homo sapiens
agtgatactgctggaaaaacaaaacgtttatgtatcacaatacttttaaaagtatctagccaagatttctgtaactagattatgtgtaaacttttctaaatcttgtaggagtgtcggtggtaaagaactagagcttattcctataccaaatctaccgtgcg

SEQ ID NO: 629969 - DNA, 509 bp, Homo sapiens
ctccgccttgagccccctcgctgtccgacgttccgttccccctgcccgccttctcccgccaccgcccgccgccttccgcaggccgtttccaccgaggaaaaggacatcgcatcgtatgtccgctatccagaacctccactctttcgacccactttgctgactgcaagctaacgggctgactgaaccgtggcttcctgctggcacctgacggagcttactactcacactactaacgaacttcaaacatgacgcacaaacccggcccagcggaaagcaccccttacctactgatccaagggcactcgctgactgactctaccgataacaacagaaacctagctgaagggcgctaccaacccacacaaaagcttcgacctgcaacacgacgctaaccgtggcctccaaccccacaccgaacgcaccaaacattcaccggacgccacacataagcttggggcaacccatagcgctacaactcttcaaagccactacccagtggggcccactac

SEQ ID NO: 629970 - DNA, 247 bp, Homo sapiens
agtatctcactgtgtagccaggctggtctcacactcctgggctcaagtagtcctcttctcttggcctcccaaagtgctggaatataggcgtgagccacactgtacctggcctaagtactttttttggctgggggggacggagtttcgctcttgttgcccaggttgcagtgcaatggcgtgatctcggctcaccgcaacctccacctccggggtacaagcgattctcttgcctcagcctcctgagtag

SEQ ID NO: 629971 - DNA, 233 bp, Homo sapiens
cgactctgaggatccccgtccttcatcatacctaccttgaactctgttatgtgaactgcgctggtcttacactatattcctggaataaacctttcaaatgccttctgctattatcccaagtgtctttatcattactgtatgtgccagaataatggtaatccacagttttgagtgtttaccctgtgccatgcaccattgccaagtgcattgtgtggtaagtatgatgaaggacg

SEQ ID NO: 629972 - DNA, 254 bp, Homo sapiens
  misc_feature (30)..(30): n is a, c, g, or t
  misc_feature (48)..(48): n is a, c, g, or t
tagtgaagcgcacacctaggagcaggggtngggaagtgagacggctgntcaacagcatcgtcctcattcacacagcccgatcctacaagcagctcagccggatatgccaggccctgaagctcagcagcatagggtgtaagatttcaacaaacgggttcatttctaaggatccactcatagtgggtatgattatctcatgttcaaagaaggaattaaataagctacccgtgcccatttaaacctgattcaggcag

SEQ ID NO: 629973 - DNA, 450 bp, Homo sapiens
aaggacctaggtgcggtgactcacacctgtaatcctagcactctgggaggcctaggtaggtggattacctgaggtcaggagtacaaggccaacctggccaacatggcgaaaccccatctctactaaaaatacaaaacaactggccaggctttgtgaactgtgcctgtaatcccagatacttgggaggctgaggcaggagaattgcttgaacccaggaggtggaggttgcagtgggccgagatcgcgccactgcactccagcctgggcaacagagcaagactctgtctcaaaaaaaaaaaaaaaaggaaaagaaagcccaatttagcccagtgttctcccaaagttgggccatgtgattgggcccaaagctgatatcctcaagggccgggggaacagtgagttagattagtggccaaggtgctattcctacagagggcagagcttatcctt

SEQ ID NO: 629974 - DNA, 326 bp, Homo sapiens
ttttaacaataactgtttgtaacattatgtttgtgtcaacttagagtgtcacttgtctgtatacaggtaaacactgggaccagttccggggttaatgaattaatttttgttttgtaatatttcacagtgaaaagaatcaaagtaattgtaatggctagaagagacctgccagaagattaaaaaaaaagaatgagagaaaagcccagttagtggtgtgcggacttacttcctttaaatgtcccatggatgtaggacagtgccatgtttcaagatgcctgtgagctaggtcttcaagatttatagaatgttacttatgataccgcgaa

SEQ ID NO: 629975 - DNA, 182 bp, Homo sapiens
agaggagttcaaaagtgcctcttctatatctacctgttaaaaacctctaaccctcatggtagctgcatccgtgaaaccctgtaggagtgactcgaagaagacgaaaaagaaaaagaagaagcatcgaaagagcagttcagctcgtgatgatgaagaaaagaagcatgaaaaattgaacgcgg

SEQ ID NO: 629976 - DNA, 180 bp, Homo sapiens
aggtactctataatatgtttcttcaagtactacattatttcctcttggggaaattgatgggagatgattatattcttgcagtttttttttttccctctcaccatggtttctaggatgggtgatagtcccctgttcaaaatctttaatgcactcagtaatttttgggaaggctttccagac

SEQ ID NO: 629977 - DNA, 141 bp, Homo sapiens
taggagcgttcccctggatccaattagggatgaatttattggaaactgggcttgggtcattgtggagctggtttatttttggctcaaacttacgcccctgcaatccagcctgggcgacaaagcgagattccatttcgaaga

SEQ ID NO: 629978 - DNA, 276 bp, Homo sapiens
actgctctatttgttccttctccatgtatcccttccttaggcattctacctgaaaaggacagccctcccttccttcttcatcccattggcaattcagcaaaccttaaccttctcttgcttataccacgaggttacttactactcgaacagcttgtcttcagacattaacacgctgtgtcctctgtcacgtgtacagccaggtctcaacagagcctgagacaaatggtcaactggagggcagacttgagatgtacgactctaactgactgttttact

SEQ ID NO: 629979 - DNA, 252 bp, Homo sapiens
aagcgcaggaccaagtgcagagtggactctcctggatgatgtagtcagacagagtgagtccattctttgcagtctggtcctgcgcttgagggggggtgtctaagtttccccttttaaggttcgaacaaatttcattggcacttgcctttcaataaagtcgtgggcatccccgaaaaaagagtatgccataagaaagaaaaggaaacactgttgcgcgcggctggagcggcctagaaaggagttggaaaggac

SEQ ID NO: 629980 - DNA, 1775 bp, Homo sapiens
  misc_feature (419)..(419): n is a, c, g, or t
  misc_feature (1046)..(1046): n is a, c, g, or t
gtaagatcgaggtcttgctgagagatgcgcgccaccagtgtgagtacatagtgtagggattcgttgtggcatcggccatcatgctcatggcctacgtgctgcgtctgatttatctcttagatcagtcataatgctctgaaacacgcttgacaactactatctggcagaaactatactcgcctgtaacgatgaagcactagcaggctggatgtagcagggaaaatcttccgttgtggcactgtgatgtacatcaatagtgcatcgcatgcacggcatcatatacgttacagtcgagttcgcagcgatacataaattcttggataatccggcaaatcacctacgtggaggtcctatcagttatctcctaaaagacctagtcctcctggcaacgttaacattgtgaatgtggtggtatcggngtaatgcatgttgccattgttgcgtggttagtaatcaacagtatgtaacctaagcgcatgtttaatggagttgattgatgtgggaggcaaaagaggaatccgtaaatagagatattttcctgatgcaattagtgtgctagatgtggagggagcatgtcgttataacacgtgagtggggttagttcacgcttgtggattctaccagtcattagtctttacagcatgtttccaaatttaatgtataatcaaaaaaggtctcatcaaggagtgaaagcagggccacttggagctggcagaaggagaagaggggccctggtacccgttagcgtaagggaactgggcaaggcgagagtccaagtctgtcacatttcttggtgccattggccgccgctgacatcaagggcgcgcacccccaggcgccgacagccgcgggggaagaaggcgagaacggcgcgcaaagccatggagagtcacatagaattggcaccgcccgcggtcatctaggacacaacccggcggaggacaagcggcgcgccccctctccagcagcagacacgcgccgcaccatcaccatcacattagcttcttctgctctctttgcttgccgcatgcaagctgaacaaccanccgcaccagacgaccagacatacgagacgacaaaccaatcacacacacagaacactacacatcacacacatgcgaaagcaacagacaccactggcacctcgacaacacaacagaccacacaaacgaacagacgaccacaacacacaacaacagccagacacaaacgcaggaggagagggagaggggaggagacgaagggaggagagagtgaaggaagaagtgcggacggagaagacaacgcggccacacagaagagaggagaggagtcaagcacggagggcagacagaaggagaagatagccaagacaggggagaagagagcgccagacagccaagacagccaggagaggcgaagaagacagcgccaggcacaagcagagagagcacacagcacgcgcaagcaacgaagaacgaggaggagcaacgcagaagcagagaacagacgaggacagagaaacgagcacaaggggagaagagacagagaagagacggagagaccggaggaaagacacacgagaggcggagcacgacacaagacagaccacaggagcaaaaagagacaaagaacagccaaggcacagcaaagcgcagggcgagagcgagcagagaggagaaagaagagacagagaacagcagagcacagcggagcagacacgagagaggaagaacaaagcaggcgacacaacaggcgcaagacaccagaacagaccgagtacagaagagcgcgcg

SEQ ID NO: 629981 - DNA, 1120 bp, Homo sapiens
  misc_feature (535)..(535): n is a, c, g, or t
ccacgcgtcgctcagtttttaacacattgttgaagaaaaggtaccagctttggaacgagatgctatactaataagcaagtgtaaaaaaaagaaaaaaaagaggaagaaaatcttaagtgattggatgctgttgttcttttaaaaaaaaaaaataagaattacattttcttggggttagagctagagagaatggccccaagcttctatggtttcttctaaattcttaattggcgttaaagtatagagtatgtgtcacttaacccggtggcttctggtgtaactggtggtaaattaaaaatggggtaagtaactggtgtaacctaaatctaacctccatgggatgtgttgtaaaagcgccatcatgggggaggtctcaaaatctctcaatcatcacagtggttcctctcaaactctctgtgttttaaaaaaagctctcaaaaaatttgtgggcccatactatggctaaaagtgccccagtgtggtgacacacacctaaaagacaattatatgggtcacacaacaccaaaagcgactnttgtgcgacataaactttacagagtgtgggcaaaagcacaaacacggggtgtttacaggcatacccactcgtggtctccgtgggaactctgcgggggccaagtttacagagcaccctcacttgttaaagaaactctttgagggagcgtgtaggacctcccaattaatgatttttaagaactgacaacacacagcgatgggagaagcggagcatgtgcgcccccataagtgtcatcaccaccacgaggggtccccccagaacaaacatgagggggatcaccaacacggcaaaataacattggagggacagcgaccaccggtctggacatgctggtgggcaaacacctaccgtgcagcccacgggggcaaaattagcgggaccccgataagataagaataactagggggaaaaagctccgtgtggaaaggagaactcttgtaagacagggtgtcggggcaaaacattaagagacaaaagctaatagtaagggggcggcaacgcaaacacacgaagaaagtgcgccccaacatcaacaaaaatttggacgcgagccaaacgccgtggtggaggaacacgcccccgcac

SEQ ID NO: 629982 - DNA, 349 bp, Homo sapiens
cacggtaatttgcccaggtgataaaatatgtatgtacaacaaacccccgtgaaaacgtttacctatgtaacaaaccttcacatgtaccaccaaacctaaaataaaagtttaaaaaagaaataggctgggcaccgtggctcacacctgtaatcccagcactttgggaggccgaggcgggcagatcacttgaggccaggagttcgaggctgcagtgagctatgattgcaccactggactccagcctgggcgacagccacaccctgtcttcaaaagaaaaaaatctatttgtatatatattcttcttattttaaaagaagttttaaaaatacgtatatctttatactttata

SEQ ID NO: 629983 - DNA, 195 bp, Homo sapiens
agcgtgaaactccatcctcccccctgaaaaaaataaaaacataaagggacaagctgggcacattagtgctcacctgcagtcccagctacttgggaggctgaggtgggaggattgtctgaggtcattagttcaaagctgaagtgtactatgatctcacctgtgaacagccattgcactccggccagccattgcact

SEQ ID NO: 629984 - DNA, 259 bp, Homo sapiens
ctctcctcctactttgtgtacctgctgataaggacgcggtgaacgagtcacgccgcgttgatgttcggccgctacgccgattcgctgtgtttcggggttgtcacagtcacctatccatctggctatagaggacgaggttgcccccaggacagttgctcgggtatagaccattctcctcctgtcttctctagtctttgccatctgccttctttagcgctcccagacggggcacttcttgtgctcccgggtttagccctag

SEQ ID NO: 629985 - DNA, 269 bp, Homo sapiens
  misc_feature (189)..(189): n is a, c, g, or t
atatgtttggtgaggcacagtggcttatgccagtaattccattattttgggaagctgaagtgagagaattacatcagccccgggagtttgagaccagcctgcaataatatggggagatccccttctgtaaaaaactaaaaatgtggcccgggcatggtggcacgtgctggtggtcccagctgctccggnagatggaggcaggaggatcgcttgagcccagaagttcttgaggctatggtgagcctgggcgagagtgagaccctgtctca

SEQ ID NO: 629986 - DNA, 390 bp, Homo sapiens
tttgatacgcggctctagagaggaaagtagctgggtacagactttgtttactcacccagtgaccaaatcctggccgtctgtttaggtcgttggtgtgtttgcaccagacacaatcgcagcctctgtgtgacctcagctcagcacacgacagccacagacgtgttacacatatgtgatgggaagggaggtgctgctgagatgttgtgtgtttgcaccagacacaatcgcagcttctgcgtgacctcagctcagcacacgacagccacagacgtgttacacatatgtgatgggaagggaggtgctgctgagatgctgttgtgtgtttgcaccagacacaatcgcagcttctgcgtgacctcagctcagcacacgacagccgcgtagtcagat

SEQ ID NO: 629987 - DNA, 146 bp, Homo sapiens
ttcattagcacacttgctgcctggggagtacactaccctacccttactaagtctattcaggaataactagagaattatgtgatgagatgtaggcaaaaatcgtaatatcataaagaggactcatactgctattgaaacttctaaaa

SEQ ID NO: 629988 - DNA, 113 bp, Homo sapiens
tggtagttgcgcaccttgtaatcagctactcgggaggctgaggcagacaatggcttgaacccgagagagggagggattacagggtggcatcgataaacaccgggtaccgagct

SEQ ID NO: 629989 - DNA, 510 bp, Homo sapiens
ccaggcggccgtcgcttcccagcagcggagcagcgcagcgtcggacatgttgtgaggcggcggcgcgggtgtctgaaggatggtttggccgaggcgcggcacacggctgctggcggcggcggcaggcagcgcgtgcctcgggctctatagagcggacccgcgtggttacccgccggttaccgcggggagccagttgcccctggatccttggtctgctccgacgccgtttgtgaccagtttaggcgacacgcccgcccctctgaggagacacgaaggtggttcctcagccgctcaaatttccggaccaccgcgctttcccctcctcagcctgggctgtgctctctctagaatcctcgggcccccactttcttcccaaactcatcctagatctctcacacacgcgagtttcccagccctcaagccagctgctcctccgttcattttctgcacctcttcgcaagcaccccacggatcactctccgagggcgactttttgagaaatctcggtgg

SEQ ID NO: 629990 - DNA, 396 bp, Homo sapiens
actgcagcctcaatcttccaggctcaagaaatctccccacctcagcttccagagtagctgggactacaggtgcatgccacacccagataatttttttttccccaatataaacgaggtcttgctatgtcctccagtctggtcttgaactcaaggtgggaggatcacctgaggtcaagagttcaagaccagcctgaccaacatggagaaaccccatctctacttaaaaaaaaaaaaatacaaaattagccaggcatggtggtgggcacctgtaatcccagctactcgggagactgaggcaggagattctcttgaacctgggaggcagaggttgcggtgagccgagatcgtgccattgcactccagcctgggcaacaagagcaaaactccatctcaaaa

SEQ ID NO: 629991 - DNA, 349 bp, Homo sapiens
agttcatgtcctttgtagggacatggatgaaattggaaatcatcattctcagtaaactatcgcaagaacaaaaagccaaacaccgcatattctcactcctaggtgggaattgaacaatgagatcacatggacacagggaggggaatatcacactctggggactgttgtggggtgggtctatggaatgttctaactccttttttgtgattttgacaatgttcacatcatgtttaccccaagtatattacatattatgcattcactaactcttaagactcttgatatataacacctgggttagattacatagatttataatactgcaagaaattgagccaccactttgtaa

SEQ ID NO: 629992 - DNA, 567 bp, Homo sapiens
gaaaaaaggagagaatgctacttaacaggttcagcgatagcctaatagtagaattaggtacttaatctgggttctcaaggatgaatccgtatttgaccagaaggaaagtgaaagtaaagggtagtataagcgaaagaaacagcaaatgaaaaacaaacttgagttgggatgtagcctatgaaggatggaggataggaggtgagtctagcactagacaaggagcagttcattatagccttgtgtgccttgcaaaggatcttggaacttattctgtagtcagtgagtcaggagggaagggtcatagaaagaaccagtcagaatgctatttgataaaatataagtaggagttcaagaccagactgggcaacacagtgaagccccatctctacaaaaaaatttaaaaattagcaaggtgtagtggcatgtacctggttgtagtaatcccagctacccaggctgatgcaggaggattgcttgagcccaggaatttgaggaatttgatacagtgagctatgatcgtatctacactccagcctgggtgacagaatgagacactgtatctattta

SEQ ID NO: 629993 - DNA, 177 bp, Homo sapiens
gttcctctcgggctcttaggcgctgctctaagcagcttcaccctttacaccagaaagctggcgggcactatggggaaaaacaaaacaggagaaagtggaggaggtctagagaggaggaagaggatatgtggtggaaaagttctcgaccgtcgagtggtaaagggcaaagtggagtac

SEQ ID NO: 629994 - DNA, 195 bp, Homo sapiens
tatagtacgcatgtcacattcttttggcgttatattatcatgctccaccatgagtaactagatatagttcccagtgctatacagcaggatctcattgcttatgcattctaaaggcaatagtttacatctgttaaccccaaattcccaatccatcccactccctcctcctcccccttggcaaccataagtctgttc

SEQ ID NO: 629995 - DNA, 603 bp, Homo sapiens
  misc_feature (109)..(109): n is a, c, g, or t
  misc_feature (280)..(280): n is a, c, g, or t
  misc_feature (416)..(416): n is a, c, g, or t
  misc_feature (577)..(577): n is a, c, g, or t
taacttttatagccaacaataagtgccaacattactacttgagacataacagtactgagatatattccccaagttttatggaaattgaaatcaattttttaaaactaancatatctaaatgattttagggttaaagaacttgaaataaggacatgatcaattaaaaccaaaataatgataaccactactatttattgaaaacttgtaatgcattgagaactgtacctaagattttatattaattctttcatttaatcctcccaccaatctcaagcaatangaactattcttgttattttcttgaggatgaaacacatgagatctagagaggtaggtaatgtgccaaggtgtgacacacacaaagtggatggtgtaactataattcaagcccgagaacctacctccaaaacccacangtagtaccttcctgacacctgctgctgtagtttcaaatcatactgaaaagaatgtatttggtattataacccattgaacaaacttaactgtttttaattcccaactctaaatgtaccccatctatatttttgagggggcaaccaatttcaatccaaataangcctcttccaatagtcaccggactat

SEQ ID NO: 629996 - DNA, 911 bp, Homo sapiens
tgatgtgtaccggttaatgaccgagtgcatagcaagcctgcatagatgaaactcgcaagtgtcacagctattctggagagttaataagctgtggacatttttctggcgagataataatgggaagctagaatagcatttgcgcaatcatcataacatgctctgttcaacctgtttcataattagtggatcatagtccagagtgaaggattcatgacttgctgactcccgtcaaaggctcagatgctggcagtctgtgctcccagggacacttgagtgtccgtccattggccatcggccctgagactgtgatgtgcttcggtattccttcacctaggttataaaggcagagactgactttcataactgagtccatagggagtcgttcttcaaataggtgcacggaattggcatgcgcgttaaagataggatgaccagaatgcaatggttaataacacatgagtgtggggaatgtctatcccacgcgaggaaacgttattggtaacacaaatggaacgtatagcattagttgaagggtagtacccaaggtttgaaaagaagtgttgtaagtgttttgtggcaattggaaaaattaggccagttagaaaagcgcaaagggtgtttgggatgaaccagattgttgggggggatacacaattctcggttaaagtacatgcgaaaaagtggggaattggggtactgttctgacaaacttggtttttgtgctggacaaaaatgggaataaccacgtcaggggacttggagcatcgtgcaggcggcccaagatggaggggtatctatttctggaaaagttgggtgtgaactgtaacagtgacagttttaaaagtggtgcgaaccaaatgacggaaattcgggcgttataagaatagggaaactatggagagaaaaattag

SEQ ID NO: 629997 - DNA, 477 bp, Homo sapiens
ctcttctgctttgacaaggaaaatgacattggggaggggaggtcgccgcctcccagcttttctcaaattgttcctatagatactggtattctggaaatgaagaagtaattctgtctctgcacctactcttgcggaatgttcaaggaagtattctgtgttagtatttatgccaaaaagttgtttttaaaggttttgtactcagcacatcatacaaaccacctttcttctgtcacttcagggcctcggggaacttggcgccccttttttttgctttttttatccgggttaccattggccaggtggttccccttgtttgctgtgtttaccatgtgtataccgtccggaggtatttaggcctttagtagttccacctgcggacctttgaggggggatgctgatgtctttgcccaaccccacggcctgtctcttctcttgtttagttatttccggcaataaatcatctatgagttagtgcaa

SEQ ID NO: 629998 - DNA, 128 bp, Homo sapiens
ggtctgtcatgatgacagccaaagactttctctcaaccgcactgccttcttacacacgcgccccagaacggtgcccagcgttggcctgcgtttgagcgcttctctttctgtctccatgcccctcccag

SEQ ID NO: 629999 - DNA, 107 bp, Homo sapiens
  misc_feature (107)..(107): n is a, c, g, or t
gccaggattcccgatccagagacaatcggccccgatgggcatggagcccgaaggcagtcaatcgcagaagtaacctcggcaatatccgatatgtttgacagactttn

SEQ ID NO: 630000 - DNA, 145 bp, Homo sapiens
ttcctgcattctgccccaacgcactgaacacagtccggctcttctaaacactgagcacggacctcccccatacgccacccccacatgggttctcttgtttcccaagttcctgacttgatacaacgcctgacgttcacacattcac

SEQ ID NO: 630001 - DNA, 914 bp, Homo sapiens
gcaccggagaatttgggattctcagggatgggttcgattctcatagtcctagccaaaaaaaaaaaaaaaaaaaacaaaaaaaaaactttggggaggacagaggccaccccggacaacactaaataagaaacaccctcgcgtaggcacagccgggaccccccaacggcggacagggcgcacaagtgggccaacagcgggtgtaccccacgagcaaaccacacgggaaaacagcaaccagagcgcaaggaaaaactacgcaccaaacaaagaaacaaacaaccgcacgcgcgggaaaaacaccgcgatcggtagcgccacaccacaactagcaaaaagaccaccagtgcgccgagaagaccaccaaccgaggggagacttaaaccaacaggatgagagtgaaacagaacgaaagccgacaaaaggatagagcaaaaaagaacccagcgagttgggtgggggggaaaaaaagcacgacacaacagagaaaaccacaaaaaagcacacaacaaaagaagaaacaacagagaaacaccaacacaagcaaacgcaggaacaacaagacgacggaggaggagaggaagcagcgggcgaccggagcagacgaggaaaggggaggcgggacagggcgaaggaagggacagaggcacgagaagaggcggagagcgagcgccggaaagcgcgagaggagcgcgaacgaggagagcacagagagggtcaagaggggcgacaaacgcaccgagcggaaccagtactagggcaaaggaagcggaaaaggagcaaaagagaacagcaagcaagccccagccggagggacgaacggccggagcgccagggagagccaacaggacaggacgggcagaaggagacgaagaccgagagagaggcgacaagacaagaggaaagccggagcgccg

SEQ ID NO: 630002 - DNA, 1476 bp, Homo sapiens
  misc_feature (601)..(601): n is a, c, g, or t
  misc_feature (1115)..(1115): n is a, c, g, or t
cccctttaatggggtattcacaaagcgaacacacgatgcggagttttttaggggtgaacccaccctattgtaggaaacccttccggtaaaggggatcccctcaccaacaagtgtgtgtggaacacgcaacaaaaaatatcgccacagggtcgtgtggtgttgaaataaacttggccgcctggcccccccacgtggtatacctcttatatttgacacccggggtttcctctataaagggggtataaatcccgggaaggcccccccttggggggttgggcgggagagttttcctggggccacctccgcgagggcgcatcttagtgctgtctctctcttcctgtcggtggcccaccgggcctgattggttgttctccccctcggggtgcttgtaaagtgagcccccccccccacggggtgttcccgcgctcgccccctattgggtgtgtggttatatatttggagcacttggagtctctgggcgtttccaccggaaaagatctctcttatgggcccgcccttagggccgctgcgcacaccgtggtcttctacacaagaggtggggcgccaccactcttgtgggggcttcacacaagcgtgtgtnttttgggggttcaactctagcggcacacgagagggccccccaccccccctctggagtgtttgggcgcacttttggggcgcgccctcagagcgcgctccctgctctctgttctgtagagccccgtcgagagagctctcggagacacactctgtcgtctctccccagcggcttctctctttgctctcgccctattaactctctttggggtgtttctggcgcgctttttctgtcgcggcgccccaccgcccgtcgagattctcggagaatgttgtcacgcaccgtcggcgcacccacagagagagagagctctctccccaccgcgtgggttcttctctagggggctctcacatgtgatatacacacgcacatcttttcgtggaggccccctgcgcgggagaagcagaaaacacacgctgggagagatctcaccacgcgcgctagagagccgctctatacactcttccacgcgctttggagatgagatctcgggagagcgctctggagagatgtgccnctctataggggagagatttctctctataaggtggccacactcccacgccacattatagatatattcccacatgagaaaaaatgggtccctcgcgctccacgcgcgctcgtttgatagaataaccactttctttctttaaggttataaaggggctcccacgctttggaggattctcgggctcacttctaccacggctgctaccactttctgtttgggagtataaacacacaacccacattggtggtctaatttcctcttggaattgggaggaattagaagacttctccgttggatgacagcgatgactggcttggttatggctgatccctgattggatgaaagaataaatctttggatggtt

SEQ ID NO: 630003 - DNA, 374 bp, Homo sapiens
  misc_feature (374)..(374): n is a, c, g, or t
atgagactgctaaaaaaggcgggaggtttttgtaaatgagactctgttaagaggatcgaagcaatcataagagacacacttttcccttctattaataaaaaattatacattgtgatcatataaatgccagcaattcatagagaagaacggtaaaactctccatgacctcacgaccaagagataggctagggatactatcttgatatctgcgagaggcatttaaccttttgagagtcacagatatctgtgcgaatctaatgaaagttatagggctccctgagcccataacatgaccacaattttattttttgagatggagtctcgctctgttgcccaggctggagtgcaatggctcaatcttggctcactgcaan

SEQ ID NO: 630004 - DNA, 273 bp, Homo sapiens
  misc_feature (224)..(224): n is a, c, g, or t
  misc_feature (273)..(273): n is a, c, g, or t
attttaattcaactttaattggactatagaaagattttataagcatacagtgattcacattcaaatgacctttttatttacattctccacaaaactgtttattttaaagttttaactcattaaaaatctatacatatatatgatgtatggatagggtctgggtttccccacaccatggattcatatatatatatatatatgcagattccagagaacaacctcanacgttctagccatcggtcagcatcaacctctacacaagtaagtcttcan

SEQ ID NO: 630005 - DNA, 234 bp, Homo sapiens
  misc_feature (85)..(85): n is a, c, g, or t
  misc_feature (143)..(143): n is a, c, g, or t
  misc_feature (145)..(145): n is a, c, g, or t
accccatataggggatccctgattctccagcatggtgtgtctgaggctccctggaggctccgcatggcagtttcctggaacaggntgtacactgatggtgctgagctcccactggctttggctggggacaccagaccacgttntntcgtttggggacgtactctacgtctgagtgtcatttcttcaatggcgacggattctttcttttcttttctttttttcctcccttttttc

SEQ ID NO: 630006 - DNA, 336 bp, Homo sapiens
  misc_feature (200)..(200): n is a, c, g, or t
  misc_feature (279)..(279): n is a, c, g, or t
  misc_feature (326)..(326): n is a, c, g, or t
tctagaatgtttagatcctatcttttaccacaactataaccacagcccaggtctctcaaactttagatcagggatgtccaatcttttagcttccctagtccacactggaaggaaaaaggaattgtcttggggccacatattaaaatacattaacaataggctggatgaggcattttaaaaaaaaaaatcacaaggaaaantcttcacaatgtttttaggggagttttaaaatttgtgctgggggccacattcaaggccgtccgggggggctggcatgcngggccacggggcttgcagggttagggacagctttgttggacagtttnattttccctt

SEQ ID NO: 630007 - DNA, 603 bp, Homo sapiens
tccatgtggccactttgtgccccgccggggatataatgcttgcctgggggggtgttttgggagcgcagcttaaggggcggtgacatgcgtgtgcccagctgggggtactcgacgcggttgtgtcgggggctcctcgcacagcggggtgctccccgagtcacagtggttctctgcgaggggtctcctcgtttcacgcctgtgtgttacaagccgcgcgtgtagccccccccgcccgttgtacctgtcggtggggaaaacgtgcatgtcgtagtctcggcccgccgtttttgcccgctaggtgcatatccgcgctcgctttccctggctcgccggttcttcattggctttggtggcgccgccgcgctctttgttggtcgtctcttgtacttttctgggtggcgccccccccccctcggtggtgctcacgctcgcctcccccccctcctcactttctcacccaaggtcacccctctttttcacactacgccaacccccctctaggttaaacccacgatatcccccattgtctccactctttttctcctctcttctccccggcaacacttatatacccgggttttctcctcccaacattaccaaaaa

SEQ ID NO: 630008 - DNA, 227 bp, Homo sapiens
  misc_feature (21)..(21): n is a, c, g, or t
  misc_feature (90)..(90): n is a, c, g, or t
  misc_feature (117)..(117): n is a, c, g, or t
  misc_feature (121)..(121): n is a, c, g, or t
tttaaatgataatcttattantgaagcatcagttagaataggtatactgttgtaggtacttatatgcacatgattaagtccactaatcgnttctgattatcttctgataatccgganattntctcatcacagggaggagtctgatgttttttaaaaatgtccatcttggccaggcgcagtgtcacgcctgtaattccagcactttggaggccgtaggtcggcggatc

SEQ ID NO: 630009 - DNA, 271 bp, Homo sapiens
gtgatggtggttgtaatgatggtggtgatgatggtggtgatggtgatgatgatggaggtggtggtgatggtgatgatggtggtgttataggtaggactagtgttgataatacaattattgtgggaagtaattttatttgttttgtgtgttcgaattgtcatttcatttctatgtcgtcggcgcatgggaacatagtcagtgaggaggagtcggctagtcgtatgtagaaatagaggcttagcagtgctgtcatcgctatgacgtgtcggca

SEQ ID NO: 630010 - DNA, 445 bp, Homo sapiens
  misc_feature (3)..(3): n is a, c, g, or t
  misc_feature (27)..(27): n is a, c, g, or t
aanaaccctgttgccctcccaaaattncccacttggaaatataattttcctttaaaatcgttaagaatcagtttatacactagagaaattgcctaaactcctaagactgccctgaaaattgacctttacagtgcccaagttaaagtttaccttattctcggccgggtgcagtggctcatgcctgtaatcccaggactttgggaggccaatgcgggcggatcacgaggtcagatcaagaccatcctgccaacatggtgaaaccctgtctctactaaaaaaaatagaaaaattagctgggtgtgcggtgcacgcctgtagtcccagctacttgggaggctgaggcaggagaattgcttgagcccgggaggcggaggctgcagtgagccaagatcacgccactgcactccagcctgggtgacagagcgagactctgtttcaaaaaaaa

SEQ ID NO: 630011 - DNA, 139 bp, Homo sapiens
ctttactgcagagaatgctggctattacaagatgcaagctattttgaactggcgaggagatacgaagagaacagggccaacgtcatccacgttctaagtttcatcttttattatgaagacaatcaagaaggaaaataag

SEQ ID NO: 630012 - DNA, 484 bp, Homo sapiens
agtgcagacgtctggtgatgtatttattatacgaatgggggctcaactcgggagtactactcgattgtcaacgccaaggtagtcgcaggtcgcctggttctaggaataatgggggaagtatgtaggagcttgaagattagtccgccgatagtccgtgtactcgttaggttcagttaccacttgtgtggccaatttgactttgtatggcccagcagagccgtgaattctgaattcctggctctctggtgtgagttatggctggtggcgcgtacaccatgtcaatacggtcaacgcacggtgtctctaagcgcgagctcacgggaggacagtaaacctccctgtggagcagaagggcaaaagctcgcttgatcttgattttcagtacgaatacagaccgtgaaggcggggcctcacgatccttctgaccttttgggttttaagcaggaggtgtcagaacagttaccacagggattactggcttgtg

SEQ ID NO: 630013 - DNA, 344 bp, Homo sapiens
tccataatgtgtgccaaatattatggatgatgttatggttaggctttgtgtccccactcaaatctcatcttgaattataatcccgataatcctcatgtgtcaaggcagagaccaggtggaggtaatggaatcatgggggtggtttctccgtgctgttctcatgatggtgagtaagttctcataagatctactggttttataagaggctctccccactttgcacagcacttctccttcctgccaccttgtgaagaaggtgccttgcttcccctttgctttccaccatgattgtaaatttcctgaggcctccccagccatgatgaactgtgagtcaattcagcctc

SEQ ID NO: 630014 - DNA, 131 bp, Homo sapiens
cccagaggactcccaaccctggcgcggggccaagaaacagccagcaagagagaggggccagagggcactgggcaggacggccaacgaagccgacacgggccccggcccgaacttgcagcactagctcacta

SEQ ID NO: 630015 - DNA, 720 bp, Homo sapiens
tatctactaaatggtcagctgtcactacattgatactttcgtatgccacaaaccctttcattcctccctgggaatcagggtaagatcaggagtgaactggggcgtggactataagaccacgctcagtatatccagtctaagctgcgaggtacgggtattcctgttcttctttgggacctcagagatgtagagcatttgtagcagctcacgcaaaatctctggctatgaaagggacttcatgaccatccagtccaatataacacttgcagacagagaaactgaggtcttccatgacttgccatagtcgtccactagctagtttagatggcaaaactggattcccgactcgtggtagttgctgttgcgtatccctttgacatcatttggcccgttccgtttataatgtccgtgagagaccagagactcagcaccagaatcgattattcctcaggtgaacgcattagacgtcgttcatggataagacagatttcacgacatcagagatagagatctcttgctatcaatcaggtcacggggcagctccatgtggagtcctgcccaaattaatgtcggttccataaagatggcaaacaagtccaggctccttgcgcgtaatctcagacgcattagactccctaattgccagtgaagcaaggaggtggatctcatggaaagctacactgttatgaagcgtcaatcgactggagtactaatactcaa

SEQ ID NO: 630016 - DNA, 425 bp, Homo sapiens
aaaaaacccttcccttttttattaatgggacccccaaaaaaaggggccaaatgtttaaaaaaattttttttttttaaaccggggggtggttttcccccccccaaaaaaaaaaaccggggaaaaacccttgggccctcattttctttttctaaaccccaggggggggggaaaaacaaaggggccaaaataagttttttttggaaaagggcctgggtttttcaaaccttttaaaaaaaaggcccaattacttaaaacatttttttgggatttccccccgggaaaacaatttaagcctggcctaaaattacggggggggaaattttttgtggggctagggagggggaccccccaataaatggtgctataaaaagaaaagtccttttaaagctcaacctggtgcccaaatggctcccaggggaaggggg

SEQ ID NO: 630017 - DNA, 304 bp, Homo sapiens
catgtcatcatagctgaaataacttaatgtcactacaagatgcctgtaatccttatctgattagcaaagcacgcagctctatctacgacaacaatgtcccctctttaagagtaagcaggaatagcactggctattgtggcaaatccatataagtatatcatggcttcttctgtcttcataaattttgccaggcggtcttccaaatccaaatgaacatcatctgtgccatacaatcctctgggtccacaagtcccctcgccatacttcttcagagatgctcatgctgctgcctttacccgagcgc

SEQ ID NO: 630018 - DNA, 357 bp, Homo sapiens
ccaaccctaagtgccaaatgttaatgaagtgacttatggaacaaacttaaacaaagtatggcatacctatacaatttaaacaaaatgtgttatgtccatacaatagagtagtatttagtcataaaaaaagaaggaagtgctgatacatgctacaatatggatataccctgaaaacattataagtgaaagaagctaaacataaaaggccacatattatatgattccatttatagtaagtgtccagagtatgcaaatctatagagacagaaagtagattagtggttgctaggagctgggggaaggagagatggggagtgactactaacaggtttgagttttcttttggcatgattaaat

SEQ ID NO: 630019 - DNA, 936 bp, Homo sapiens
  misc_feature (137)..(137): n is a, c, g, or t
  misc_feature (148)..(148): n is a, c, g, or t
  misc_feature (339)..(339): n is a, c, g, or t
  misc_feature (519)..(519): n is a, c, g, or t
  misc_feature (527)..(528): n is a, c, g, or t
cttgagagtcaccctccagtgaaaagaactctttattgaggccctgctgtgtaccccatgctgttctaggagctggggatctagcagtgagttagacacacagggtcccagtgctcacagagggcatatcctcatgnagagagacagncagcagacaaggtcgcaaatatcagagaatagacaggcataagggccatgtgctggagtgaccagctggtgtgcgggaaaggcctttccacaaaggtgacatctccgttgattcttgaatgttcagagggtgctgctgtctgatgcttggaaggagggaacagtcagtgccaggaccccaaggggagaacntgttgatgggatgggattcatttatgctcgggagaaagagacttggtttattggacgcctgggttgattttcttctcttctgcatcctctgcactgacatttgcagctctgccttctccccgtcccgtctctgggtgaagaacacctgtccgatgctcgctggcctgcagctgctgcagngtttcagnnaacagggctagcaaaaaacaaagcaaaagcccaacatcctccagctggcccccaaggtgctgggcttacagtgttgtgcgccaccgcgcctggcccagtgtgtcatatatttaagcaaaggttattattgcctgctgtttgggcctgcctgttgctgttcggcccttcctgctcccatggctcacgaagttgagctttcatttcacatgggcccgaagttgctttctctaggatcagccacccagacttgactccttccatccccttgtctcctttccccaaaggaccctatatggagagaagcggggccactttgactaccagtccctcttgatgcgccctgtgcacggctccgtcagccagtgctgcagaggtccatcatgagcatgagcaatggactctgatagc

SEQ ID NO: 630020 - DNA, 545 bp, Homo sapiens
gagcaagagaaggcagaggctaagacccatcccgtatctgctctcctgaaataattctggagtcatgcctgaaatgccagaggacatggagcaggaggaagttaacatccctaaataggagggttctggttactggtgccacgtgggcttcttggcagagctgtacacaaagaatttcagcagaaataattggcattgccagttgggctgtggtttcagaacagagcaaggaccaaaatttgaaccaggttcaatctgttgggattctaattgccaggttcatcaaccatccattccatgaattttttcaaggcccccatgttaatagtaccatttgtgcaagcagaagagaaagacccagatgttcgtcagaaaaatcacgccagtatgctggccttcttcaaacttacactgtggcattgcttactggggcacatttacgccaaaagggaaagccacgccctgcttgcttcggcaacgcattctcttccatcgttacactttaggcttccagcatttcactgtacttctcgactggacacaaa

SEQ ID NO: 630021 - DNA, 2937 bp, Homo sapiens
  misc_feature (51)..(51): n is a, c, g, or t
  misc_feature (67)..(67): n is a, c, g, or t
  misc_feature (94)..(94): n is a, c, g, or t
  misc_feature (116)..(116): n is a, c, g, or t
  misc_feature (168)..(168): n is a, c, g, or t
  misc_feature (264)..(264): n is a, c, g, or t
  misc_feature (359)..(359): n is a, c, g, or t
  misc_feature (400)..(400): n is a, c, g, or t
  misc_feature (442)..(442): n is a, c, g, or t
  misc_feature (532)..(532): n is a, c, g, or t
  misc_feature (626)..(626): n is a, c, g, or t
  misc_feature (755)..(755): n is a, c, g, or t
  misc_feature (873)..(873): n is a, c, g, or t
  misc_feature (993)..(993): n is a, c, g, or t
  misc_feature (1286)..(1286): n is a, c, g, or t
  misc_feature (1557)..(1557): n is a, c, g, or t
  misc_feature (1672)..(1672): n is a, c, g, or t
  misc_feature (1766)..(1766): n is a, c, g, or t
  misc_feature (1786)..(1786): n is a, c, g, or t
  misc_feature (1991)..(1991): n is a, c, g, or t
cacgctagcctgagctgtttcgtgctgtgcagctgagagtagcacacacgnctgtgttcgatagctncgagagagaagagctacgttgtatgtntgttacgacgacgacgcgaagnactatagcacgtagtctctagtcacgttatgcttatcaggggtgagtagagncttgctatcgcgttgctagtacttaagctactatggcatactaacttctagcatatagagttgtaagcttaaactgtgagaatttaagctcatctnacatgaaagacgtcgacatgcctagtcgtgtgacagtctcgatctaaacgtctgacgagcacgtcatcgtgagtctcgtgtgtgggtgtgagtgnggtcggagcggagagcaagtacgctagcagactaggtgatngctatgttagaacatcatactatgcgactaacagcaaggagngtccgggtgctgtacgcacactgctcgctcatgaacgtgtgttcgtacgctacactctagctctagtgttgtgtctgtgattgggggcgngatcgtcatcatgtgctacagatctagtagccatcgtagcgcgtggagcgtgagaggtaagatagacgagacgacgcgtagttgcgtgtacgcngagtcgcgtgggagttgtagagacatcacagatgcaactcagagcatgatggtgtagtgtgtgatgtgacagagcacgagcggcgctagagagggatgtgtggtgcgtatggtgtacgcgactgaggancataggcagcagaggagcggtggcagaagaagacaatagcacacgatacgagcgcactgtgttgtatggatgtagcggtgtagcatgaggcgttgctcgtttttgtgtgcatgcgtgnccacggagtagtgtagtctagcacagtcaccgcaatcaactacgcaagcgggcatagtgagggtagagatgacgagagtgcatcgatgcttgtcgtctattgtctggctcttctatgagngcatggtgtgcccgtactaacactacaacactgatgagcgattggttcgtagtgttgcagtgcaggatagagcgtcgcgtagctgacctgtctgcgtgtcggtcacggctatgacaatagacgagggtactagtaaggactgtgcgatgctagtgtttgatgtagagtcaggcagctgactccagacgtgtcacgactggcgcgatgcaccagctatagctgaagctgtggttgcgttaggttggtggttgggtggttcagacgtcagctaaacagtcaagaggtcgagtagngggagcgtagagtgtggtgacgcgcgaagcgaacgaagagtaggcgtgtgtggtgtggtaggccgcacgacagacagcagaagaggttagtagggtgttgggctagtgctggagctatagagtagagagctaagagcctcttgcttactttccttgcaagattgaggtatgagtagcgagcaacgagcgcacgtcatgcgttctgacatgagtaggtcgacgggtcctgctgtggagagcaggagtagagacgttgtgtactgtacgacgntggagagggtaggcgagcacacgggtagccagcaggagtcggtgttgtcgggccgagagtgaccggctagagagggacagtagtgaggagtgagcagcactaacagccgtacgtnttgtgcgtgacgtcgcctaccgttagctcgtgtcgtctcttcctgccatcacatcagacctagtgtagttggtcgttagctctacagtctggtnttgcgtcgtacggtgtagtntcatgcagtcaagcacaccagtagctaggtgtctcggcagtgcatacactgtcaaacacgctatactggtgtgctcgtttagttggacggcggcacctcccgacagctgaccatcgctacagtcatcctgaaatgatagtgttgctttgcgtcattcactcacatcgcatgtttgcgtttcggagattcaggacgctcgcagctncctacaatcctacgtctgtctatcaatcgtctactacggccatctactacacaacaagacgacgcgtctgttgtggcgcagacgtgtggtgggctgttcatgcattcagcaagcatacgactacgtacttgctacgacaacgacggtagtgagcgagctactgctctactgtcgctgcagcggcagcatatgcatcatcgctgctgctgcgcgtctcgtctcagtccacacagcgcgcctactgtagatgcagcagctacgcatctcttctgcgtagcagctcaaccacaacaacgacactactactatgtcgctgagcgacttgtcatgctgctgctgcggtgctgctgctgctggtgctgtgggcagcactcgcggcgctgctgtggtggtagtgttgcgctgctgctccagcacgcggcggtgctgcagggccccacaacgcagcgctggctgctgctggtgagacaacacacacccacacagcaagcagcagagaagagagagagatagtgtgctgctgctctctcgacacacacacgcagagagaggtgtgtgtgtggtgtgtgtggtgagcaccacctctctctgttcaatgaccctactcacatacagagaaatgtgtttttgtcgtgtgcgctcacacacatagaagaccgcaaccattagctcccacaccatcacacacccgcctgatggtatatatacacacacacagatgaagatcacacaggggcgacatacgactgccactcgttgcgacacacaaatcattctcggtgggcgagggacgaaagagagtgcgcccaccttcgaccactcttctcaccctcttctttgttacccaccacctcccctcttataaaatcttcttgcttctcttctctctcaaaaaataatattaatataaaacaaaaaaaaaattaaacaaaaattaataaataaa

SEQ ID NO: 630022 - DNA, 585 bp, Homo sapiens
cagagtttaaggggccttccagcgtgtgtcccccaaagggtaggcaaaatctggtcaaccagttgggggattttattagggcccggggcaaaacccccccacccccaggtgggtcaaggttctgggggacccccaaaagtattaaaataaagtgaagggggtgggcttttagccctttttgccccctttgcaaacagtggcccaaaacaagggcccggggcccctttaggatttttttcaagggctttgggggttttccaaaaaaaaaaaaggccccctcctggggggttaaaaccggccggtttttttccccccggggggaaaaaatacaaaggaaaaaataaaaattttgggggccggggcttagggcacccaagggtggttccactataaaaagcttgtccccctggggtttaaagggttggggcctttcccgtttcccccaaggccgggcccttccccggggggattttggttttaacccaaaggttccccagggttttttgtttcacccactttccccttttgttttttttgggggaggttttccggccgccttcccccaaaaaactttctttttgggga

SEQ ID NO: 630023 - DNA, 739 bp, Homo sapiens
gcccggtgtactctgttcaacatggccatgctatccaccatggtggtgcatatcctgggggtgcgcccccacacccaaaagtggtcacatgtgctgacactgctgggccatctagtcctgtgtcctttgcgccctgtcactgtggtcacttgagtgcttcgttactcgctttgcgttgcgtggctagcttgccaagcttgtcgtccgtcgtactcttttgcagcatcatcacgcgtccgttccataggtcttcctcatcttcactctgtgtactggtccatgcggggtgcagtgcccgggtgtgtgcccatccccttctgaagagctattcagacagcggcaggctccccatcagttcgggcagcacctcgttcagccgcatctagggctctcagtcgcacactgcccatgtgatgagagcagatgattcggcctcgtcagtcactatctgcactgtggctcggctcgaacgtcccgttggccagtcccaggccattcagccgcatattttggaaagcccagtgaccatggtagagatgggccgtctgccttggtgtggacgggtctcccgggttggcgtttgtgagattgggcttggggacgtactcggctctcactcatgctcccacgggactcagaagtgcgccgcatgctgcctagggtacttgtccccacagtctgtcccaaccagctggaggcctggtctctcttacaaccctgggccagcctcattgctgtg

SEQ ID NO: 630024 - DNA, 448 bp, Homo sapiens
aaataatgaaaaaaaaatgtgggatttattttagcccctctgagtgggctgtacttttctcaacggaaaaaaaaaatgcccttggtccttgagacaaaagatttaatatacaaccatgtggcctcaggctgaccagatcaaagtggtttttaatccattttacatgtcaagtttaaatgaaccagactgcctgtgactttataatttaaaaggtaatacctgttggtgcttttttaacccccatgagtaggtaaagcaaataataactcccaaagtgtggatttttgaaaatttgaatgttttttcattcccaaaagtatcccttctacccctatttggggcagggctgaaaagtcatcattaaaggttctgttttttggggcttacaagttctatgttttttaaaattcgctgattaaaaattttaaaaaaatagggtcccccctga

SEQ ID NO: 630025 - DNA, 390 bp, Homo sapiens
tgtctgtttaaatagtacgcacctttcaaggcccagttaaatgtccattgccagcacttatgtttacctaatgagtccagtcagatttgctcttctccagaatctcactcacttgcactaacccatatgctcatcttgcgattatcatgtagcaagtgtctccaattcaggtctacatgttccagctagcagccagcagcatgcacctcttcacactggtttcatctggcctaacaaaccagacttcatttttcccaacatgccaaagctgagtcattccagccagtccacttgaggcactttacaaatcattcgccagccccaacccacgcggcagtgtcccgaccttctatcatcttactcagctgcaagtccatctagtccttttac

SEQ ID NO: 630026 - DNA, 244 bp, Homo sapiens
gttaaaaaaaccaaaacaatgttttgataattcaaaccatttagttttgctggatgttttttcccatctctactaaaaatacaaaaattagccaggtgtggtggcgggcactggtagtcctagctgcttgggaggctgagacaggagaatcacttgaacctgaaagtggaggttgcagtaagccgagatcacaccactgcactccagcctggtcgacagagcgagactctgtttcaaaaaaaaa

SEQ ID NO: 630027 - DNA, 581 bp, Homo sapiens
atatcacctaagcataatatcaccatgggactatcccctataccttctgcatatgaattacctagaaatactttgtcaaggagagccgcagcatagactcccgataccagacgagctacttatgaacagctataatagcacacccgttctatgtcgcatacatattgcgaagatctataggtggaggcgacaaacctaccgagcctggttattcctagctgctgactatgtaatcttagttcaactttaaatttgcccacagaaccctctaaatccccttgtaaatttaactgttagtccaaagaggaacagctctttggacactaggaaaaaaaccttgtagagagagtaaaaaatttaacacccatagtaggcctaaaagcagccaccaattaagaaagcgttcaagctcaacacccactacctaaaaaatcccaaacatataactgaactcctcacacccaattggaccaatctatcaccctatagaagaactaatgttagtataagtagcatgaaaacattctcctccgcataagcctgcgtcagattaaaacactgaactgacaattaacagccca

SEQ ID NO: 630028 - DNA, 124 bp, Homo sapiens
agttaacttttattaaaacatatatgagtgtggaaagcacatatattaagtgcagatcagtccctctttcagtgtgggaagagagcaaaccatgttgattttcttaaattcactccttaagaac

SEQ ID NO: 630029 - DNA, 347 bp, Homo sapiens
  misc_feature (58)..(58): n is a, c, g, or t
  misc_feature (74)..(74): n is a, c, g, or t
  misc_feature (115)..(115): n is a, c, g, or t
  misc_feature (157)..(157): n is a, c, g, or t
taccctgagagaccgtgttgcaatgctcttgatgtgccagctgcttttaaaccacatnaatcttgaggctatcntacatttatctggcttctctgatgttagcttctgggctatnatttaagcttccttttatgtaactgatgcttataagcttccnaaatcgctgtattttattacttgaagattttagcaagattgagtatatcaaatatacactctggggaagggtacttgctcatattctgctctattcatgtttatttggaaaatgttctatttgctttttcctacagtcacacagcccctgtacacaaactctgaccattgcaacacgtctctcagggatc

SEQ ID NO: 630030 - DNA, 163 bp, Homo sapiens
  misc_feature (65)..(65): n is a, c, g, or t
gcccgggtcggcgggactaggcggacccggccggagcccgctggggcagctgtgcctagcgacangaaagacctgcgccagccctggatcccgctgcgtgggagagggcttcggggatccgactggtactggacacccccccgatcacccgcagggagccaag

SEQ ID NO: 630031 - DNA, 987 bp, Homo sapiens
tccactggtccagggtttatgggggggtttaagtgggtataacactgggatagtgggtggcttggttggtttgtaaatcttttaacttttatatgggtattggtacactactggttattattgttcacaaaataagatctcttgggaagatattatgcacaagacatgattatgggatttatacactgggatccccaggtatgtgactcactggggaaaaaattgttgggactaggcttgtccagtgaagggacgccaggaatgtttattataacacaccggtaaactatccaccgggctcagggggcaaatggcagtactgtacagctattgggcagtgggtgctgtcaagaggtgggcaagaatcttattctcacatctaaaccatgttgaagatctacacagagattaatcacctatccagaatcggggatatagctgggggattttacaaaccattcttatttctaacttcaggagttgatggttttccccagtccattcttaaaatattactggttaaatcacagatcagataaaagggacaacttgcacaacctccacctagaatcctgtgtgtagcctagacggtgaatgattatgactatcagaagactttaaaatggcagctcctttgggatcccccaaagtgtttctgcactcttcttcaaaggggcctcttcctcagaagtcagagtcactttcacagggtctgagattccattctgtcccaaaatgcagggaccacctaggaagacatcatccttatatccgaaaagaccccttatcctggggaacacgtggggtgcaccccgctaaagattttttgaaaatactctcttggacaaatgtgtctacagaggatttcaaatagccccgggatttgttcccttgaggttgatccccttataggggtttcaacacctgttgataacttcttcacggggcatgatattaaaggccctaaatgggtggaagttaagagac

SEQ ID NO: 630032 - DNA, 1176 bp, Homo sapiens
  misc_feature (739)..(739): n is a, c, g, or t
cgaccgatattagcatgctccagcctcttgtcacgttgatgccctgtgcttgctcggtaacggtgctgggtccctagcacgacaagaaggccctcatcatatacgcgctcgctcaactttggacctcacaagcctccataactctgagagaagcagtacacgctatgctactgagatggttctgaagaccaagtagtcgtgaccgcccatgacctagttcatccgaaggagttctatctaatgccttataaccacttggctatctctacgcatcgtctatcctcagtacgcaacatgcacgcgatgcgtggtgtggtaactacacgcacagcatggatttaccacgtgcaagagctttatgccagtactcgttagaacagagtgtgctagtgaagactcagtttaggacacgttgactcatgaagatgaacgaagattggacgttcagtatccaagaagtcaatgagagaaggcacgaactgctgtaggaccctagataattcacattggctactatacgactgcctccctaggaggatcgtcatacacagataagccagggaaagaggaccctaaggcggaacagtagaagaagatctggaagtgcatcctgagcgcatgagatcgcacgttgtatcactctaattcgttcgtaagggaacaggttcgccacaggaggattcacctggggggaacgtttgtattagcacagacatagaggaactaaaacggtgtgttntcacttggtgcagggctttgtctattgcgctcagtctttaccccttagggtgtccaaggaagccaaattagttagatgcaagcaatgtcagcgacggtgactagtgtagtggaaccgaagaaaatgtgaatgaaatggcaatactgcagagcttcggtcacacaaagcggagcccccaatttgtggcaaaactgtccggattgcgtgggaaaaccctgcggcaatcggaaacctctatcttcccacggtcttccaccctgtcaacccccttctaaaggcgcttggcaaaatctcagcagtaaccacttcgttaccgttccccctgcctccttgacaacctcgcgccccaaggccttttccgggaaacacccccctgtgtggagaacctgtagcgacaccagcagcggtgtgggcatgcacctgttcgccttggtgca

SEQ ID NO: 630033 - DNA, 443 bp, Homo sapiens
  misc_feature (443)..(443): n is a, c, g, or t
gccttacaatcatggcagaaggtgaaaggcatgtctcacatggaggcagacaggagaagagagcttgtgcagggaaactcccctttttaaaaccatcagatcttgtgagacttattcactgtcatgagaacagcacaggaaagatctgccctcatggttcaattaccttccaacacatgggaattcaagatgagatttgggtggggacagagcctaaccatatcattcagcccaaatctcatgtcctcacatttcaaaaccaatcatgccttcctaacagtcccccaaagtcttaactcatttcaacataaactcaaaagtctataatccaaaatcttatccaagacaaggcaagtcccttccacctattcagaagcaagttagttacttcctagatacaataggggtataggtattgataaatacagccattccatggggtn

SEQ ID NO: 630034 - DNA, 93 bp, Homo sapiens
ctagaagattcagcaaagtacttttgtgctcttggggaactaccgcgctacgtacgtcgggactgggggagcaagtacaccgataaactcact

SEQ ID NO: 630035 - DNA, 193 bp, Homo sapiens
tgtactgggcatctgccgccgggagagtcggcgacgccgccagcgtccgcgcgcgaactgccgtccatggcacgtcaggtcggcgtgctgcccgagctgctcgagtctcgcccgctgcctgcgccgtacttttaggcgagtgcggaggtcgaaggcggaggggaagtcatgcgcggagcgtgcagcctcctcg

SEQ ID NO: 630036 - DNA, 155 bp, Homo sapiens
  misc_feature (96)..(96): n is a, c, g, or t
ccacatcttatgccctcttggccctactgcagctaaaagactttgactttgtgcctcccgtagtgcgttggttaaatgaacagagatactacgggnggtggctatgcctctgcctaaggtaattccaagagggaggacccagccattagctttaa

SEQ ID NO: 630037 - DNA, 283 bp, Homo sapiens
  misc_feature (40)..(40): n is a, c, g, or t
  misc_feature (75)..(75): n is a, c, g, or t
  misc_feature (185)..(185): n is a, c, g, or t
  misc_feature (233)..(233): n is a, c, g, or t
  misc_feature (255)..(255): n is a, c, g, or t
gggacaacaggcttgcaccaccctgcctggctaatttttntgggttttttggtagagacagtgtctcaccatgtngccaaggctggtctccaactcctgggctcaagcagtcctcccactttggcctcccaaagtgctgggattacaggcgtgaaccaccacacccagtgaggataattattttnattgcctgtaagtttaatattctaagtagacaatactttttttcactnttttcctccttttaaaaattgngatataaatttagtgaaacttgtatatc

SEQ ID NO: 630038 - DNA, 559 bp, Homo sapiens
acacagagactaacagatttctccatgtctcttccctttaagagctaaactaagtagtgatcttggctggatcttagattagcaaattaaagcgatcaagagactcttttttggtacaggtggtaacaattaagaatatggtttatactttaccattacactgtgttattcatactaatcttacattgcatttgcattacttatactattcttgtacttcagagatgctgttgtaagtattcaggggtgaaatgtcattcctacattcaaatagattaccaacaccctattcactgtgtccatatcatgagaacgcccatgtgggcaattgttttttagtagctgagcagtctgcttgctgtataacccatgatcgtatcatagtctgcctggcctttgagttctgcagccctctgtggagttagggcaaaaaggaagagtgagaatcgagttagggaatgaagagcaatcagctcttaagatgtatctggttaaccttatctttttttttttttttttccttttttggagacctagaattaggagggagtccattcgg

SEQ ID NO: 630039 - DNA, 182 bp, Homo sapiens
agtaggtgcaggtacaatagccatcatattgagaagacaacaaacaagtcattgacagctgcctggggactatacaggggagcagggagattagaatatttaaatctgtatatcccctaagtattattttcttatattttattttttagagctgggatctctctaggctggtcctgagatcc

SEQ ID NO: 630040 - DNA, 524 bp, Homo sapiens
taagccctcactacagaaatcataacacaaatagcagaaaaatcataaaagaaataaccaatgctatactagaaaatatacatttgatacaaaggaaagcagtaaaaaaggaatttaaaaaaaacaacaaaacaactagagacatataaaagcacaaaatatataatggcagataggaatgcaaccgtatcagtaacattaaatgtgaatggactgaataatccaatcaaaaggcatatattgacagcatggatacaaaaaagaaaaaccaactatatgctatctacaagaggtatataagattcaaagaaagaaatgggttgaaagtaaaaggatggaaaaacatacgtatgtaaatatcaatgagaaagccggagtataaatactaataccagacaaaagatatcaaacttcaaaaaattattagcaattaacatgggcatattcacaaggataaaaatcatcaagtcataaggataataaaactaggcagataaacaaaagaaccctaggatcaaaacaat

SEQ ID NO: 630041 - DNA, 503 bp, Homo sapiens
cacgaggctccagcgccacggtgtagggcacgcggttggaatggaacaccaggtccaccagccggtaggtggtcagtcgccgtggcggcaggatcagcccgtagggtgagatgtcggccagcccgatgtggctgcgcccggccaggggatggtccagcggcatgatcagcagcgggtcgaagttgtacaccggcgcatagtcgaggtcgttgggcacgtcgagcatcgagcccactgccaggtcgaccgcatccgagcgcagcagcgccaggccgtcgcggccggtcacgttctccagcgccagctggatctccgggtgttgctggctgaaccgacgcaccaggtcgggcagcaggtagaggatcgtcgaactgccggccgccacccgcagctcgcccgactcgatgccgcgcatgcggctgcggaattccgcgtcgataccgtcgatgccctccaccagcgggcgcgcgagttcgtacagcgcctcccccgcgtgggtgagg

SEQ ID NO: 630042 - DNA, 262 bp, Homo sapiens
  misc_feature (54)..(54): n is a, c, g, or t
tggatcgcgcccatcatgaccatggacagagcctttttcagcctgcacacgcgngtcgaaaccctgcagcaggcacgggaaaccttcgctcggatcgccgttggccgaggcagtgcccaagagcagaagcttcgggctgaaggctttggcgacaaccaggtctatccgtttgaaattggcgagaacccggcgcaactgctgctgatgggacgggtcgacgcctggttcaacggcattcccgaaacccagagcatctggcgcg

SEQ ID NO: 630043 - DNA, 174 bp, Homo sapiens
cggtttcaaagagtaggatacagtaccatcgccatcggggaccccatgtgcagaccagagagaaagcagcatctgcaagccatggacagaggcctcagaagaaaccagcccactgacaccttggtctccagcatccagcctccagaactgtgagaaaatacatttctattgtct

SEQ ID NO: 630044 - DNA, 103 bp, Homo sapiens
cgactagcattctcccctatggaaatcagtcataggaggagatgatggctggtgttataggccagattatagccaatccaactgacctagtgaaggttcagat

SEQ ID NO: 630045 - DNA, 485 bp, Homo sapiens
gatctagcaggatcttttttgcggctgctttccatcataggcctgtgaggctgaggaggaaaaaatgatttcatgccctggacccaggacccccttgctgtttgcagcccagggacttggtgctctgcaccccagcagctctggccatggctgaaaggggccaaggtacagcttgggccgtggcttcagagggtgcaagccccaagcctttgcagcttccatatggtgtagagcctgtgggtacatagaagtcaagaatcgaggtttgggaacctctgcctagatttcagaggatgtatggaaacgcctggatgttcaagcagaagtttgctacagggctggggctctcatggaggacctctgctgggccagtgcacgcacggcaactggggggtcagactccctactagtgcactgcctacctggagctgctacacagaggccccccatcctccacaatggtacatcccactacagtttgccct

SEQ ID NO: 630046 - DNA, 317 bp, Homo sapiens
  misc_feature (75)..(76): n is a, c, g, or t
  misc_feature (84)..(84): n is a, c, g, or t
  misc_feature (116)..(118): n is a, c, g, or t
  misc_feature (122)..(122): n is a, c, g, or t
  misc_feature (143)..(143): n is a, c, g, or t
  misc_feature (146)..(147): n is a, c, g, or t
  misc_feature (161)..(161): n is a, c, g, or t
  misc_feature (175)..(175): n is a, c, g, or t
  misc_feature (180)..(180): n is a, c, g, or t
  misc_feature (189)..(189): n is a, c, g, or t
  misc_feature (197)..(197): n is a, c, g, or t
  misc_feature (207)..(207): n is a, c, g, or t
  misc_feature (214)..(214): n is a, c, g, or t
  misc_feature (226)..(226): n is a, c, g, or t
  misc_feature (253)..(253): n is a, c, g, or t
  misc_feature (305)..(305): n is a, c, g, or t
tagaaaagtattaaaaaaaaaggtggtacggtcggaaatacgggaaaagcagcttgcgcagcatgaaataagaannggaaaaangggctgctgctgacacacacccaatggaaaannnaaanatccaaggtgaaaaaaaaaanaannaagtggtaaaaaanaaaaacggtccgcnggaanaaaaaaaanggcccaanagaaaaagangtggacnttgaggaagaanaaaaaaaagaaggcaaagaagaaggcngggttctagaacaacaagaaagggtggtcggcaaatgaaaggcaccgacganagaaaggtcaca

SEQ ID NO: 630047 - DNA, 914 bp, Homo sapiens
aataaaggagcaataaagtcacgagaactttctgtcccccaatcgagagccctgaggggcaccccagtcccgcctcagctcaagaaacacaagaagacaaacacatcgaggacgcagaaaacaggacagagaagagaacgaagagaacacagaaacagacacagcgatagaaagaagaagagcagaagaagaaagaagagaacgcagatgatacaacgcagacacgcacatacgcacccgaaaacgtcaacgacaacagacacacagaccatacagacacataacagcaaaaagaacacagacagaaagtaaaaagacgacataacacaaaatcataaaagaggacacacaaggagaataaagaaaagtgcaaacaaccccaaaaaaacgaaacaacaacaaaaagaagcgaacaaacaacaagcagaacgaaccaaaagcaaagaacaccacaacacacataaaaaaaacacacaacacaaacaagacgacacagcagagaaagaaaacagagagacaacaaaaaaaaccaaaacaaaacaaaaaaaaaagaaagaaaaaaagcaaacaaaaacaaagaacaaaaaaaagatgacaaaaaacaaaacaccaaaacaaaacacaaacaaaacaacaaaaaacacaacaaaacacaacaaacaaaaaaacgaaaaaaaaaaacaaagaacagaacagagaacacacagaacaaaaagaagaagaagaccagaaaaagacaaagacaagaaagaagaaaaagaaacagaagaccaacaaagagcacaacaaagagacgagaaaggaaagaaacaaagaaacaagagaagggcaaaacaacaaaacaaaaaaacacaaaaacaacaaaaacagacaaacaaccaaaacaaaaacaaagccacgaagaacaagaaaca

SEQ ID NO: 630048 - DNA, 292 bp, Homo sapiens
cgtatagtgtgtagggggtgtggagtgtgtgtggcatctggagtgtgtgtgtgtggtgtgtgtgtggtgtctgtgaagggtgtgtgtggtatgcatatagtgtggggggtgtgtggagtgtgtgtgtggtgtgtgtgtgtggtatgtagtgtgtgtgtgtgtgtggtgtgtagtgctagctactcagaaggctgaggtgggaggattgttagagcccaggaggttgaggctgcagtgagttctaattgcgccactgcactccagcctgagcgacagagtgagacactgtctt

SEQ ID NO: 630049 - DNA, 721 bp, Homo sapiens
gcctctttgtgcccattctaatcgtaatggcatacctgccatgcttaccgaacgaaaaattctaggctatatacaactacgcaaatggccccgaacgttgtaggcgccctacgggctactacgaaccccttcggctgcacgccgaataaaatgtcgtctcaccaaggtagccccgtaataacccgcgcatcatcgtagccgatcacccatcatactatcatcgcgtaccccgtactttagcttcttcaccagtcgctcgtgtctactaatagaatccccccataccccagtacgcgcaaaagcgcgcgctggtcaaccgtgcaaccctaggccctcctagtttattctagtccacactctaagcctaagcgcgttatactcaagtcacttctgatcaagaggttgagcattcgagagagctccaaaaattacggcaccctggaattcgagacgactacttgtcgaagacaagataaggacgcgcgagagatcaaatacttcgattgatggacaggctcagccccgtaggcgcagtccacttcttgaggtcattcaaaccagtttagctttaagtcaacgcttgggtgtccttctaaaacatcattcaccacggccgttaatccaacgagactaacagaagaggacacaaggcttctttgaagtttaacatcacatgctctattctattgaacccactttgtgaccaaataaagttattgaa

SEQ ID NO: 630050 - DNA, 373 bp, Homo sapiens
  misc_feature (25)..(25): n is a, c, g, or t
  misc_feature (27)..(27): n is a, c, g, or t
gtcccctcttgatcgggaactcctngncgccttttcagctcgccatggatcccaactgctcctgcgccgccggtgactcctgcacctgcgccggctcctgcaaatgcaaagagtgcaaatgcacctcctgcaagaaaagctgctgctcctgctgccctgtgggctgtgccaagtgtgcccagggctgcatttgcaaaggggggtcggacaagtgcagctgctgcgcctgatgctgggacagccccgctcccagatgtaaagaacgcgacttccccaaacctggattttttatggacaaccctggccgtggccgtttgctatattcctttttttatgaaataatgtgaatgataataaaacagctttggcttga

SEQ ID NO: 630051 - DNA, 697 bp, Homo sapiens
  misc_feature (25)..(25): n is a, c, g, or t
  misc_feature (27)..(27): n is a, c, g, or t
gtcccctcttgatcgggaactcctngncgccttttcagctcgccatggatcccaactgctcctgcgccgccggtgactcctgcacctgcgccggctcctgcaaatgcaaagagtgcaaatgcacctcctgcaagaaaagctgctgctcctgctgccctgtgggctgtgccaagtgtgcccagggctgcatttgcaaaggggggtcggacaagtgcagctgctgcgcctgatgctgggacagccccgctcccagatgtaaagaacgcgacttccccaaacctggattttttatggacaaccctggccgtggccgtttgctatattcctttttttatgaaataatgtgaatgataataaaacagctttggcttgaaaaaaaaaaatatagccaaaaaaaacaaacagattggttggggcgcccatggccccggagaaacgttttgcaaaaccccattcggtttgggagccgcgcgggccccaagattgagttaaacggcaacccttgtgcgcccaaagaggggttccctgaaggaggaacctccggggcccgagactcgggggcggtggtttctcccacccaaataaaaagggcgcgcggggaacaaccgagcgtgtttgggacacactcccagaggggcgtccgaagccatagggtcctacacacggggccagggactgataatagccggcggggggc

SEQ ID NO: 630052 - DNA, 198 bp, Homo sapiens
  misc_feature (22)..(22): n is a, c, g, or t
  misc_feature (98)..(98): n is a, c, g, or t
gcatctgggatgtgggaccccnctgccccattttcttgggaatcaaaacatcaaagaaagcaaaatttgtagctgggtgtggtggctcacacctgtanatcccagcactttgggaggctgaggtgggtggatttgcgaggtcaggagatcgagaccgtcctggataacacggtgaaaccccatctctactaaaaatac

SEQ ID NO: 630053 - DNA, 654 bp, Homo sapiens
  misc_feature (25)..(25): n is a, c, g, or t
  misc_feature (27)..(27): n is a, c, g, or t
gtcccctcttgatcgggaactcctngncgccttttcagctcgccatggatcccaactgctcctgcgccgccggtgactcctgcacctgcgccggctcctgcaaatgcaaagagtgcaaatgcacctcctgcaagaaaagcgctgcatttgcaaaggggggtcggacaagtgcagctgctgcgcctgatgctgggacagccccgctcccagatgtaaagaacgcgacttccccaaacctggattttttatggacaaccctggccgtggccgtttgctatattcctttttttatgaaataatgtgaatgataataaaacagctttggcttgaaaaaaaaaaatatagccaaaaaaaacaaacagattggttggggcgcccatggccccggagaaacgttttgcaaaaccccattcggtttgggagccgcgcgggccccaagattgagttaaacggcaacccttgtgcgcccaaagaggggttccctgaaggaggaacctccggggcccgagactcgggggcggtggtttctcccacccaaataaaaagggcgcgcggggaacaaccgagcgtgtttgggacacactcccagaggggcgtccgaagccatagggtcctacacacggggccagggactgataatagccggcggggggc

SEQ ID NO: 630054 - DNA, 251 bp, Homo sapiens
  misc_feature (25)..(25): n is a, c, g, or t
  misc_feature (27)..(27): n is a, c, g, or t
gtcccctcttgatcgggaactcctngncgccttttcagctcgccatggatcccaactgctcctgcgccgccggtgactcctgcacctgcgccggctcctgcaaatgcaaagagtgcaaatgcacctcctgcaagaaaagccatttttggcatctaatcaagtgacttgaagggcgggtccctgtgtgtgtgtaagctgatgtttcctgggagcccagattcctagtaacctggctgggacagccatacccc

SEQ ID NO: 630055 - DNA, 422 bp, Homo sapiens
acggtggaaactcatggaccttgatcgcctttcattgacacaaagtagtacggagatgatgacatggcttaaccagcgcaatcctgaagacaaacacaacgcagtggtaccaatatagtagtcagttaaagcacaagaggactggttgagagcaaaggtcatggcaacagctttggaatgctcacggcatttggcttgtagactttctgtagggccaaagaatggtaacgtgcttatcatggggagtgtttggagaaatttagccaaagcttcagcagaaaaatcccctgagaaagaccatagagtacttcaccacaacaaatgtacctgctcatccctctcatcaaacaaggccattttgcaagagtttagatgggaaatcactaggcatccaccctacagtcctgatttccaccttgcca

SEQ ID NO: 630056 - DNA, 414 bp, Homo sapiens
ccccttccctgtcctccagcctgtcccctttccaccatcctcaggggaattaaagcagtttggggatgccccattgggcggaaattgttgcctcctcagtgatccttatcagggagagcaggaatccttattcccggggtcggtaggaatcatttttgccgcctcctgtttgcccccagggtgctgctcctgctgccctgtgggctgtgccaagtgtgcccagggctgcatttgcaaaggggggtcggacaagtgcagctgctgcgcctgatgctgggacagccccgctcccagatgtaaagaacgcgacttccccaaacctggattttttatggacaaccctggccgtggccgtttgctatattcctttttttatgaaataatgtgaatgataataaaacagctttggcttga

SEQ ID NO: 630057 - DNA, 268 bp, Homo sapiens
tcagctcggactctccctactgtatctagactaaggaatttgagctgtataataggaactcattgtggaattgtaagtctggaaataccatgatcatatttgcttctttttttttttgagatggagtctcgctctgtcgtccaggctggagtgcagtggcgtggtctcggctcactgcaacctccacctcccgggttcaagtaattctgcctcagtgtcccgagtagctgagattacgggtggctgccaccacgccgtggctgatttg

SEQ ID NO: 630058 - DNA, 680 bp, Homo sapiens
  misc_feature (14)..(14): n is a, c, g, or t
  misc_feature (78)..(78): n is a, c, g, or t
  misc_feature (121)..(121): n is a, c, g, or t
  misc_feature (133)..(134): n is a, c, g, or t
  misc_feature (143)..(144): n is a, c, g, or t
  misc_feature (157)..(158): n is a, c, g, or t
  misc_feature (249)..(249): n is a, c, g, or t
  misc_feature (272)..(272): n is a, c, g, or t
  misc_feature (297)..(297): n is a, c, g, or t
  misc_feature (323)..(323): n is a, c, g, or t
  misc_feature (336)..(336): n is a, c, g, or t
  misc_feature (340)..(340): n is a, c, g, or t
  misc_feature (354)..(354): n is a, c, g, or t
  misc_feature (361)..(361): n is a, c, g, or t
  misc_feature (408)..(408): n is a, c, g, or t
  misc_feature (412)..(412): n is a, c, g, or t
  misc_feature (418)..(418): n is a, c, g, or t
  misc_feature (498)..(498): n is a, c, g, or t
  misc_feature (535)..(535): n is a, c, g, or t
  misc_feature (542)..(543): n is a, c, g, or t
  misc_feature (552)..(552): n is a, c, g, or t
  misc_feature (561)..(561): n is a, c, g, or t
  misc_feature (564)..(564): n is a, c, g, or t
  misc_feature (567)..(567): n is a, c, g, or t
  misc_feature (576)..(576): n is a, c, g, or t
  misc_feature (581)..(582): n is a, c, g, or t
  misc_feature (588)..(589): n is a, c, g, or t
  misc_feature (591)..(591): n is a, c, g, or t
  misc_feature (593)..(593): n is a, c, g, or t
  misc_feature (597)..(597): n is a, c, g, or t
  misc_feature (609)..(609): n is a, c, g, or t
  misc_feature (660)..(660): n is a, c, g, or t
aaatatagatatgngcgactctagagtgcacaatggtttagtcacgtaagaaattcgaatgggatcgttggagaatgnatgcagatccagggtgcagtgaagatgagctgggatgctgtgnactggtttaagnnttcctggcnntgcatctcttggnnactagctgaatcttgacgtggaaggttttagctaatgccaagtggggatgcagaaaatgctaagttgacttaggggctgggcacagggacnaaaaggcaggaaagtactaaatnttgctgggggcatccaccccgggtngggcttttccttccaggaggtccaanctggcaccacccncagngctcacatggctgnctttatnctccgtgttccatttggcgcagcaagtggcagtgtctccgccacctngtgntggtgntgccgcgcgcctgagatgtggctttcaccacctcatccatgagagctttggttccccgggcaaaagcttcccgttcgatnccgcgccgcggggccgttccgcgcaatctgcttagcncgagtgnnagcctcagnatacttctngcngcnttcagggcnacagnnaaagcnnancnagcnagcaggtatgcnagatgccacagtggcttggcaagtcttggcattctcatcaaacttgtcagnagtgacaaagtcaacaggca

SEQ ID NO: 630059 - DNA, 277 bp, Homo sapiens
gagtggcggtgaaagttgagagcagtactaagagagaaccgagcagagtgtgctggtgcaagtcgaaatggtaactcaagctaaagcccagaggggagcccattgcaccgcacctgtctttcaaggattggcagtatcccgatctgccatgtatacagaaggcatgtacagaggaggtactcagccgctaaatccaaggttgaaaggaaaagaggagaggttctcgcactgttacaaaccagtggtggtgacagacggcggtaccggggtggtgatc

SEQ ID NO: 630060 - DNA, 321 bp, Homo sapiens
gaattccccccccccccccccccccatagggtcatctcctgtcttatgctttaaaatccaaggattctttcccctgggggatctccctccaagttgggtgtcagaaccaaagtcctctccatggaatgcgagactcacaatctgactgctttcccattgtttggggggacacacaaatatctacatgatttggagaaactctatgtaaaactatttccttttctttaaccctcctcctttttttttttggagactgagtttcatgctcgtggcccaggttaaagtgaaatggaacgatctcggttcactgaaaccggatcc

SEQ ID NO: 630061 - DNA, 116 bp, Homo sapiens
gctcactagaggatccccattaacattcccaatagttgtccagggtcatattcaatgatgagttaaacacatactgtgttctaggatcaggagatacagcactaactagagagacc

SEQ ID NO: 630062 - DNA, 1600 bp, Homo sapiens
  misc_feature (665)..(665): n is a, c, g, or t
  misc_feature (958)..(958): n is a, c, g, or t
  misc_feature (1020)..(1020): n is a, c, g, or t
gcgtcgggttgttcctaacaccgaattgtgtggtggttggattatggttgcggccacgttgttcgttccttgtgtgccccgccgtctgggtagcgaccccctggtgggtgttgtgaccgcaacgcacccgcgcggattgtgggggtgcccccacccgctgcggggcccccaccggtctatcagctttgtttcctcctcgcgcggggagtggtgtaaatatttctcttggtctgccgaaatggtgctcccccccgcttggtggccgtttttgtgttgagtgtgggagaggcgctcttttggttttccccccccgggggcggggcacaccaccaactgatgtgggggggcctgttgacccaaaagtggtccccacaggtacagatagttgttggttttcctctgtgtctccaccaacgagtaagtgatgtttttctgtttccgtgtggggcacaaacgtgttgtgctcttgtgggggtgcgccccccgcccccgaagtagatgtggtggcccccctccgccccccagtggggggatatgccactagccttggggcgttgttcacgcatgggcgttctcaccggggtggaggttttgttgtcctccgttggtggaccccgacattgcccacgggccggcacacgagtttattaagccgcgtccccggngctgtattatggccgccccccggtaatttcgggattttggccaccacaccaccggcgtgctacacacattgggcacagcgcacaagttttttgtctcggagagctctgagagagggatacaaagagtttttgagttccccccgtgtgtctcgggtgtatataaacgcttggggagaaagagttgggcccccgtgaaggtttctctgtgagagaggtctctgtgggtgagagtgcggtcgcgcacaggtgtggggtgttgagagatagtgggggtgtctcctggggcccacagncgcgcacactgtgtgtgtgttttgagagagagccctttctctccagagcctatgtctccacncgctctttggggtctgccctgttggcctgcgttcgccgtgagatatatgaggagcccacagacccccactttgccgcgcgtgtgggtgtgttcacatctcacaagcccacgcgtgggagcccacagagaagggcgtgtgctgtgagagcactgtgcccacaagaggttccccccccacaggtgctgtccccacgcaaaaggctccacgagaggggctatataatgagaatattatttccgctcataatattcctctgccacccccgacactctcttataatccacgctgggtggagaagagaccgcgttctcacgagacctcttttggtgttccacattggccactttataagtttatagtatgtaaaaaagactggttataatgagtaacccacatgcactcgttaaaccctcacgaaaggaaaaggaaaaatgttttgtggagcccccttggttttcttttttgcctgtggcacgcttttaagttattagtttttataaatcagtactttttaatgggaaccaccttgaccccaaatttgtccccgaattttgagaccccctttaaaaagttaaatga

SEQ ID NO: 630063 - DNA, 712 bp, Homo sapiens
atccctactatctttggtctactcatactcctattcaccattcatcaactatctcatacacaccctgctcttgtgttacactgccggtgttacactgtttctccaagccatcacagctgatgtctcttgagtgctatccccaaactgcacactctaagctcttaatagtaaatgaataatctttgctggaccaggactatgactgaatctccttagtgcactctctaatcgagatgtcctaggtcctcccaattcttagaccttttatacctgtttttctccttctgttattccatttagtttcttaattcatccaaaacggtatccaggccatcaccaatcattctatacgacaaatgtttcttctaacaaccccacaatatcaccccttaccacaagacctcccttcagcttaatctctcccactctaggttcccacgccgcccctaatcccgcttgaagcagccctgagaaacatcgcccattctctctccataccaccccccaaaattttcgccgccccaacacttcaacactattttgttttatttttcttattaatataagaaggcaggaatgtcaggcctctgagcccaagccaagccatcgcatcccctgtgacttgcatgtatacgctcagatggcctgaagtaactgaagaatcacaaaagaactgaaaaggccctgccccgcttactgatgacattccaca

SEQ ID NO: 630064 - DNA, 369 bp, Homo sapiens
  misc_feature (31)..(31): n is a, c, g, or t
attagagatgggggtcttactctgtcatccnagctggagtgcactggcatgatcataactcactgtaacctccaatttctgggcttaagtgatcctcccacttcagtctcgggagaaactaggactaccacacctggctaatttgttttctttgtgtagagatggcctctcactatgttgcccaggctggtctcgaactcctggccttaagtgatcctcctgcctcagcctcccaaagtgttcggattataagcataagccattgtgcccagtcttttttcttctttttttttcttaatacataaaacaagacttgaagccaatgtcgacgcggccgcgaatctagtagtagtagtagtaggcggccgc

SEQ ID NO: 630065 - DNA, 181 bp, Homo sapiens
aaggacgctgtactgtggtgtaccgtcagtctagaaattgtgtatgaaacactcgcttctcgcaggcccattttccactgcctcccacctagaaccattatttccaaaataagtatttcatcccacagctcagtgaggatgatgggatattcttttagtccctttctttcttcgtctccta

SEQ ID NO: 630066 - DNA, 262 bp, Homo sapiens
tctgaggatcctcgtaacgagcctcgtaacgagcgctcgttacaccctcctaacagcgcctcgtaacgagcgcctcgtaactgtccgtaacgagcgccttctgtaacgagcgcctccgtaacgtcctgtaactgatgcgcctcctaacaccctaacgagcgcctccgtaacgacgcctccgtaacgagcgcctccgtaacagcccccctaactgaccccgagcgcctcctgtagggtacctatgctcgaacttcgtacatca

SEQ ID NO: 630067 - DNA, 389 bp, Homo sapiens
cagctcttacccgtactacatagtgttggtcttgtggggttggttgttgtaaagtctttttcaggcctgcataatggtcggcctgattgtgttttaggtcagtagctcaattggcagagcgacggtctccaaaaccgtaggttgggggttcgattccctcctgacctgccagattcacgtggtgtgtctggctttcttttcacaggatcttcatagatgactcctaaggctgaagctcaaagctctcgtttcgatctggtaaagtggctcgctgtagtcgccttggtggtcgtaggcgttgttggcaatcagtactattctgcttcgccgatcctgtaccgtgtactcgctttgcttgccctcgctgctgtagctgcctttgtaggcct

SEQ ID NO: 630068 - DNA, 399 bp, Homo sapiens
agacaatgagggcagttctctgtgtactcccaggcatctacctactgttaaatagaaaaaaagtcatcaataatgtacaggacacaatagcattttaccacttctatagcacaagcaaccatgcaacacgtttttcaagatacaaacatggaaagtgaataaggcgcgttgtagccggaaacacagcaaactggtaacactggttacccctctaggcagggtgggggattggtagtgccacacggtcgtagctcgtacacctttcaactctgtgtcaggagaaaacagccacatattcactactacacaggacacctagagaaaccgtgtagatgagaggctagcagaggcaatctagtacacatgaacttgagagcactgctaaactaaactgaggta

SEQ ID NO: 630069 - DNA, 1334 bp, Homo sapiens
agcggaggctcggtccggaggccgagggcgagcacagcagtctccgcctcctgctgctccggactattctgcgctgggctagtcggcggttgaccctgtgactgcgcccggtcatttggcttcgggggctgactgcgtcgcctagtgggctctcgcgtgtggagcagcgacatcatggatgacgtgcatgggcgctgctgggggcccggtgctcggggccttgggctgtgtggcctcctgggagaatgccgggcagtgctgcgctggctggctgtgtgcgttgcccagcggcgcggtcctcaggggtccctgggcgggggtatgagcgggccgtccgtaggcgtagggtagctagctggcatcttatcttctggttggctaggctgttgcgtacctgagggtcctgggtctgggaaaacaaccctgggggttcgcaattcctgaaattcgcgcgggcgccgcaggccttaacgtgctttcatcccaagtttggggaacaatcggcgcgtggctccgtagcttgtggagtgcggcccgaatcggggctttccctgtgcgcctttggatttccggccgtgcacattgtctgggagtccgtggtggagcctacagaaagaagcggtacacccggggaatatcgttgggtggcccttccatttgacacatttcgcatattcgcatgtcatcggagtataccggcgggacagaacctgtgggtcctgtacgagaattggccattgacgcgttaattattcgagagaccttagcgtcccctttaaacaccaggcaaagacattacattccgcaattcgcgcttgtgaacccagcacctggttgtgaacacccttggggccatttggggccatgtgggtggttcccaacactctcgcgcttcaccttggcaactgggccgaggaccacacctaattttcacgttcatacaataagcggaaccgcgagtggtggattatgcaacccttggcccagcgagtattgcgcacacatagcgggggtgccccaacctagggccccacaaccgagccatttcgtttgtgacccatcttcaccaaatgtgcgcttcccacggagtaataaatctgttagagcggcacgcgcaactacccaccattgtctggcgcgaattcttataagacaaccattgtgggcaccccacccactatgtgcgtaatggtgttcacccccagctatccccccccacgatggtggctcgtaccccaattcacagcccctccgctttctcctcttgtgcgcgcgcacgcagaacgaacgaccgacagatcacgcgggcgcgccaacaaactattacaaaacgc

SEQ ID NO: 630070 - DNA, 263 bp, Homo sapiens
ctggcttgctcaggtctctttaccgaaaaccacacgtgctaagcaaaaacaccaacggtcaggagcttgcagaacggcctctgacttactcctgaggcggtgagcgcacagcaggaaaccccgcacgttcacgcaaacacatcttgcagaactggcgcggcgcggcgggaggaccggggcaagcctagcagaggaaacgggagctctgcacgtgcaggattcagacccctaggcgatgaaactgcagacctgagcaagcccgg

SEQ ID NO: 630071 - DNA, 264 bp, Homo sapiens
cggtagaagatgaccagatatgtttgagacttcaacacccagcatgtacgttgctatacaggctgtgctatacctgtactgcctctggccgtaccactggcatcgtgatggactccggtgacggggtcaccacactgtgcccatctacgaggggtatgccctcccccatgacatcatgcgcctggacttggctggccgtgacctcacggactacctcatgaagatcctcacagagagaggctattcctttgtgagcacagctga

SEQ ID NO: 630072 - DNA, 310 bp, Homo sapiens
gactccctaacctcatgagatccactcacctcggcctcccaaagtatcgggattacaggcgtgagccactgcgcctggccctaaacaacctttaaaaagaacaaagttggaggactcacacttcctgatttcaaaacttacttcaaaactatgagtaatcacaacatcatggtattggaataaggaaagacacatggaccaatggaataaagtagagaactcagaaataaactctcccgtatattgtccattgattttcagcaagggtgccaaaagtatttagaggggaaaggacagtcttttcaacaaa

SEQ ID NO: 630073 - DNA, 834 bp, Homo sapiens
agcgggtgcccgcccgcgccgccaggctcgcaagcaccgcgtaggccagctggccggatcccgccgtctgtcatggcggcccccatcctgaaagatgtagtggcctactgttgaagtgtggtcatccaagtggaacagaaagattattcaacgacatttacaacacagcttgtggatatgggggcacaggtttccaaagacttttaacaaacaagtaactcacgttcatcttccaagatggctacccagagcacttgggacaaagctccagaagagaggcgtaaagctcgtttcggtgctccggggttgaaagaatgccaggacagctgtgagcacacgattgatgaatccttgttccctggcagctgaatatgaatggacacacttatccagcctatagttaagcaacaaacacggttacatggtttgcaggcccaagattttaacttttaaaagcacccggaacaatgattccgacgatttccgaaggaaactttgacgaaaagtggctaaagaagctaccaaggggcaaaaaagcgaagtctagactgatgatgtaccttattctcttatttgaagtctaatggttcattaagtatatactcccacaattgaaacttaatagtagtcaccacaggcgcaatgggagaagacgattacccagagatgcaccggaggacacggggacaaatcttttcaaccacctcttccccaatgattcagcagtctcattgataatcccaagtaactctctgttgtggaagcacctttgaaacatttcacgtgatactttgtgttcccgatgaatactttgctggggggtttacactcatg

SEQ ID NO: 630074 - DNA, 375 bp, Homo sapiens
agacacacagactagctgcaagtgcgattgggttgatggagcagttttacaatctccaaattaagagcttatgtgcttccttttgattatgaaaataatgtgttaattgtaactaattgaggcaatgaaaaaagataatactattaaagatataaaatataaaaaccacccagaaataatgatagctaccattttgatacaatatttctacactcctttctatttatatatacagacacagaaatgcttcatattttgattaaccgggattgtactatacctaagctgctttttctagttcgtgatatctatcgacatctctccatgcctccttcctggccttatttccctttgtaggacttaataccctcccac

SEQ ID NO: 630075 - DNA, 420 bp, Homo sapiens
agatcagttataggacagagagagacatatggtcgcacatctgagtataatgccagtgaatttgtgacctagccgcaggggttcagatttcatcctggaaacagtggggagtcactgaagaattttgagcatcatcggagtgatgtgatcatagccagaaattagaaggatgatttgggccattgggtagaaaggagttttaaaagcgtttgagagtgaaagatactcctacctttcacaatgatgagggagtaaaaatacatccttgacagagcagaaacacactggggtattgaggtacatcagtaggcagaactcagaaggcagggcaagtaagaagaggacattctggggtaactggttaccagctgcagcacctgggaggcagaggcaggtggatttctgagttcggtcgacgcg

SEQ ID NO: 630076 - DNA, 1213 bp, Homo sapiens
ccccatatctaacaacgtaaaacataaaactgacagctttgaacatacaaaacccaccccattccaccccacactcatcgccctataccacgctactcctaccatatctccccttttatactaataactcttataaaaaaacaaaaaaaaaaaaaacaacaaaaaaacagacacgcgcacacagaaacacacaaacagcaagtacaacagtacaaaaacacaaagcgaggtgggcgaggggtaaagagagcagttgattcaccaccatacgcgcgcgctcatcaacgtgaaccaagcagcaacaccacactattgtggtttgtgtgctccaggcgtgcgacgaccactcaaagtaagtcgctatgcgtccgtgtcatctatctccctctcgcgattccaggagtccagctaggaagaatcacaacgaaatacacaaccagaccgtcggtcgtagcgccgtggacgccacctctctccgtccatcttcgagagagtctttcgctggccatcccagtgtcgattactaacaccccacattagttggggtggtggtacacatgcaaaactcataggccgacaaacggcgagcgacgactcacatcgacaatgcattcgcgcacaccccggcggcaggtgttgagggcttcccatattcaagaacaggtgagagaaacgggcgtggatacatagagtgtcccaccacgaccattcagtcggcgaggacgcatcatctagcacgactccaatgagtcgacgcacgcccggatcacttttatgtatcacaaacggaagagagggatagaaccgcggcccatggccgaatgaatgaaaataacgtcacgagccccaagggctagcctagtgaagaaaaagtacgcggccggctcgcacaacagcggtaggatgcatggggactgggcgtctgggctgccgtggtgcgtccgtctaggagtaacacgggccgactgcgatgtcgtgccagccggcctgtgctctgctatcggcgcggcataggtcgaacgagagagcaggacgatgagcgccaagacattcgcggaaagcgagctcgtccactcggacgaccacccacagacgaccactccagacagaccaagacaagcgactatgcacaagagaacgagaagagagcgcacgacaaaaagacaccacggtacgccgcgcaactctagttcagctcatcaccgacgctctg

SEQ ID NO: 630077 - DNA, 1038 bp, Homo sapiens
  misc_feature (76)..(76): n is a, c, g, or t
gagcacatctgtgcgagactttctgtgcgagctctacctgagaacggcagacccaggagacgcgcacgtcacgcantccacttcctcagctggccggcagagggcacaccggcctccacgcggcccctgctggacttccgcaggaaggtgaacaagtgctaccggggccgctcctgccccatcatcgtgcactgcagtgatggtgcggggaggaccggcacctacatcctcatcgacatggtcctgaaccgcatggcaaaaggagtgaaggagattgacatcgctgccaccctggagcatgtccgtgaccagcggcctggccttgtccgctctaaggaccagtttgaatttgccctgacagccgtggcggaggaagtgaatgccatcctcaaggccctgccccagtgagaccctggggccccttggcgggcagcccagcctctgtccctctttgcctgtgtgagcatctctgtgtacccactcctcactgccccaccagccacctcttgggcatgctcagcccttcctagaagagtcaggaagggaaagccagaaggggcacgcctgcccagcctcgcatgccagagcctggggcatcccagagcccagggcatcccatgggggtgctgcagccaggaggagaggaaaggacatgggtagcaattctacccagagccttctcctgcctacattccctggcctggctctcctgtagctctcctggggttctgggagttccctgaacatctgtgtgtgtccccctatgctccagtatggaagaatggggtggagggtcgccacacccggctccccctgcttctcagccccgggcctgcctctgactcacacttgggcgctctgccctccctggcctcacgcccagcctcctcccaccaccctcccaccatgcgctgctcaacctctctccttctggcgcaagagaacatttctagaaaaaactacttttgtaccagtgtgaataaagttagtgtgttgtctgtgcagctgcaaaaaaaaaaaaattataaaactcataat

SEQ ID NO: 630078 - DNA, 434 bp, Homo sapiens
tgcaatgttccgagtatgcctgtctaagtcaacctcgtcagccagtgagctagaggtagggtcgctcaagtagccttcaatgatggcagggaccgctagaccgttggtctagtcagaggcatagagcaggtgctgcatgcgtatcagatcagtcagggtctatgtattgagtagcgcggtctgcgacatctctgcgtaagctggccacgcgcgcgtgcaactgcttggcaccgtgtatcgaatctgagcgagtcaagcagctgggctgtaggcagcatagctgtcgtgctagcatgtatgtcaagatacgtcacacgcgaacgcagcattcgagtgtaatgccgtaaggatgtaatagcacagacagcttgataaccacatccagacccctgacagctcagtgcatcggggatcgctgcactcccggtgcacgc

SEQ ID NO: 630079 - DNA, 483 bp, Homo sapiens
ctgaggatctcatggtgtcatccccctggcacctgcatctcgctctctatggggcaggacctgccctgccgtggatggacagtgaggacacttcggtgtccactgcaccttggagcaggcggtcacggccacctggtggtcgtgcgttggagacacagatggcggggagcgtgacttcttcttgggtggatgctccaggctagaagcttcaggagcccactcttcttctctttcttttcacttttcttctcgtctagtttgcatcccgtgttggtggggctggatgtggacagaacaccgatgggcccccctccagcctccccgttgaggtttgcggcactgacgttgggaggtgtgatggctgatgctgctgatgtgagggggatggccggccgtgggcacatctgcaccgggggctggtggctgtgctgcggggacaccaccgagtggggcctgaggctggtggcaggcaggcgggatgga

SEQ ID NO: 630080 - DNA, 411 bp, Homo sapiens
gattattttcttttaatgaaaaggaagcttctgggtgggatgcagtggctcacacccgtaattccagcacttagggaggcagaggtgagaggattgcttgtggccaggaatttgaggctgcagtgagttatgatggtgtcactgcactcaagcctgggtgacagagcaagactgtctcttaaaggggacagggggccgggcgcagtgggtcatgcctataatcccagcactttggaaggctgaggcgagcggatcacgaggtcaggagatcgagaccatcctggctaacacggtgaagccccatctctactaaaaatgcaaaaaattagccaggtgcggtggggggcgcttgtagttccagctgctctggaggctgaggcaggagaatggcgtgaatctgggaggcagaga

SEQ ID NO: 630081 - DNA, 338 bp, Homo sapiens
  misc_feature (309)..(309): n is a, c, g, or t
  misc_feature (322)..(322): n is a, c, g, or t
tagaaacctaaagtgtcaccactctgggtgactggggcaggagtgaggagaagcctggaatgatatctgcttgctccccaccccaccctcagcacctccagaggctcctcaccagaacccccagagttccttggggctctgcttgaaaacctctcctccctaagaaatccccccgcagcttgctctgcaggtggacagttttgacagctggtctctaccttctcaggcttggggacgtaggaaaaaggagagccttctaagtaaggtggaaggattggaatcaagaaatagcaagattctgtgggtttngccccagtcaagntttgcctagggtagtc

SEQ ID NO: 630082 - DNA, 211 bp, Homo sapiens
tcttctttttttattcggccagttcgcgagactcatggataactccgagtgtccccatcaaaagattggtggaacgaagggcccgaacgagacgcttaggcgcccttcttggtcttgatgtagttgattacgtcgcctacggatttcattttctcggcgtcttcatccggaatgtcgacttcgaactcttcttccatcgtcatcacgagct

SEQ ID NO: 630083 - DNA, 215 bp, Homo sapiens
aaaaaaagggggggggtttttgggcccccaaattttcccaaaacccgggggtttttcccccttaaaagggttttttttaaaaaaaattttgcccccccccccgggggacctttttttaaattttttttcccctttggccgggggtttttttttttttttttttgcggttttttttttttttgcccccccccaatttaaccccccccaggggccca

SEQ ID NO: 630084 - DNA, 137 bp, Homo sapiens
  misc_feature (123)..(123): n is a, c, g, or t
tctcacgatccccccaccagaaagggcatgtcacaagaactcttcatcatgctgtgtattccctatcttccctccgtctgctccccagggttcacttgtgcacttttcgcgcggattatggangatatgcataccca

SEQ ID NO: 630085 - DNA, 146 bp, Homo sapiens
atatgatacacttacacatgtgaacaaccttacatctagcttgtctttctgctaagctgttaaatgtatttatagtaaaggaagaaagaaagactgtcatttccttataagttagagtaacatcctcctctggataacttgactgt

SEQ ID NO: 630086 - DNA, 861 bp, Homo sapiens
ggacccttccatcagaggacccttccatcggaggacccttccgtcacaggacacttccgtcagatgatcctgcaagccccttcccaggattctaatttcacctgcgcttctggccacagagagttagctgcttcctggaacgtgttggctagttgagtcacccttaaagtgctgtgctcaagtccctcttcactcaggaacatgaagcctgaataagccataacactataagagagcatgaacagtataaaccataagatatgattcttcctcaggaatgactgttgcctgcagttggggtcaggagggaccagcactccttatacggagaggacaagtgaggcacttggaccacttccttggtgcacttggtggatgctccccaccccagtcctgcagtgtgtgcaggaggccagactaagctactccccagatagacacgtggcaacgcccccaagcgacaatcccttggctagcagtgtctgtcatcctgacgctgggtgggctgtgtgggacccagtggctccaaggggccctgtctcatctggagccactctggacttgcatactgtgtccccctcattgtctctttatcacctgctcctcactagcctccatcatgtcaatggcaggtcatgattccacccagcaagcagacgacatgtccataatcctccctaattagcagcaaactcatcttgggaccatctcttggtaccctttgctcagcttctggtcactccagacccctgactgacagcaaggactacgaaaacagtgcacggacaacccgatttaaaccccaaggagatagggcatctatgatacttaggacaacagagaatgcaggattacgggcaa

SEQ ID NO: 630087 - DNA, 229 bp, Homo sapiens
tatagcaagcagagacaggtcatagtctgcctccatgtacagaacgagcacacgggtatcggctaaaagaaggacagatcctagagtgttgtgacttatgacctaggctctggactccggaccgcccacattcccgcgaccgtctatcaatagagacaaacgaacagcacacgacagacagacacagagtcttggaggctagacccagaacttagtgaggaccctagaa

SEQ ID NO: 630088 - DNA, 120 bp, Homo sapiens
tcgacttagaggatcccgctcacccgacggggttggctctttgactcctcggggtgcaatgtcgttgttatcgtctccggggtcccggcttctccctcgtcccccttgaggccggggtag

SEQ ID NO: 630089 - DNA, 358 bp, Homo sapiens
catgtcggtgtatctcttctctccccatactgcagattttgaggtactgtgctcaagcatcagccctaacacctgtcacaatgcctagcatacacgcaggtgctcaatatttgttgaataaacgaaaactatcaagctggttgggcgtggtggctcatgcctgtcatcctagcactttggaacatccaagacaggcagatcactggaggtcaggagttcgagacccagcctggccaacatggagaaaccctgtctctactataaattaaaaaaattaaccaggcatggtggtgcatgcctgtaatcccagctactcaggatgctgaggcaagagaatcgcttgaacccaggaggcaga

SEQ ID NO: 630090 - DNA, 260 bp, Homo sapiens
gaggatccccccgcaagacttggacctctgggactatttacagtatgcctatacaatgtatgtacagcgtagtatacactatagcacaagtttcactgctggaatatggcttctagtggaaagtgcatattttgccagaggtggcaatactgtctagaatttcccgggttacagatactccgtaaccacatccaaagctgaagtagaatgtggactatacttatctacgaaagtgctatctaaacggtccagtacactgc

SEQ ID NO: 630091 - DNA, 818 bp, Homo sapiens
ctttgcgaaagccccggagggtgaaggtccctttttctcccccactagaatgtttagtgttgtgctcccaaaaggggcgcgcccaaggcggggttcttaaagaggggattctccttggagggctggtgcgaaatcacacactggggtgggtagtatgtgatgaccacacaatgtcttatagtctctagaggttgaatattgggcgccctcacctcggtcccggcgagccatctcggcggtttccggccccctggtttggctgcccgcgaggcggcggtgggcctcgctctatgatgagtgtttccccctcttccggggccgcccgcccccccagagaggggatgttgtatctgtttttccccgcttgtgtccatttctgccacacaggaggccctcctcttctgggaggggaggtggtatctgtgtgtgaaaatactatttggtgccccgcccccatcatagagattttttctccgggcgctgttaatattccacccatcttgtcttccagacgagagaggtgggaaatttgtggcgctgccgcgcgtgtgaaccaccgccccactctgtttcccgtcacacaagagtttgtgagaaagctacacaacaggtctttctcataaagactcgcgacagtggcatcagatgttaacaagtgccactctccttcccacgcacccccaccacaccgaccgaggggtgggcggtttttttatcaccccccccacccttgttctccccaacctccttctcccgttttttttttccccgcggggggggtttttcccagaaaaaaaaaaaggggtggagccccccca

SEQ ID NO: 630092 - DNA, 139 bp, Homo sapiens
tgtgagagtatgacagttactcatcactcacacccaggcggtaggtgggagaaatttaattcacgaacaatggtgaatggacctggaggatggggatttcctttgtgggggactactcgttggccttgccattatgcaa

SEQ ID NO: 630093 - DNA, 958 bp, Homo sapiens
  misc_feature (4)..(4): n is a, c, g, or t
tctnttcggtcatgtgtgttgaatgtcgacaattacttagtcattacactactaccataacttggtccgaccgtgtgcggccgctattttaaattgctcccgtcataggcgtctccacgggggacacaaacaatttgttgccggcaatttattgggcaccggcattttccaggacggagaattctctcaacggggaaagtgggttcaccattccaccgcccttgtcctgggacccaccactacagacactggccgaggccatatttaacctcgggaacttgcgtccccaagcccgtgtgtttagtcctgtctaccctccgtgttaaacgctggatatccacgaccccgcggccaaaaaaccatggccccaatggaacgccacatacacgtgtggcgggcgccgccccctaaaaaaagggagtgattctgaagaggtagtcacgtagcgcccacaccaccaacatgttggaccacacgactgggggctagcgccaactcccgcgtgggcccccacaaaagggagacacaggctggtccttgccccgcacagttagcgggagcggccaccccgcctgctaccacaaccggtgatgggaagcaaacggggggacacaaccccaccagggttcttgggaggagcagaccaagcagagatcactttggtttaccaaccagagaaggcgggcacaactttcattgttaaacgtttgcacaaatgcgtgtttcactcgccggcgcaacaaacaagtccggtactgtcatttgtcgggacgataacaatctacgggcctcctccacccgcgcctttataagatcatccgttgttcggtcatggcaacaagcgccatttttctattcgagttaactcgtcgcgcagagagaccactgctgtgccccagacgtcaccagtgaaatatagtcccaaattaaaataaaaccgagcccccccaaaataaca

SEQ ID NO: 630094 - DNA, 85 bp, Homo sapiens
gcgaggatggggatgagaatgaagaggatgacgaggacgaagacgacgacgaggatgacgatgaggatgaagataatgagtccga

SEQ ID NO: 630095 - DNA, 361 bp, Homo sapiens
tatttgggattatgggtacataccaccacgcggagcttatttttgtatttttagtagacatggggattcaccatgttggccaggctgatctcaaactcctgacctcaagtgatctacccacctcaacccccaaagtgctgggattacaagcttgagccactgtgcccagcctcgagcatgatttataaggctggccggagacccttctttctttgggtttgaggtgctccgcaggctgactgttgctggattataaatgtgatttataacagttattgtgcatctgtgcagcacaagccaaaggcagagttttgtgaaagctgtggccagttgagaggtacattctttcctttcttttacc

SEQ ID NO: 630096 - DNA, 265 bp, Homo sapiens
gaaaccctaataacgtccaatgtatttgcgtagatcagcttttcacgtgttatttaccccttgatgttcttaagcttccagctctctattctgaacctgtaccaatgcagcaaaacgaggctagaggaaaacatactatccaacaattagtgtttcttcatttaaaggcaaacatcaagtgagtcaaaatcactaccatgtaatcgtattgtacatcactagtttttactgcgtagttagggtttcgaaaccctaattagggttg

SEQ ID NO: 630097 - DNA, 140 bp, Homo sapiens
atgctaatttgtctattactactcttccaaaaacgtctcatataattggaattaagcctagcactttacttgagtcattaaactatattttttctgatagaacagggtatacacgcatatgaaagttgcaggctctttta

SEQ ID NO: 630098 - DNA, 236 bp, Homo sapiens
  misc_feature (5)..(5): n is a, c, g, or t
  misc_feature (17)..(18): n is a, c, g, or t
  misc_feature (66)..(66): n is a, c, g, or t
  misc_feature (79)..(79): n is a, c, g, or t
  misc_feature (105)..(107): n is a, c, g, or t
  misc_feature (132)..(132): n is a, c, g, or t
  misc_feature (138)..(138): n is a, c, g, or t
  misc_feature (144)..(144): n is a, c, g, or t
  misc_feature (148)..(148): n is a, c, g, or t
  misc_feature (168)..(168): n is a, c, g, or t
  misc_feature (177)..(177): n is a, c, g, or t
  misc_feature (235)..(235): n is a, c, g, or t
gactnttataatcccgnnagtgtgtaccttggtgtatagttgttaagccaagtgcacagtgccttntgagtaccagggntcccatcagacaaactagaaaagggnnncctagacatgctgctgctgtttcantgtggngcatgncttngcagtattgaaacagatctnactttttgnttggagcacaaaaatgatgttattttagaaactcttttggaaaggtataggcatgaanc

SEQ ID NO: 630099 - DNA, 102 bp, Homo sapiens
tctagtcgcgcactacgaatgccccagacgtcctctataatcatggactcgattccgaaaacctacaaaagagaaccgggtcctattccatatattcctagc

SEQ ID NO: 630100 - DNA, 503 bp, Homo sapiens
ctgctggatgcaaggtcctaggggcacttgcaggactccggggggcagaggatggggcccctgccagcacccccacaggcctgctgggggtatgggttagaaagcctcatatgaatcattgctacatgtggtggcatgacccttataaagtctcctccctttccaaggcccacatcctctccataaaagggtaataacagcagtgcatctgtcaggtggaggtcaggaaggaaggggatcaaaagcatgggagcctgcgggagagatttacacacatacctgctgcaagctaggaaacgcagagctggcctcccaggccttgtgggaggaacatgtaagcaaataagaacttgtccctaaccctagagcacccagggaactagggagctgaacttggttcagagagaacagcaggggcaaagggtaggaagagaatgagtggaggccagggatgagggcagtaagttgacataggagagaggtgagtggagtagggttgggta

SEQ ID NO: 630101 - DNA, 912 bp, Homo sapiens
cgttcacataaatggcatcctcgtgtaggacatgtgaagatgatgatgttctaagcttctactcgctgttctgtatggctgttctcttacacagaatgtaacagaagttgcgtgactctttatttttacagaattggtctctcggtatgctcacgcaggaagcactacgagagaccccaacctttatgtacagaagttgcgtggagacatagcgaggtcacgtgtggacactgcctgaacgtactcccaaacatgtaaccgtagccatccactcgtgacattgctagactagattcacacatgaaaccattaatatatcgatgaccataaattatgccttacgaagagacaatgagattctaaatataccactacattgtttgaaaggaactttatagatcgtgtgtacattaagaatggtcaacgttagctctactataaaagcagtctacctgcgaataattacggaggagaaagctcagctaatgttataacaaaatgctctaataagggagatagggttaaaattgacgacggaagtatgcggagattcacgagaaaggtgaactcgattattagtaggcctggtggaagaaatgtattgtcacagtaccatgtaagagtgttcataggttgtggatcaagggaatatgcccttaggggaatgagtactaaaatgtcttttattcgttaggaatgctgaataatgcggacttaggattaagagggcttgctctatttagagggagagactagctctttttataaattggataatcctataggatggggaagcaaaaagatatggtcatgctgttgaatatgggtcttcgggcaattaattctttttaagcactatggacactgtgtcaaaggaatgggttctcaaggaagctgataatagggtagcca

SEQ ID NO: 630102 - DNA, 187 bp, Homo sapiens
gcaaatgactatatgacgataatctgaaccaacaagatagtgatagatcgcgggaagtagctcgacgcatcataatagcatcaagtgtgagcagcagcatatggaggctatactatactacgacttcaggctcagccgttgagctctcgaccctcgtcatcaatgacgactggtatgcatgacgctt

SEQ ID NO: 630103 - DNA, 534 bp, Homo sapiens
  misc_feature (14)..(14): n is a, c, g, or t
tccggggtctccanacatttttcccggcttggtggtcctaaatcttgtccaaatgtcagagtgcagttgtgagcttgagagttcttgcttgggttgttgaaaaattgacttgaggttacaaaactgggttgggtggtattgggaaggcaaggtgtgggattggttttgggggacaacaaggcgcactgacaatccagctaatccagaagccacttgtggtagcactgcaatatgtatccccaagcccaattaggagggaattccttaccaggaaagacacaaggtgggttctactagaacttcggcgctctggaaaaaaacctccccccgcatgctttttttgcgggcgggcccgtcattcatatcgattccgaaaatctctggggggggagtcttacttcgtggcggaaaccaaattttaaaaccccttcgtgtgtgcaactttaacacaaacttggttcctcttgggtgtgtaacccaaaactcgcaacacggactgcttaaacccaagtggattgggccccaaatattcgg

SEQ ID NO: 630104 - DNA, 426 bp, Homo sapiens
  misc_feature (79)..(79): n is a, c, g, or t
ttttttttgttttgggacagagtctcactctgtcacccacgctggagtgcagtggcgtgatctcggctcactgcaagcnctgcctcccgggttcatgccactctcctgcctcagcctccagagtagctgggactacaggggcccgccaccacgcccggctaatttttttgtatttttagtagcgacagggtttcaccgtgtcagccaggatggtctcgatctcctgacctcatgatccacctgcctcggcctcccaaagtgttggactacaggcatgagccaccgcgcccggccggatggttaaaacattttaaaaataaatatttagtgctaagacaggatatggagcaacaggaactcctatatgcttgctggtggggaatgcaaaatgggtacaaccacttttgggacaaacagttttagtaa

SEQ ID NO: 630105 - DNA, 226 bp, Homo sapiens
tcctagcctcgccagtggctgggactacaggtgcccgccaccacacctggctaatttttgtatttttagtagagacgaggtttcactattgtgggccaggctggtcttgaatttctgaccttgtgatccgcctgcctcggcctcccaaagtgttggggattacaggcgtgagccaccacgcccggccaacttgcttttctctaatggctggcgatgttaatttttt

SEQ ID NO: 630106 - DNA, 1174 bp, Homo sapiens
gccccgggcggatgcccaaagactccgggttcccaagagcccctgcggccgggcgcgaataatggcggcggtcgtgcgacggccgggcagctcctagaatgcacgcacgttatgagagcttccctcagggccagagggccggagcaggctcatttagactctgacaccagtgcttaccgggtgactagcttcgctagctagctcgtgctgcgtagctctacaggcgccagtcggggttctgcctctctcgtcctgcgcctctttctcgggatccagctgtcttgcctggtcatgctgccgctgctgccatgacagctgtccttccgcagattcggtacgtgctggacgcatgtgttgctgcgtgctactgggctctgtgtgccctggcatggacggactccgtggactccggagatcacacgtagtcagaggtacctcatttccataccattgtagacatccttattcgaaccacaatcataggtcaacttttgctataccacctgtaagcgaccccttcttactctaatgagtacccacgcacagcatattagctgtgcgtggtctcgtgggcttgcatggagcatgactgggccggctgagcgaaggatagggagagcagttcactccacaggacgcattcctagtagctttcgcaaggagagcgtagccacctcgagtccctcatgccagcaccttgcccctgcacgcgaagaattgccaccaaagtggtcctggccacctggctcccttgcggcttccaggtcaccctcgggctcatctcatcgtagtccaaagcatggtggtcacaagcgctgcattgccccttgcaacagtcaccgtaccaaccccataggtcgtcgtgtcgcccaggctcgctggcaacttgcccttcctcggagatctcacgcaacattggctggggaacctgttctacggagccccgctacccacggacgccacatcacacgcgaagcgctcagcatcgaaacctgcaccaaccgcaacaaagaccgagacacggagacagacaggcggctagcgacgcccaggcaaccaaccgtggcgctgccccagcacacatgggcgcgtatccgcgaccgctgcccacaaccacaccggctcccgaaaccacgtagagcccaaaagcccacgaaaaggccccgtaccaaag

SEQ ID NO: 630107 - DNA, 410 bp, Homo sapiens
cagcaggacactgaagatatgtaaattatcaaattaaaagcaattattggtcacacaaatgatggtaaaataaaggattggtgtcacaaatcatgtatttgtgccaccagtccatctcttcaaggttacgtgagttattagtctaaccacagctagctaaatgacagaaccagggtctcgaagacgttactgttactgagtctcagcttcctcgtctacgaaatgaagataataatacctaccttactacggaaacttatgttaagaacttcactactattagttctctctgttccgactctaggtactacacctttcattcacatcagtagctccttccataaggtctaagaccaacactacagatcaggtattcgcaaaatacttgtcaactgcaagtcccagtcact

SEQ ID NO: 630108 - DNA, 444 bp, Homo sapiens
ccgctaatcgccgctttactggcgaatccgggtattgagctctgcccttgttctgcctccggtgatggtgagccagtcaaggagttgagtggttagtgccaacctgccagatatggaggactactccccggtgtgcactacccccagagtttgtaccgcagatctttcccatagtgctgtcttccagtgaatagtgacatcccataagtagttttgattttgttgtatgggttacttgcccaccagaaacagccctagtccccactccttgacgttcctttggcccctccctgcctacctaaaatctgcctaaaatggctggagatgggcactattggatttgaatcgaattcctgcatcccgatgaatccactagttctagagtggccgccacctgcggtatagctccaacttttgtaccctttactgagggttaattgctca

SEQ ID NO: 630109 - DNA, 504 bp, Homo sapiens
ctctggatgcaagtgtccttcccacctagttcatgtactcatcgcacgttatcagccagagcttctgcggcggtggctataggcgtcaatggtatgagtgtctgcagccaactggacttgactgagcatctcctgttcattctcactggttctgggcttgcttgatactagagcagtacactcgatgtcgcctgaaatgtccgcacacatgatcatggtccgcctccctctgacttgtcgcctgtgcatgtgcccagccgtacccatgggatactgttttgtgctacaactgacactatcaaacgatttgcagattatgtgactggaacataaaatgcatattcccagagcacttatttatagagcatacccttctgtgggttgatcatgaggctgtgtatgaggtctgtgtggaggcagagctgaggagacgtgggcttggtccccacagatcatgctggctggggggcttggcacgttgggcagctgctgtgattcttcgcc

SEQ ID NO: 630110 - DNA, 763 bp, Homo sapiens
  misc_feature (24)..(24): n is a, c, g, or t
  misc_feature (86)..(86): n is a, c, g, or t
  misc_feature (89)..(89): n is a, c, g, or t
  misc_feature (94)..(94): n is a, c, g, or t
  misc_feature (100)..(100): n is a, c, g, or t
  misc_feature (110)..(110): n is a, c, g, or t
  misc_feature (124)..(124): n is a, c, g, or t
  misc_feature (154)..(154): n is a, c, g, or t
  misc_feature (200)..(200): n is a, c, g, or t
  misc_feature (203)..(203): n is a, c, g, or t
  misc_feature (224)..(224): n is a, c, g, or t
  misc_feature (229)..(230): n is a, c, g, or t
  misc_feature (236)..(236): n is a, c, g, or t
  misc_feature (238)..(238): n is a, c, g, or t
  misc_feature (248)..(249): n is a, c, g, or t
  misc_feature (254)..(254): n is a, c, g, or t
  misc_feature (278)..(278): n is a, c, g, or t
  misc_feature (285)..(285): n is a, c, g, or t
  misc_feature (292)..(293): n is a, c, g, or t
  misc_feature (298)..(298): n is a, c, g, or t
  misc_feature (300)..(300): n is a, c, g, or t
  misc_feature (303)..(303): n is a, c, g, or t
  misc_feature (305)..(305): n is a, c, g, or t
  misc_feature (323)..(325): n is a, c, g, or t
  misc_feature (348)..(349): n is a, c, g, or t
  misc_feature (377)..(377): n is a, c, g, or t
  misc_feature (382)..(382): n is a, c, g, or t
  misc_feature (387)..(387): n is a, c, g, or t
  misc_feature (389)..(389): n is a, c, g, or t
  misc_feature (392)..(392): n is a, c, g, or t
  misc_feature (400)..(400): n is a, c, g, or t
  misc_feature (415)..(415): n is a, c, g, or t
  misc_feature (446)..(446): n is a, c, g, or t
  misc_feature (472)..(472): n is a, c, g, or t
  misc_feature (480)..(480): n is a, c, g, or t
  misc_feature (483)..(483): n is a, c, g, or t
  misc_feature (497)..(497): n is a, c, g, or t
  misc_feature (507)..(507): n is a, c, g, or t
  misc_feature (519)..(519): n is a, c, g, or t
  misc_feature (524)..(524): n is a, c, g, or t
  misc_feature (537)..(537): n is a, c, g, or t
  misc_feature (543)..(543): n is a, c, g, or t
  misc_feature (578)..(578): n is a, c, g, or t
  misc_feature (629)..(629): n is a, c, g, or t
  misc_feature (703)..(703): n is a, c, g, or t
  misc_feature (763)..(763): n is a, c, g, or t
tatagaggttttatcagccaaggntgccttcatattgaaaaaaataccttatctcacttgtaatcataaacattattccagtagangangtacnttttcnctcctttttntcttcttgcctgtntaatcaccataataagttataatgaaatanctcttacataatcaaaggagaaaagaaagacaaaaccaacatgccncancctagacaattccatccagcnctgcnncctccngntctgttttcnngctcnctccacccagcactgccgccctcngatctangttttcnngctcncnccncnccccactccaattaattnnncccccccccccatcctactttgnnggggggggggttcaccaaatgggggggnttgtncgggngnganacattttntggtgagtgcgggtnggatagaaagtaccgggggggggggagggcngcccttctcttttaatcatcataggngggtttantantactcaagagtgtnctttaatgantgatccctgatnaaggntttggcccttcanactgcngctgttcagaacgtggaatgtttctgctgaatccnttcttgatgtctctctttggtggtcttctcattggtggtcttctcttcagntgggttgttttctcactaggaaaaaaaatgttccatctctggaattaacgttgatggtgttttgctcattctgnaagtttttatcctcccttctcaagcatgctctgtttggcatgattgacacagtgcatatn

SEQ ID NO: 630111 - DNA, 1261 bp, Homo sapiens
aaaaataaagacaaatgctgcgcccttcaaaaaaaaaaaaaaaaaaaaaaaaaaaaaaaaaaaaaaaaaaaaaaaaaaaaaaaaaaaaaaaaaaaaaaaaaaaaaaaaaaaaaaaaaaaaagaacaagagaacgagagagaaaagagtaaaacaaagaacccaagagaaagaaaagcacagcaaaaagaaagagagagagagggaagcaaagggagagagtaggaagagaggagaaggggagaggaaaagagaggggcggagaaaggagagaggaggaaaaagaaagagaggagggaggagagagaagcagaaggaagaagaaagaaagagggagaacgagaagagaggagagcaagaagcagagaggaggacaagagcgaaaaaggagagagagggcgaggaaggaaaaaaagggagaagaaagagagaagaaaaaagaggagaaagaagaggaagaaaaaaaaggtagaggagaggagaacagaacggaaaagtagataagggaaagaaaaagaagagaggggcgaaaaagcaaagaaaagagagagaagagaagggaaaggaagagggaaagagagaaaaaagaagaaaaagaaaaaaaaagaggagagacaggaagaaaagagaagagagagaaggaaagagaagaagagaagaagagaagagaagggagaaggaaagaggaagagcggacaggaaagagagaggaagagaagaggaggcgggagaaaggggagaaggacgaaggagaagggaggagaggaagagaagaaaaagaaaagagagagaggagagagagaaagaggaaagaaacggaaggaagaaaaagagaagggagaggaggagagaggagggaggaagaagggaagagaagaagggaaaagagaagagagaaggagcgggaggaaggaagaggaggaggaggaagggacaaagagaaaaaggaaaagaaaaaagagagagggaagaaaagaagaaaggggagaagaagaagagaagagaaagaaaaaaaaaaagaagaaggaaaagagagaaaagaaaagagagagaaagaagaagagaaaaaggagggaaaagaaagaggaaagaaaaggaaagaaaagagagggagagagaagagaagaaggaaaagaaaaggaaagaaggaggaagcgaaaggaagaagaaagggaagaagaaaaggaagaaggaagaagaagaagagagagagaagaagaaagggaaaagaaagaaaagaaaaacaaagaagagagaagaaaa

SEQ ID NO: 630112 - DNA, 116 bp, Homo sapiens
atgttccctagcgggagaatcgcttgagccttggaggtggaggtagcggtgggccgatgatcgcgtctttgcactccaggcctggacaacaagatgtgaaattccgtctcaaaaaa

SEQ ID NO: 630113 - DNA, 951 bp, Homo sapiens
tgaaaagggctgagatgccgcgccaaacggttagcagatcctctatcggctggttcctgtgccggcatcgtcgtcgcgtctcctgatcctctgacagtttgtgcctccctcttctgcctccgttctttatctatcccgtcgtcgtgaagatgttgcactgagaatgcattgatcaggagtactacgcagcaatgcgtcgaacccagaagacttcattcatgtctgctgcccagtcacaaggtgactcactgagccgaacatggtgccgtcacctatactgcgtcccctcttgtcccgactaatctatggagaaagacagttggaatgcgccattctgatggggggaatagaatgctgtttacaaaaaaaacaactgtataagactggatgttaacggggatcatagtctactcgagctcaatgtccatagtcacttgtttggtgaagatgggtgcgagaaccggtagatgtattggaacacttttgtctatcaacaagtaatgcgcatgttcggatcgtgaccacgaattagacatatacgggcctctcgtgtgaagcattaactatccagaacaacccatgggtgctatagctcctgtgcctacagatatgtgcgatcgtggacccgaataccagaacgtaccggatgcaccttcgtacacatgctttggctggaatgcactgagagatgctgggctggcaactgcgttgctggagcaaacggatttgcctgtgcccggccctgcggagcaccgacgagtaacctaggatcaaggctctcccaacagacaggtgttcccctgcgtggtgaaccacagccctggctgttgcggcgccctgggtgtgcaaggctctgacaggaacacaacggtataacaaacagtgcaacaaggctatgtacccaccaccgcttgggcacaccacacctcggggcaacgtatggctcagccc

SEQ ID NO: 630114 - DNA, 218 bp, Homo sapiens
  misc_feature (18)..(18): n is a, c, g, or t
ccgagtaagttgactcanaagccatcattaattcattcaactgagaggtgctggaattctcttcagactgcagcatctctattatctcaaaaagcagtccaggtgctatcagagtgatgaccttgtgctcagctgcgtgattgccaggtatgcttccaggaaatgagtctcgcattgcacacgcactctccacaggttcttccaacccgggcttttct

SEQ ID NO: 630115 - DNA, 445 bp, Homo sapiens
  misc_feature (25)..(25): n is a, c, g, or t
  misc_feature (431)..(432): n is a, c, g, or t
  misc_feature (434)..(434): n is a, c, g, or t
ccttccttaccctcaactgccccgncagggtcctttgcctggatttagccagaagggatggccagcattccagcctcaggctcctggccttacacaaaagcacgatggtgtcacctatgagactggtaacattcctttcacttgtcccatcctgccctgcacagctttatcctaaaactgttctgaagttggtttccctctgggagaaaataaaagtttgcagagcacagaagtgattctaacagcaacgtttatcggctggttatatgttgagttctagtctccaactttacttatcctccccttctatagaccccaattcacttcataataaaaacagctcctgacagtctttgcgttctcgtttttagaaagatgacaaaatcacttataaaatcaaaagcatagctataccttaaaatacatattgnngnttactatctgc

SEQ ID NO: 630116 - DNA, 650 bp, Homo sapiens
  misc_feature (243)..(243): n is a, c, g, or t
  misc_feature (281)..(281): n is a, c, g, or t
attctcctgaaaggtcgtaggctgacaggcgctcacattccttggctgcctcggttctgagggcagctaaggagctgtttattcctcaagtcatgctccccgatctccttcctctaccactctgtcaccaggagtttaattacaggcttgaggagaagaaaggaagaaaagatatcttgatgctttgaaaactgtgttggcagtgtggcatgactgtttaaagtagataaaaccttgtcattntaccccatccctgcatgactgtgaagctggcgaggaanggaggaagaggggcaagttcaaaatgcaggcttggttggcttggaccagtttgctaagggactaccttggagggcttttttgcctggattggcccatttgggcccaaccccggtttttgcaggaaccaaaatcccctcccaaaggggggggctgcctttgggaacaggggtgtttttttcccccaaaggcccctcccccctatggttaatttctttttgtcgcacaaaaaaaaaaatttttcccccgggggaacaaaaggggtaaaaaaaaggggggggaaacaacccccccccgtgaaaataaaccctttttaggaccccccccttggggcacaccctttgaggtagtattaggccggggcccccttt

SEQ ID NO: 630117 - DNA, 513 bp, Homo sapiens
tggaatcagttattggcagaggcatcttctggtcgcatggggtgaacgatgtctatagatcctcatgtcacacgaagcctgagaccacatgaactgttgtgatgtcttccttagaaagggtaggcatggaaaattccacgaggctcattctcagtatctcattaactcattgaaagattccagttgtaatttgtcacctggggtgaaaagaccagacaggctttcccaggcctgggtatccaggaaggctctgaagccctggtgaaggaccctaactagagttctagagtttctgcattctgtatctcagtagtccatattcgaggcttgatatactaggtctgcaacaaggaggtcgcacttataatgtatgaagaatgggatgcatatgatcctcaagactaagaaagctgtcagagggatgctctggccctggtgtgcacggctgtagcaacagttgatgccagtgtcctctacctcatgctgtccttgtgcttaaacacctctatctcc

SEQ ID NO: 630118 - DNA, 534 bp, Homo sapiens
gtagcagttactatactacttctagtataggtacagcaggttatcaactgcaaccttattactctggccaaaaataacaaaatcaaaacaatcataaagactcaatattcagacaataatcttgattaaaacccagtattgctcaactgggtgtggtggctcatacctgtaatcccaggactttgggaggccaaggtgggaggactgcttgagcccaggagttcgaaaccagcctaggtgacatagcaaaattccatccccacaaaaaaatttaaaaattagccaggcatggtggtgcacacccctagtcccaactacttgggaggctgggttgggaggaccacacgagcccagaaggtcaaggctgcagtgagccatgatcgtgccaatgtactccagtctgggtgacaaagtaaggctgcctcaaatataagcaacaacaaaaaacaccaatattcctctggctcgaatgcagctacctatatttagatatccccaaagtgaagttgacacagttctccaacacaataacag

SEQ ID NO: 630119 - DNA, 712 bp, Homo sapiens
cgacaggtggtatcggtggtgtttcccctttctctcgttgcgtcgtctgttttctcgctgtgctatcccgtcccgccgccgcctctcattctttttctattcctgttctttctctcgctctcccctgtacttgttcgctctcctctcactctccgcttgcgtggtctcggcgtcgctcgcctgccgctctcgtcgctgcgtgcgcgttcgttgtttcttgtcgtgtcgttctctctcctaagttggattatgccttcacttcttcgttcttgcactctcctcttgtgtgtcgtctttcctctcgcagcgcgttggacgggtgttgtggtctcccctctccctgctcggcgctgggtgattcatctcctgttttcttctcccctccacgctgcctccctcccccccccgccctcccgggtggtgcccttctctctcccccctcccgtcctggcttttctcttgggctgtccctttcttcccccctctgcttcgctgtgccccccccctctgtccttccgctcccccctctctttgttctccgtgtctctgccttctttcttctgtgtggcttgtccttgtcgtgcatctgttcctccccctctcttgtcgtgtgctggcatacaatattaacaactctataacaaaataacataacaaataataactaaataatatatacacaaaataacaaaataaaaaaatacagaaaata

SEQ ID NO: 630120 - DNA, 109 bp, Homo sapiens
gcgcaaatggtgatgcattgccaacaggctctccaaggttcgatgtttccttctgagtgccatttcagcactataggcatttcggtctgtttctcctagtatcgggtac

SEQ ID NO: 630121 - DNA, 304 bp, Homo sapiens
  misc_feature (132)..(132): n is a, c, g, or t
tcatctcttgagtatgaacagcagtcggcagctgtctctgcagaacatcagggatacagaagtcaccgcagcggaagggccagctcaagtctgaagcgcggcatgccagaccatgcagcacatacagcccgncagaggtgtggctggaccacgtggacaggatccggtcagcagcccctgtggctagaggaacaccagcacaaacgacaggctcaagtctccttcgagctttatatccatttggggatgaagtctactttgacagctagcaaggcgacatgcaactgttgttgaatgatgacag

SEQ ID NO: 630122 - DNA, 114 bp, Homo sapiens
  misc_feature (97)..(97): n is a, c, g, or t
ctagaggatccggctcacttgtgcgggcctcagtggccagggagagggtgcgctcatgttgcctttctcgagaaatgaggtgagccgccgaaggggnaggagcaaaggagcaga

SEQ ID NO: 630123 - DNA, 167 bp, Homo sapiens
tgaagctcctgctccactttcaagcttgtccccctccagcgtcacctgggaggcgaatgtgccctgtggccagtccagatatccagctgtcatctgccctgtctggttacagtcatcatcgatgacctgtttgcgcagcagcaccaggtccaccttctccttctctg

SEQ ID NO: 630124 - DNA, 235 bp, Homo sapiens
tatacctcaaactcctgagtctgagcgatccttccacctcagcctcccgaagtcgctaggacgtacaggcgcatgtcaccacaccagctaattcctttatttttttttttggtgcaaaaaataggcccctctagttaccccagaagggttataatctattgggcccaatgtacggtccttccccctctggcttcctaaattgatgatcttcggggccaaagctaacctttgttgt

SEQ ID NO: 630125 - DNA, 436 bp, Homo sapiens
acctacttatgcattgcttttgtagactaatcccgctgcgtattagagcaaagctttacttagtgcatatggaccaagctgcttaataaggtgattatcgttctctaaaagagaatattgtacctaaaatataacctgtgtttatttgcccactcataatgttttgaactgatctcagattccaagatagatcatactgggacagactgtcaattcaccttccacatttaaatcttccaaaatgaatgaggcatccatagactaggatgtgttcggtttttttggtattgtttagttatgtttttcacttaaacctgagaggtttcatttaagtattctttccatttattcctgctactttgcagatgtttgtttttttaataacaatacagaaaaaggataaagtaccattgaactacaacccttataatacctg

SEQ ID NO: 630126 - DNA, 366 bp, Homo sapiens
ctcacattcccgaccaaagccagtcacatgccatcctcagctcaggaggttggaaggcattcccactatgtgtctggatccagcaactcagaaatatttggtgagtgcctctgtggctactggtagtttagttcttatgcctatgttccagttttgtcctctgaaaggccaaatctgaaattcaaaatcttacaaacaggtttatacttgaaaacgggtaaacattctcataacataaagcttaataatattcatgagcttatttttgcaaactctgcatcacaccgaaaagagaagttctctggcttcctcagctcaggggctgtctcattacttggtccctaagaccacagctggggactggtt

SEQ ID NO: 630127 - DNA, 224 bp, Homo sapiens
ccttcgtcccatcagcataaaaaacatgctcaaaatcattgttatcagagaaatgaaaattaaaactataatcagaggtcaaatacacacatattagattgttaaaataaagacgtgacaatatgcgtgtttcaaggatgtagagcaagattcccatcaggatcttggtggtagtagcaaatattcaaacaagaacttcgaaggctgatgggagaagactgcga

SEQ ID NO: 630128 - DNA, 100 bp, Homo sapiens
aattactctccgcgacagtgaaccataaccagtactaccaaatcaatactcatcattaataatcatatctggctatcctctctcatcaaatatactctcc

SEQ ID NO: 630129 - DNA, 407 bp, Homo sapiens
  misc_feature (379)..(379): n is a, c, g, or t
gctgtagctcaattccacataccatacggatcagtatgcgtgttacgggggatctttgctcactatcagctctgccctcgattaagtgggcgcaaatttggtagaaatgaccgagcttgagatttgaactcaggcaatctgactccagaatctacacttctaatctctatctaccccacctcaaggaacagaatatacaccatcttgttagcattatatcccaccccacttcctacaatcttgctgtcctaaagcacccgttacatggcaatgcttgagggctcagtcgtttacgaacactgctaggtcctctatcacttctttagaatggtggttctcaaactttgaagtgtatgggaattgcctgaggatctggctnacaagcagatcgattcacgaggtctgag

SEQ ID NO: 630130 - DNA, 604 bp, Homo sapiens
tttgattaaaaattaatataataaaaaaaaaaaaaaaaaaaaaaaaaaaaaaaaaaaaaaaaaaaaaaaaaaaaaaaaaaaaaaacaagaaaaaaaaaacaaaaaaaacaggggggggaattggggcctaatgggccaattggccctaagggggggcggtttaaaaacaaagggccggggttttaaaagggcgggacggggaaaacccggggggtccccaacttaaacgctttggaggcaacccccctttcgccaggtgggggaaaacgccaagggcccccaccggtcggccttcccaacagggggcgaaccctaatgggaaaggggaattcgcgggcggcaaatttgggtaaaaccccggcctctcgggcacaccgggcatcgtactccccaagggccccacgggcgtcccccttaccacccacccggactctccccgcggggtcggcggcgctccccactttcgacacccggcccctcttcccccctgccgccctcatcagccacggcgcgcatccccgctcccctgggtcccgccctcccgccctcccgcctacccgccctcctcctcggtctctcccccgtccccttctcccttcctccc

SEQ ID NO: 630131 - DNA, 919 bp, Homo sapiens
  misc_feature (3)..(3): n is a, c, g, or t
  misc_feature (94)..(94): n is a, c, g, or t
  misc_feature (303)..(303): n is a, c, g, or t
  misc_feature (311)..(311): n is a, c, g, or t
  misc_feature (315)..(315): n is a, c, g, or t
  misc_feature (371)..(371): n is a, c, g, or t
  misc_feature (383)..(383): n is a, c, g, or t
  misc_feature (389)..(389): n is a, c, g, or t
  misc_feature (397)..(397): n is a, c, g, or t
  misc_feature (399)..(399): n is a, c, g, or t
  misc_feature (403)..(403): n is a, c, g, or t
  misc_feature (413)..(413): n is a, c, g, or t
  misc_feature (415)..(415): n is a, c, g, or t
  misc_feature (431)..(431): n is a, c, g, or t
  misc_feature (465)..(465): n is a, c, g, or t
  misc_feature (476)..(476): n is a, c, g, or t
  misc_feature (483)..(483): n is a, c, g, or t
  misc_feature (504)..(504): n is a, c, g, or t
  misc_feature (517)..(518): n is a, c, g, or t
  misc_feature (534)..(534): n is a, c, g, or t
  misc_feature (618)..(618): n is a, c, g, or t
  misc_feature (620)..(620): n is a, c, g, or t
  misc_feature (655)..(655): n is a, c, g, or t
  misc_feature (686)..(688): n is a, c, g, or t
  misc_feature (691)..(691): n is a, c, g, or t
  misc_feature (755)..(755): n is a, c, g, or t
  misc_feature (782)..(788): n is a, c, g, or t
  misc_feature (800)..(800): n is a, c, g, or t
  misc_feature (821)..(821): n is a, c, g, or t
tgncccatctgcacagccagggcctggtgcaccttgatgtcaagcctgccaacatcttccttggggccccggggccgctgcaagctgggtgacntcggactgctggtggagctgggtacagcaggagctggtgaggtccaggagggagacccccgctacatggcccccgagctgctgcagggctcctatgggacagcagcggatgtgttcagtctgggcctcaccatcctggaagtggcatgcaacatggagctgccccacggtggggagggctggcagcagtgcgccagggctacctgcccnctgagttnactnccggtctgtcttccgagctgcgttctgtccttgtcatgatgctggagccagacccnaagctgcgggcnacggcngaggcccngntggnactgcctgtntngaggcagccgcgagcntggggtgtgctgtggtgcatggcagcggaggccntgagcggaggntgggccntgtggcaggccctgcttgccntgctctgctggtnntggcatgggctggctnaccctgccagctggctacagcccctgggcccgccagccaccccgcctggctcaccaccctgcagtttgctcctggacagcagcntntccagcaactgggatgacgacagcctagggccttnactctcccctgaggctgtcctggcccggaannnggngagcacctccaccccccggagcaggtgcacacccagggatgccctggacctaagtgacatcaantcagagcctcctcggggctccttcccnnnnnnngagcctcggaanctcctcagcctgtttgagganaccctagacccaacctgagccccagactctgcctctgcactttaaccttttatcctgtgtctctcccgtcgcccttgaaagctggggcccctcgggaa

SEQ ID NO: 630132 - DNA, 165 bp, Homo sapiens
ctttgtaacagccctttttacaggggatcagtggcagccacaggtttcttggtggtgggcctgggatttgagctgatgtgttcagacctgggcgggtgtcccagctttcagtttcagaaataagtaataattggctatggttgggggtaattgggtccatggttg

SEQ ID NO: 630133 - DNA, 411 bp, Homo sapiens
gcctgtgcctcacagcgagaccccatctcaaatataaatacctattattatttttgctagtctttcttctgtatagggccttccatactattacttgcctcctgtctcatctccctttatatcctttccttttcctaatttctgggagtattagagttgaccctccatcttgtaggagaaggtggtatgaaaaagaccacattcataaatcaatgtaaaccaatatagaacaggttcgaagtagaaataaaaagtacagagattgaatctttcataacaagagtgtatcagttgaattttcaatcttatacattcatctataaagaatacaggagtattaaccccttgaaataagacttcatttcgtagtcattaagcatatcttttaagcagtgttgttaacaatgcatg

SEQ ID NO: 630134 - DNA, 127 bp, Homo sapiens
tgtgtggtggaattccagctgtcatcgggtgctgagcttcgccacgtgctggccacgctgggtgagaggctgacagaagacgaagtggagaagttgatggctgggcaagaggactccaatggctgca

SEQ ID NO: 630135 - DNA, 257 bp, Homo sapiens
gggtcagtattcatctaggtcatctttctgggtcataacagtaatctctccaaagccagtgatggcactcagatatttgatctgaggattgagagattcaggcttttggtggaaaagccataccagagcttctgttccattatatggtgtcaaagtgaacgcgtttgcaaaaaagcgaagtagcaatattgccggcatcaacagcgtcgatacaagcggaggctgatttccatatgtctaattggtcaatgctgcta

SEQ ID NO: 630136 - DNA, 1382 bp, Homo sapiens
  misc_feature (1)..(1): n is a, c, g, or t
  misc_feature (628)..(628): n is a, c, g, or t
  misc_feature (630)..(630): n is a, c, g, or t
  misc_feature (892)..(892): n is a, c, g, or t
ntccccctttgtctgcctcggggggggtcttctctttgcttgggagggcttcgccgccccacgtgttttccggcgcatcctgtttttctcgtgagctctccgcacttgggcggccccacattggggtttttgacctcgccgtccgagaagatttttgtcattttctttttgggggggttatactccagccgcgccccccagcagtttttgtgtctaaacgaccgggcaccgggaattttgtgcctgtgagaattttgctgagcgagccgactggtttgtggttgtttttgagaacggccgactgtagaacttgtgttggaagcacttggggttgccccctctctcggaaaagtggaccaacggaaggggcgctgacaccaccccgctggtggcgcgcccgaagatggatgatggaccctatggagatgtttcctcctcacgggagttggccacaccgcccccccgctgcggtaatatataggtgtttctcgcctctttgtcccctcacagagagagagggaaaagaagaaacttctttttatgagaaaactcgcccacatttggagatgtctcttataagatgtggttgtaatttgtgggcgacacacacccccccatcggcgctctntnttacacgcgggtatagaaagaaatttgtcccccccagtatagggagaattgagattgttgtatacagagagaggagagagttgtcttttgggagaaacccacttgggggtttatacacacagcgagaaaaggggctataccttcataagctctgcacacacatattttcttgggcaacacaccccacagagtgccacagcccaccctcacagccacttttaacttttaaccacactcacgcgagaatattgtgagtgttgtngaaattgtgagagtgttccctctgtggtgtgtgtgtcgcacacaatacttctgagagcgacacaccactactgtgtttctcttttgatgaaaacacactactggccacacctctcacaaggtctctggagggccgcgttggcgtccacacaccctcgtgtatttccccgccacctctttgggagggcccgagaggcgcggcgcgagttctcccgcgaggtgttcgcggaggtttttgagagagaccacgccctcgagacccacaccactcggagaggataccccctactctctttatctataaaaataccacaattatgccgcggcgctggtggcacatgcggcctaatatattctcacgctaacttgggagggctgaggccacggagaaattgcttgaaaccccggagaggcgcgagaggtttcggtgaagttgaagattgtgcccttgcactccggcctgggccaccaccagccaaactccgtttcca

SEQ ID NO: 630137 - DNA, 124 bp, Homo sapiens
ggagcaggtggaagagtatggtggatgcgcgagctcggccgccggctcggtgcgcgtccgggttgccgggacggcggtgctgggcgtaggaccggcctggtcccccgccgttaagtatccccag

SEQ ID NO: 630138 - DNA, 265 bp, Homo sapiens
ccactcaagccccttccttggagctgccggacccagcatatccagtacgtgctaataagggagaatccagaggctttgcagcagagttccagggatccccctggcgtgaccaggcctccgttggctcctctccggactgctccagctgctgacactggacacctttgagcacagcgaccaggagaagccagcgcagcccagtctccatggtgagcgtctgtgttgagtgcgatcactgagtggacacctgggagtgctggggctg

SEQ ID NO: 630139 - DNA, 310 bp, Homo sapiens
tttttttttgagatggaggtcgctctgttgccctggctggagtgcagtggtgcgatctcagctcactgcaagctccgcctcctgggttcacaccattctcccgcctcagcctcctgagcagctgggattacaggcacctgccaccacgcccagctaattttttgtatttctttttagtagcgacggggtttcaccacgttagccaggattgtctcgatctcctgacctcatgatccgcccacctctgcctcccaaagtacaggcgttacagccgcgcccagccaaaaaacattcttaggatgatttttct

SEQ ID NO: 630140 - DNA, 972 bp, Homo sapiens
aaaaaagaaatgatgcccagcagcgtgaatataaaaaaaaaaaaaaaaaaaaaaaaaaaaaatttgggcggccgccctctcgccccgatcgagaaaagcattttcatagaaacacattcgccgttgggggcgcgcgcgggggccccagtgagggatagaggtgcaacacgggcgccccaatagcggtgttccctgaagagagagaacacggggcccaaggaacatcaggggggtgggcgtatttcctcaatcctaatataaaacagcgggacggccggcggggacaacaacgcaggcaggcgcggtttgcgtgaaacacacaactccaccaagaatgtgaagtctagcagggagcagctccaaatagacggggcgatctcctacatataaaacaggaggggggagttctccaacgagcgcgagaagcgccgcgcgaatataatatcaaaacatttaataggcgcccccccgccgcgtgtggcgtgcactaagcaagcaaccaacaattaagacgagatgcaaactacacaacgaacaagacaacgaacaagaaaaatcaagcgaatgaacaagcaaatgcaaggacagaacaacgaagcaacacagagataagagaactacaagtaaaaaaacaagaacaagaaaacaattatcaaataaaaaggagaacagacaacagcaccacacacgcagacaagaaagaaacagagagcagagcacgaaaggaacacgaacagaacgaaacagacgacagagaaggagagaaacacaagaaagtacagcgcgagaaaagaacaaacaaaaaagacaaagaagacaatgacactaagcagacagcgacaacgacaaaacaagcaagcaagagaagaaatgccgcgacacacagaggaagacggaaggaaacaaaaacacagaaacagaacacaaagaaaagtacacaacgaacaagaaaacagaccaacaaacaagaaa

SEQ ID NO: 630141 - DNA, 144 bp, Homo sapiens
  misc_feature (19)..(19): n is a, c, g, or t
gctttcaattaccctggcntccagaaattgtgtattcagggggcgacgatggccttctgaggggctgggacacagggtaccggcacatttctcttcaccagcaaagacacaccatgggtgttgcagcatcagagcagccctcat

SEQ ID NO: 630142 - DNA, 671 bp, Homo sapiens
  misc_feature (614)..(614): n is a, c, g, or t
gcaaaacaccaacatggcgagatgacgccgagtgcagcgggggggcccgggggccctggtggccctgggatggggaaccgcgggtggcttccgtggaggtttcggcagtggcatccggggccggggtcgcgggcgtggacggagccggggccgaggccgagtgagactcgcggtaggcgaggtgcgagtgataaggagtggatgcccgatcaccaagattcgggccgcttggttcaacggacagtgtaagatcacagtccctggaggagatctatcgtcttctccactgccctagttatggaatcagagatcattgattgtcttcctggcgggcgcatcatctcagaggatagacgggtttttgacaggagttagtgccaagtgtcatgacagcgaaggacaccgtggccggtccagacgctaccagtgtttctaagggcatatgtggtgtgcgtagtcgcgggagcttactacactgtgcacagccgtgcgcgttcgtggtgtggttagaagttgcatccaaatggaatgtgttggtctacctgcacagtctcgttgcgaggctcatgcaatctctagtagcctaaagcttccttcctatcggtccgcccggntgtctgcagaaggcgtagcttgggggcgaatacaagaatccgagcagaggcccccac

SEQ ID NO: 630143 - DNA, 349 bp, Homo sapiens
tccacggttggctactagtccacgtgttggtatagtccacgggtggctactagtccactcgcagtcgtacaaggaggcttctctgtgctggtgagaattacccaggcaaccgtgtcgacttagccaatgtccaagaactggtttcctgggtgtgccactgtgatgacgacatggttcagagactagagagagacttcaagatgagtcttcagctgaagagcagcctggagcagctgggttgcgtgagttgataatgtgatgattgaaggacttgaaagcttatggaatggaagagccagttaacctaaagcagtgaggcaggttctggtacaatggtctttctacaggc

SEQ ID NO: 630144 - DNA, 713 bp, Homo sapiens
  misc_feature (13)..(13): n is a, c, g, or t
  misc_feature (70)..(70): n is a, c, g, or t
  misc_feature (82)..(82): n is a, c, g, or t
  misc_feature (85)..(85): n is a, c, g, or t
  misc_feature (92)..(92): n is a, c, g, or t
  misc_feature (108)..(108): n is a, c, g, or t
  misc_feature (204)..(204): n is a, c, g, or t
  misc_feature (212)..(212): n is a, c, g, or t
  misc_feature (219)..(219): n is a, c, g, or t
  misc_feature (264)..(265): n is a, c, g, or t
  misc_feature (275)..(275): n is a, c, g, or t
  misc_feature (281)..(281): n is a, c, g, or t
  misc_feature (369)..(369): n is a, c, g, or t
  misc_feature (372)..(372): n is a, c, g, or t
  misc_feature (380)..(380): n is a, c, g, or t
  misc_feature (408)..(408): n is a, c, g, or t
  misc_feature (520)..(520): n is a, c, g, or t
  misc_feature (534)..(534): n is a, c, g, or t
  misc_feature (570)..(570): n is a, c, g, or t
  misc_feature (591)..(591): n is a, c, g, or t
  misc_feature (626)..(626): n is a, c, g, or t
  misc_feature (636)..(636): n is a, c, g, or t
  misc_feature (652)..(652): n is a, c, g, or t
  misc_feature (687)..(687): n is a, c, g, or t
ttgatgtttatanattatattaaatacagtgagaaggggagtggggggaagagtcagagaggaacttatncccacactttanaanatcatanatcaagaaatcagagnaaagacaaagacttagggagaggagaaagacattctctcaatccatcctccttccccagggcagaaaattaaacaacgttactgagtaagcctctnagcagaangctctcncatctatgcacagacttcactcctcctccccaggccttcctggannatgtccaggnctggcnttagccaacagaaatagaggggtcaagggggtccaggagtacggaagggtcagcagggaccctcaatactgattcttctctggctggnggngggcaggnagcagagatagctcaaatactgagcagncaaaaaaagaagaagatggcgagaaacaggaagagggaatgctgccagctggaggcatgggtgaccctgtaccagatccacaccatgataaccccggcggaaaggctcatgnggcattagaagacnggtgtgtgaaaaaagccaaaggggaaaacgcaccanacaccaaaatgagaatgtggnaagcccccggttatcaccaaaatgcgctgggaatnccccctctgnctctccgagagctggntctctggtccctggggggcgggggtgggagtcttntaatctggggatcctgggggctttct

SEQ ID NO: 630145 - DNA, 198 bp, Homo sapiens
taatgaaatataatctatagctttgttataaattgtagcaaagccacccccttatcacagaattcacacatttataaaaatgcttacaaaattctatttgctacattttaacctgctttactgtattcttcaaatatttttactagactctgattttcctttggtaaatactaaacaattgatttttcactttcacac

SEQ ID NO: 630146 - DNA, 989 bp, Homo sapiens
gggttcctgcttcaacagtgcttggacggaacccggcgcctcgttccccaccccggccggcgccatagccagcctccgtcacctcttcaccgcaccctcggaactgcccaaggcccccgccgcgctccagcgccggcagccaccgcgcgcgcggctctccttagtcgccgcatgagaccggtcacctcgaggtgcgccagaatacaccaggactcagaggccgccatctaaccgccagatcaaccttggtagcactacgcctcctacgtttacctgtccatgtcttactactttgaccgcgatgaatgtggttttgaagaacttgccaaatactttcttcagcaaactcatgaggagagggaacatgctgaagaaactgatgaaggctgcagaacaaggaggtggccgaatcctacctacagggatatcaaagaaaacgcagaactgttgactgactggcaaagagcgggcctgaacaagcaatggagtcgtccgcattaccacttgtggacaaaacaaaatgttgaatcaggtcactacttggaactggcacaaaaaagggcactggacaaaaatgaccccaatagtgtgaacttcactggagacaacaatcaactggacatgaacacggtgaaagccaataaacgcaattggggtgacacaagtgaacaattggcccacaacaatgggagcgccccgaaatctggctaggcgaggactatctccaagaaaaaagaaacacccggagcaaacgaaataaagccaaacccgagccaaatgccccaaaccagcgagagacacacgagcaccacagcaaggcagcatgggaggacccaacagcaatagggacccacaaaacccctaacgacaatgaaccaacacaaacaaacgcacccacaaaaacgggcgacaacacacaacaaaaacacccaaaacaccaaggcaaaccagaacaaccgaacaacaaaaaacgcaaacacaacaacaag

SEQ ID NO: 630147 - DNA, 527 bp, Homo sapiens
  misc_feature (2)..(2): n is a, c, g, or t
  misc_feature (83)..(83): n is a, c, g, or t
  misc_feature (86)..(86): n is a, c, g, or t
  misc_feature (108)..(108): n is a, c, g, or t
  misc_feature (112)..(112): n is a, c, g, or t
  misc_feature (114)..(114): n is a, c, g, or t
  misc_feature (139)..(139): n is a, c, g, or t
  misc_feature (148)..(149): n is a, c, g, or t
  misc_feature (151)..(152): n is a, c, g, or t
  misc_feature (160)..(160): n is a, c, g, or t
  misc_feature (163)..(164): n is a, c, g, or t
  misc_feature (166)..(167): n is a, c, g, or t
  misc_feature (171)..(172): n is a, c, g, or t
  misc_feature (179)..(179): n is a, c, g, or t
  misc_feature (182)..(182): n is a, c, g, or t
  misc_feature (184)..(184): n is a, c, g, or t
  misc_feature (204)..(204): n is a, c, g, or t
  misc_feature (209)..(209): n is a, c, g, or t
  misc_feature (218)..(218): n is a, c, g, or t
  misc_feature (220)..(221): n is a, c, g, or t
  misc_feature (225)..(225): n is a, c, g, or t
  misc_feature (233)..(233): n is a, c, g, or t
  misc_feature (236)..(236): n is a, c, g, or t
  misc_feature (238)..(238): n is a, c, g, or t
  misc_feature (242)..(242): n is a, c, g, or t
  misc_feature (244)..(244): n is a, c, g, or t
  misc_feature (249)..(249): n is a, c, g, or t
  misc_feature (266)..(266): n is a, c, g, or t
  misc_feature (270)..(270): n is a, c, g, or t
  misc_feature (272)..(272): n is a, c, g, or t
  misc_feature (278)..(278): n is a, c, g, or t
  misc_feature (286)..(287): n is a, c, g, or t
  misc_feature (289)..(291): n is a, c, g, or t
  misc_feature (296)..(298): n is a, c, g, or t
  misc_feature (300)..(301): n is a, c, g, or t
  misc_feature (305)..(306): n is a, c, g, or t
  misc_feature (308)..(309): n is a, c, g, or t
  misc_feature (338)..(338): n is a, c, g, or t
  misc_feature (359)..(359): n is a, c, g, or t
  misc_feature (362)..(362): n is a, c, g, or t
  misc_feature (376)..(376): n is a, c, g, or t
  misc_feature (400)..(400): n is a, c, g, or t
  misc_feature (426)..(426): n is a, c, g, or t
  misc_feature (444)..(444): n is a, c, g, or t
  misc_feature (488)..(488): n is a, c, g, or t
ancctgaaggagcagcagacttaccgttaccacggacacagtatgagtgaccctggagtcagttaccgtacacgagaagaaantcnggaaggaagataggaagatggnaccntnttatgcttctcaaggacaggagggngaacagcanncnngccagtgnggnngnnctannggaaatngangnggaagggaggaaggagattnaggangcggcccantnngccncggccgtnccngngccncntttgnaagagctgggctaccanatcnantccacncaccctcnntnnnaagtnnngnngtgnnanncagtggatcaagtttaagtcagtcagttnaggggaggagaaggagaggtnagncttcaggggctacngacagtgttctcaacttggttaangaggaagaaaacccagtcaatgaaantcaatgaaattcttgganacttccattaagtgtgtagattgagcaggtagtaattgcatgcngtttgtacattagtgcattaaaagatgaattattgagtg

SEQ ID NO: 630148 - DNA, 153 bp, Homo sapiens
gagctatgagccatgcattcattgatgctctggaggtcgacgttgtttcacctagcgtgcgtgtgctagtgcctctcgctgtacaagttccgtcgacacgtgagcacctgtgctgacctccaaatatctgttaagcgtggagccgtggtcgac

SEQ ID NO: 630149 - DNA, 231 bp, Homo sapiens
tgattctagacgatcccctcataatgtgtgcgcagactcagaagtttaactgggttatttgactctagatgaaaagtatgattgcatacgcgtttgcttaacaacaatgcttgtatctattttttaaacagttaggtcctgtcatggctggctcacactctgcgatccgcagcactttggtaggccgaggactaggctgatcacccgaggtcaggcagtttctgagaccag

SEQ ID NO: 630150 - DNA, 288 bp, Homo sapiens
  misc_feature (46)..(46): n is a, c, g, or t
  misc_feature (49)..(49): n is a, c, g, or t
  misc_feature (104)..(104): n is a, c, g, or t
  misc_feature (159)..(159): n is a, c, g, or t
  misc_feature (194)..(194): n is a, c, g, or t
  misc_feature (218)..(218): n is a, c, g, or t
agatgggggagtcgtcgggcgccgggccgggacatggagctgtggncgngtctggccgcggtgttgctgtagctgatgttgttggtgcagctgagccgcgcggncgagttactacgtcaaggtcgtcctgtactgtgcgctgtgcttcatggtgtccgnacgtggcctcgctcgtctgtctgttgcgccacggnggccgagacggtggagaacatgantatcatcggttggtgtcgagcgatggttcaagtacttcttacgggctccgctttcgaagtgcggcaaccc

SEQ ID NO: 630151 - DNA, 323 bp, Homo sapiens
  misc_feature (71)..(71): n is a, c, g, or t
aaaaaaaaaaggggcccccgtttttaacccaaagggggccctttgggggcccctgtgggtttaaaactaanctggggaagcataaaacccccaaaaaagggccggaatttttcttttttttttggggtacatttaaaatacaaccccttattgcccgggggggccctaatactttcccggaggttttttttctttcccggatggcccggctttttaacttttcccggcccaaggttgctttttccccttttttaaaaagggggagttaaccgggattttttttctgaaagaaattaaaagccgaaatccccgttttttgaata

SEQ ID NO: 630152 - DNA, 944 bp, Homo sapiens
  misc_feature (149)..(149): n is a, c, g, or t
  misc_feature (363)..(364): n is a, c, g, or t
  misc_feature (400)..(400): n is a, c, g, or t
  misc_feature (478)..(478): n is a, c, g, or t
  misc_feature (510)..(510): n is a, c, g, or t
  misc_feature (559)..(559): n is a, c, g, or t
  misc_feature (561)..(561): n is a, c, g, or t
  misc_feature (607)..(607): n is a, c, g, or t
  misc_feature (684)..(684): n is a, c, g, or t
  misc_feature (702)..(702): n is a, c, g, or t
  misc_feature (770)..(770): n is a, c, g, or t
  misc_feature (846)..(846): n is a, c, g, or t
  misc_feature (902)..(902): n is a, c, g, or t
gccactccaccttactaccagacaacctgagccaaaccgattagccaaatagagtataggcgatagaaatggaaacctggcgcaatagatatagtacgcgcgagggaaagatgaagaattatagctcaaagcatagatatcagcaaggnactgaaccgcctcatacctgtgctgtcataaggacattcaacatagaacataatcttgtgactagggaggagcgcagagagctgaaggacccgccggagagaccgaaacgcaggcttacctgagatgaaccagcgtaagcacagagcggacaccacggtcgtatggtcagcgaagaatgcagctggggcaaggcattctatcacggtcacgagnngcagacttacaacactaatcgcagatgcccttggtngcataaggctcgagttacgtcgcgcaagcaatcacggacatgccttgaggttcgagacgtatcttaagatgtctggcncgcagacgagataggaccactcccgtaacatntcaccacgtgtggtgaagagtgtgtacagcgtgctcctaggatacgcananacgcgaggcaatgcaaggtgtccctattggggagcagacctagggnaaacgaacgactcgcgtttgggtatgacgaaggaaggctacaacacgacattatgtaaatgcaggttccccagatangtataagggcgccttaanataggcacagcgcacagacctagatgttcaacgtaagatggcggtatccaaggacgtcaatagctagncgcgccatcgtaacacgttagagaatagagtcgccaagaatcactgattaaggctggacatcgtcgcgtcgagcancgcccacatgttggggagcccaagatcgtaatacacgcgcattattaggacagganagctagatatgatgtaggtcatcacagatacagcaatgcacg

SEQ ID NO: 630153 - DNA, 384 bp, Homo sapiens
tagtgtgatctctgaaagagtagtgtcaatataccattaccacgtcatagtgcgcacattgtaaaaataagcggccaaaaagacattatagcggatactggcataatcagaacataaaccgcggattaactaatagcataatgtccatgtgcaatttactgtaatgtgataactatactcacagtattcttaagagaacacgtctcaatacttgggaaatgcacactgaattattaatgaatcaagatgcatgatttcctgctactttcacctggttacaaaaacaattatatcgaaagaggctgataacatcgactaggccacatgttacactgggtgaatctgagtaaagggtatataggagttccttgcactattatgctt

SEQ ID NO: 630154 - DNA, 1079 bp, Homo sapiens
ggtctcgtgtggttcgtcgctacttccgccggtggggggctcgttgtgtccgcgcctcttcctacagggtactctctttgccaccggggtcctcttctcctgccgtgtctattcctccccgtgttctgatgtgagggtccacgtggtgcttttgggcgtggcccgccgcggaaatgtgcctccgcagggggggttccccctcgggtgatggggtgtaccgggcccaaggttctcgtgtgtgtacagaagggcgttagcagttgcgtcacttgcctttcttcgctcccggtctgttggggccgccttgtccgcgctgtctggtggggagatttcgctgtctacggaagatgggcggcgctgggtgtatggggcggcgcctcgttttatttcttgtgcccgtgctcttcacgttctcgtagggactttcgggcccgtgccccctgcgactcagcccgtggagctcacacgggggggcactcgcggtgcgggggctcccgcgctggggtgagaacctcgtttcctcaccaggggtgtctatccgctctgcccaggcttttccgctcacaggctcttttctgtctctgcgagtgcttcgtggcggtgcccttcagttctcacgccactcactatggcgctcacgctaagcgttcgttcaaagatatgttggtctcgtgggctactgactggctgaggcgcacctgtgccggtcgccacggctattctctgtggatgggccaatgccctcaggttgcaaaggccgtgccatgcgtgtaaactaatgagtggggccaccgtgcagttccatgcctgggtgacagaagtgaaatgcctgggcacagaaaacaaaaataagaagtatgccaggcactggtggcgggagcctgttgtcccagctgttcacgtaggactgaggcacgagattcacttgaacctgggaggtggaggttgctgtgagcagacaccacgccactgcactccagcctgggtgacagtgagactctgtctcaataaatataacagtccataaatactgtaacgtttctcccgcgggggagggtgggggggggggggggggggag

SEQ ID NO: 630155 - DNA, 197 bp, Homo sapiens
aggtgtggtggcgtgtgctgtagtcccagctactagggaggctgaggcaggagaattgcttgaacctgggaggcggaggttgcagtgagccgagattgtgccactgcactccagcctaggtaacagagcaggactccatctcagtcaatcaatcaatcaatctcagcggttgaactacccttgacatggttcagctc

SEQ ID NO: 630156 - DNA, 219 bp, Homo sapiens
cagctcggtccctcacaagagcctgtaatgctatgcctcaatttcaaaatacacttgcagccaggcatggtggctcatgcctgtaatcccaggactttgagaagctaaggtgtaagaattgcttgaggccaggaattcaaggctggcctgggcaacatagctagacgccatctaccaaacaaacaaattcccctcccaaatcccggcagaagcaggaag

SEQ ID NO: 630157 - DNA, 652 bp, Homo sapiens
tcaccccaaaaaattaaaacaaaaatgaaattaactcagaaccacacaactatgtggaaattgaataacctgcttgtgaatgactcctgggtaaatacctgaaattaacggcactacgactcacagacacattactttgacacactacactaacgacctaaacgaccacacactgtacccagaactctctgggatgcagctaacagaagtgttagagaccacgaacaattaatacgcactaaatgcccaattcaaaaagctagaaaagatctcaagttaacaacactcacaactaaaatagagaaccaaaaacaaaccccaaagctagcagaatacaagaaataaggatcagagcagaactcaaggatgacagagacacaaaaaatctttcaaaaattaacaaatccaggagctgggttttttggaaaaaaattaatagactggctaactagactattaaagcacgaaacgagagaagaatccaacacaatcagaaatgatacaaggggatatcaccaatgaccccacagaaatacaagcaaccatcagagaatattataaacacctctctgcacataaactagaaaatctagaacacgagaatcacatttctggaaaacataaaccctcataaggttgaacctggaagcaa

SEQ ID NO: 630158 - DNA, 838 bp, Homo sapiens
cactccaccttagtagcaggagcgagaccttagccaatagcattatacccgaaataataagtataggcgacagaaatagaataccatggtcgacaatagatatagttaccgcaatagggacagatggtaaattaataataccaaggctataatgatagacgaatggtacataagtccctataccttctgcataatgaattgaactagataatgaactatgcaaggaaagcccatgctgagagccccgataccagatgagtctacctatgaacggctaagagagcacacccgtctatgtagcaaaatacgggggaaacgacttgaatacggtaggaaggcgagagaactctaagccgacgcccgaggtgataaggcccgagtagataccagaggaatagacatcttaagttcaactgataagagtgagtccaacaggactcactcgtaaaatgcccctgatgaagttttagccgggttaagtccaaatgaggaggcgactctttgggacacgaggttaaaaccgcctggtgaggagagtgaccatagttatatccaccgcatgagtgaggcgcatatagaggtaggctcatacaaagtctagaaagccgttctatgcttaacagccaataactatggaatgcacaaatatggtaagtgggaagtcctgcacacccattgtggaccattctatgcacccctagtaggaagaactgatgtacgtataagtggggaatggcgaaatatctccttcgggttagcctggcgtccggattaaacatgaatttgggtattacggccaatttctcaattaaccaccagttttttacctcctgtacca

SEQ ID NO: 630159 - DNA, 239 bp, Homo sapiens
agcccactcaaacaacatttcactgcacccatgtcctcagtgcccgctctcagttttccagcctatgggcaggttttcattctgcacgttccatcgtgcattttgtgccatgtggcagcacactccctcatccaggcagcagttcacagccatggtgggcagtcagcaaccaatctccattccccagcagtccagcaggcagcaagcagcaccatgtcaccattgcacccatcggtccg

SEQ ID NO: 630160 - DNA, 959 bp, Homo sapiens
gggttgggaggggtggacagcagtctgctggatctaacgaggaaaaagaggtagggttgggaggagaaagacaatcagggtggcaagaatggaggagaaggatttgaacaggtgagcaagaattgcagaggtcgggttgtgatctgagtgcaaaaaggcctggacataaggaatttctccccatttctctagtcgttgtcaataattgcttaactcagttaaaactgtaaagtcgaatgttccatttgcgggccatttggacccattatccaattcgtatgtggccagactgaattgcaaaaaaagacaaggcgcttagggtggatattttgcctgaggcctaaggtttgcaggttttttatggggcagcctagagggctgtgttttggaagggaggaccgggagtttcccataacagagggtaggctcaggagaacagggaaacaaggagaccgtcctggacggccagagggagacaaaaggagcaatcatcatcaccgctgcctttttcattcctggaacgggatcaaaatggattagaggcgtctccctaagaccaggtgatgggatgatcagcgagtacctggcacacgccggagccttgctgaaccgacattggattcttggaccgtagacaccaagagaggcatgtggctttcccttgttgactgggctcctaggaaacttaccaaataggaaggccagtgacccaatgtgcatgcaacagagatgcaactgagctgaggagcttcctttgtcctgctgctgtgggctgttactcaagtgaaggggtagtcaaggggattggacaaagcctcccggacagagatgagatcggatcggggtggtcaacctgaaaccgcaagaaaaggatgtggcgaaaaatctgcaacgactcacgaggatagccaaagaacacaagaaggaggaaacgaaagaggcaaaaaaaaagagacaaa

SEQ ID NO: 630161 - DNA, 269 bp, Homo sapiens
gtcgacgaaaaagagtaaagtaaggctgaatagagatcttattctatggcagaggcttagaggctaaagaaaatggaagcaaggtcttacaagtctgatctacaagtgaatgtgtattgagagtccactaagacttttaaggagtaagaatttataatggttcagatcagttgtgtgcttttcctgtagcagatctcagctttaaaatagagaagataggctgggtgtggtggtacacgcccgtaatcccagctactcgggaagctgag

SEQ ID NO: 630162 - DNA, 300 bp, Homo sapiens
gacaaatgtggtatatataccccgtagaatactatttggccattaaaaaaactaaattctgttattctcagcaacatgtatgatcttagaagacattatgttaagtaagccaggcacagaaagataaatactccatgtactgtacttatgtggaaggtaaaaaagatctcatagaagtagagagtggctcatgcctctaatctcggtgctttgggagtctaaggtgggaggatcacttgaggcctggagtttgagaccagcctgagcaacatctctcaaaattaaaaaaaaaagtcgacg

SEQ ID NO: 630163 - DNA, 104 bp, Homo sapiens
tgatgttatcccaacacgaaccaaagctgctctctgtcacccctgcagagctacttatactgcaggttttgcccaataatacaaacaatagagcagataccggc

SEQ ID NO: 630164 - DNA, 325 bp, Homo sapiens
  misc_feature (156)..(156): n is a, c, g, or t
tgttctctgctcccctcctgggtgcccagtgcccactgcctgatgccccagctgctctccagctaccctgagtcccccacgacagcacccttcccagggtgccctaacaggttctgtaatgcagaattcccagaccctccttcaatcccagcccanattcccaacccttcccttaagcactcaacccaagcaacaacttaggaaaataaatctgactcggccgggcgcagtggctcacgcctgtaatcccagcaccttggaaggccgaggcgggcggatcacgaggtcaggagatcgagaccatcctggccaacacggtgtcgac

SEQ ID NO: 630165 - DNA, 204 bp, Homo sapiens
gtgatcatgcctggaatcgcagagcacttctgagaggctgcgtgcggacgacatttgagggcagtgcgttggcgaccagccatggccgagatggtgaaaacctgtgtcgtactaaaaatacaaaaattagccgtgcatggtgacgtacacctgtaatcccagctactcgggaggctgaggcaagagaatggcttgaacctggga

SEQ ID NO: 630166 - DNA, 459 bp, Homo sapiens
  misc_feature (98)..(98): n is a, c, g, or t
  misc_feature (108)..(108): n is a, c, g, or t
  misc_feature (286)..(286): n is a, c, g, or t
  misc_feature (292)..(292): n is a, c, g, or t
  misc_feature (358)..(358): n is a, c, g, or t
ccagcacagcgcacgccagccagcccggcagggccgcagcatcccaggccggggatcgccaggctcctttttcaagtgcatttctgagatacaacagncaatttcccnaactgcgcaagtgaaaacaatgtttggctaaggaggctggtgaggggctgacagtcttaattctaagggacgtctccagcggtgacacggggctccgtccccaagcagaccccctgctgggatcagtggaacccgacccagtgaccttctgcctggctgaagaaagccctatgggtgnattaancaagcgctgcgtgcctgcaagatctgactgtaaagctgttcccatgagcagcctctgagagccttngtggcccccaagcaggccagggcaggcccagactgaggggtgaggggaaggcctccctgcacttggtggagaagttagaaccagacgagaggaaccctcgg

SEQ ID NO: 630167 - DNA, 453 bp, Homo sapiens
atcctctgggcggcccttatggatggggtattgcaatagttcccatttggccgatgagggacctccccctttaggggaggatgccgtactcaaggtcacccaactgggggggggcaagctttttgtttaacccaaggaatctcgggggggggccaggactctcacccttcagtgggggccgcctttttttggcacacattcaggcggggataggcaggtttccggtccccggtctcggctggggccggtcaggctccccccgggaaaatggaggcctggcaatttttttgtggtgctgttagttcccctttaggaagtgaggctttttgggctctcgtagttaaaggtgtgttcgcctggcaaaaaaaaggaaccaaaaaagggagatttgcatcacaatgaaccttcaattcaacccaaataaaaccaccttttaaaccatgagagacagct

SEQ ID NO: 630168 - DNA, 390 bp, Homo sapiens
  misc_feature (5)..(5): n is a, c, g, or t
  misc_feature (14)..(14): n is a, c, g, or t
  misc_feature (51)..(51): n is a, c, g, or t
  misc_feature (116)..(116): n is a, c, g, or t
  misc_feature (196)..(196): n is a, c, g, or t
  misc_feature (316)..(316): n is a, c, g, or t
  misc_feature (343)..(343): n is a, c, g, or t
  misc_feature (361)..(361): n is a, c, g, or t
tagcnctttagagnccctaggaggatcatttgaggccccaggagtttgagncccacccctgggcaaacatagcgaaactctgtctctataaaaaaatgaaaaaattaccccaggcnatgggctgtgcacctgtaatccccagcactttggaaggccgaggcaggaagattgcttgagcctaggaatttgagatcancctgggcaatatgatgagaccctttctctacaaaaactagaaaaaattaactggcgtgttggtgcacgcctgtagtcccggacactcaggaggctgagatgggaggattgcttaagcccnggaagacaagcttgcagtaagctgtgnacggccactgcactccancctgggtgacagagccagaccttgtctca

SEQ ID NO: 630169 - DNA, 167 bp, Homo sapiens
gaggatccttcgagccgttcattacatccgttactgtttcccatattggccaggctggttctgaacttctgacctcaggtgatccgcctgcctcagcttcccaaagtattgggattacaggtgtgagccactctgtacctgaccagataatctttaaaaatctcctc

SEQ ID NO: 630170 - DNA, 347 bp, Homo sapiens
  misc_feature (49)..(49): n is a, c, g, or t
  misc_feature (145)..(145): n is a, c, g, or t
  misc_feature (227)..(228): n is a, c, g, or t
  misc_feature (243)..(243): n is a, c, g, or t
  misc_feature (245)..(246): n is a, c, g, or t
ctgacgtcgaggtgtggaaatcagaagtctgtgagagcgcgggactgtnggcagctctgggtcccaactggcccgaccgctctgcttcacctccagctctgtctcctctactcttgggtcgagatccctttggagccacaacggngaaccctgtggtcctcaggcaggtgtaccttgagtcagccaggagccctcttttcctgtgtcaaagcctgccctcgctcgtnngctcacctctggtcncnnctccaagactgcccctgctcctgcagtttcccctcatgactctaggcctctgcccccttgctctaagccacagccttctagctacacttttagcaattacc

SEQ ID NO: 630171 - DNA, 414 bp, Homo sapiens
  misc_feature (214)..(214): n is a, c, g, or t
  misc_feature (259)..(259): n is a, c, g, or t
  misc_feature (281)..(281): n is a, c, g, or t
  misc_feature (318)..(318): n is a, c, g, or t
  misc_feature (324)..(324): n is a, c, g, or t
  misc_feature (347)..(347): n is a, c, g, or t
  misc_feature (355)..(355): n is a, c, g, or t
gcgtttgtccagtattattcaaatgaccggacataatgaaggatggcgacaggacgaaggcttctgccctaagatttctctcatctcgtttttaccatcttgtcttcgtggccctcacttgtggttgtgtctgctgtggtgttatggacactgctagtgttaatacagcacaataagaaagtgtgaaaggggccgggaaaggtggcgggacggnggcggcacgtggggttcccctcacagcactgtgcacggtgcctgnttggggttcctccatgttggancagcaacgttgagcggcccaattttgcggcagggaantttcantgggtgatcaagggcaagccccnttatttancaagacaaagcaaatttggggtttaagccagttcaaggaggtttgcaggtaggttgggg

SEQ ID NO: 630172 - DNA, 268 bp, Homo sapiens
tcgctcccggctccgctctctgcgctcccgctcaaggtcccggtccaggtccctgtgcggacacggggaggggccggacctctcatcgtaccgggaggtgtcgtcgcgggctgaatgccggatgttcacatcagaccctcctcttctggtaccaacgaggcctcctcctaaccgctggggcctccaacccttcacggttcggccactccccacgtccacaaggaacatcctgccatcaataatcttgccatctgcgtgtttgtaagcg

SEQ ID NO: 630173 - DNA, 183 bp, Homo sapiens
gaggatccccgcgctttcgcccatgtttcccacccatgggctccctgagaagaagatgggcatcatggcttcagatacagcagaaagtgttactttgacgcgagttcggagtagcctaatcgcgagacacgttgcgtggcgtgatggttaggggagatggactttcaatgggttgtccagtgc

SEQ ID NO: 630174 - DNA, 165 bp, Homo sapiens
tttcaattggcagtgagccatctgctttaaccccttcccttgttgtgctcagttatggaaatgccaaagtccttaacattcagttccataaactttacctcaccttctttatcccccttattaaattgttggctttggggtcaaaagcgatggttcaccgcaatg

SEQ ID NO: 630175 - DNA, 231 bp, Homo sapiens
acatgtacaataagaacttcaataattgtatatacgcctttgctgtattttcccctcaagattatcacctgtgtgttcgacagtcaatattccatctggtaccagttcacatccttgcttatccatgtaacacgcattgtttcacaaacagaaaacatgtaaagcagtattaaaatttggccaaacaagtgttctgtatctactttaataaatggttattctttaaaaaaa

SEQ ID NO: 630176 - DNA, 450 bp, Homo sapiens
  misc_feature (22)..(22): n is a, c, g, or t
  misc_feature (29)..(29): n is a, c, g, or t
  misc_feature (56)..(56): n is a, c, g, or t
  misc_feature (277)..(277): n is a, c, g, or t
  misc_feature (407)..(407): n is a, c, g, or t
  misc_feature (417)..(417): n is a, c, g, or t
  misc_feature (442)..(442): n is a, c, g, or t
cccgtgggccctaccttacagntttaaanatgaaaagcagtattatgccctaaacncccctacagtgccaaatattttccacaatgatttccccctaaagataacctaagcaaaaagtaagaattggtggggaccaaagaggaagtggaaattgttggaaaggtggcccgggccgccaggttgtcacgccctgtaatccccagtgctttgggaggcccaaggtgagtggatcaccctgaggtcaggagttcaatacccagcctggcccaacatggtnaaaccccatctctactaaaagtacaaaaaattagctgggcatggtggcaggcgcctgtaattcccaggtactcaggagggtgaggcaggagaatcgcttgaacccgggaggtagaggttgcagtgagccnagattgcatnccagcctgggggacaagagaaaaantccttctc

SEQ ID NO: 630177 - DNA, 254 bp, Homo sapiens
gtgcataaagtcctttctaaccatttctggtttagaaaacattcagccatcctagaaactagcatatttatttttgcctctttcgttttaccttcctttttagggtgggggaaattggtttttgtcttttacttacagggtactaatgcaaaggtcccactctaggtggtagctgaaggcgaattggctatttggggctaccactaatttctggtttacctggtattttggcttccctaacttttatggtctaa

SEQ ID NO: 630178 - DNA, 436 bp, Homo sapiens
  misc_feature (379)..(379): n is a, c, g, or t
  misc_feature (388)..(388): n is a, c, g, or t
  misc_feature (412)..(412): n is a, c, g, or t
  misc_feature (424)..(424): n is a, c, g, or t
tctgtctataaaacttccaccacagggctgtgcttgaatgtcagagcctactctggctggctctgtgattcgtgaatcacattcattgctcagttaatctcctttaaatttaattcagctgaagtttttcttttgtcacgttgctgccaccctttttaatgcctaacccacctttgacagctctattttgaaccttgtttaacttattatttattagcaagcctttagatccataaaatgtctttggtcagaatatgtaaggcaaccatttaggctggggtataggaattctttctagtcaacagccttttcacttaaagtactatgtataaggccttgctttacagttatgtgggttttattattatggggaaattcngggggccgnccacatttttgtttgtaaatagcngtttttttgggngtgtgcacaatt

SEQ ID NO: 630179 - DNA, 172 bp, Homo sapiens
  misc_feature (88)..(88): n is a, c, g, or t
  misc_feature (90)..(90): n is a, c, g, or t
agcttttccattttttgcagcggcgtgatctgcgcggcttcgtataccggcgcgcgcagtaccgctctgaggtattccgccccctcgngngcggcgatcagggttgagactcggccatcataacccccaagtttcttatcgcgcaccgcgccttgtcgcgctgaagccgggc

SEQ ID NO: 630180 - DNA, 284 bp, Homo sapiens
cccaaggggggggggggggcccccattttacctttttttaaaattttttttagggggggggccccccccttccccccctttttgaaaaagaaaaaaaagaaaccggggttttttttaaacccccctttttttttcccccccgggggcccccccccgggggggggggggggaacccccccttttttttgtttggggccccccccctttggggggggggggggggggggttttttttttttttttggccgctttttttttaagggcccccccttggggggggggga

SEQ ID NO: 630181 - DNA, 257 bp, Homo sapiens
  misc_feature (6)..(6): n is a, c, g, or t
actagntccaaccatacccattttgctagcttttaatttgcttcaaaaagtactgtagtttcagctacttgggaggctgaggcaggaggatcatgtgggcccaggaatttgagactgtccggggcaatatagcaagaccctaccctatgtcaaaaaaaaaaaggggtaccaaaattgtctctcacttactgggtgaaattagcaccaactttgtgccactttgattagtttgggtgtcccaattctggtttccttct

SEQ ID NO: 630182 - DNA, 136 bp, Homo sapiens
agcactttcggaggacgaggcacgtggatcgcttgaactcaggagttcgagaccagcctggggaacatggccaaacctgtctctacaaaaaatttagctaggcatggtggtgtaggcctgtaagtcccagctactt

SEQ ID NO: 630183 - DNA, 223 bp, Homo sapiens
tgagtagcccagtaaccttgcttgctttataactgttcgtgcgtccgcagctgtatcttcttccttttttccccacttcttgggggtcagtagtgcacaggacgccctccccaaggtgttcgacaccattttggacaacatggtgaaacactgtctcgactaaaaatacaaatattagctgggagtggcggcagacacctattatcccagctactcaggaggc

SEQ ID NO: 630184 - DNA, 1091 bp, Homo sapiens
agccgctggcctcaagcgtgctgaggatcctgccagcgccgcacctgcccgcccggtcctcgggctgtcgcagcgcggggaccaccctactgggagctgccgctgacatgagcgcagtgtcgcagccccaggctgctcatgccccactggagaagccggccagcactgcgatcctgtgtaatacctgtgggaatgtgtgcaagggagaggtgctgcgtgtgcagaacaagtacttccacatcaggtgctttgtgtgcaaagcgtgtggctgtgacctggctgagggtggcttcttcgtgaggcagggtgagcacatttgcacacgtgactaccagcggctctatggcactcgctgcttcagctgtgaccgcttcattgacaggcgaagtggtgtcggcgcttgggaagacctaccaccctgactgcttcgtgtgtgctgtctgcaggctgccctttcctcctggggaccgtgtgaccttcaacgggaaggagtgtatgtgccagaagtgttccccagccacattgctgggcaacagtgctcacgtggcccaggtcctccggagttgtgggggctgtggccttagaaatcaagaatggccaggccctggtggctttggacaagcactggcacctgggatgcttcaagtgccagacttgtgggaaaactcctccatgccgagtacatcagcaaggacgggctgcccttactgcgaggtgattatcacggcaggttggcatccgctgcacgctgtacaacgtactccagggcccggtgcaacaggccgaagaaaggttacaaccttattgcgcattcgtcaggggcccaaagttcacaagggccaggaaatacctgtaaggcacccccaatgggcctcgcggagtttcagtggtcacggctctagacagagcgagcaccccgatcgcaagcattgtcgctcaccaccagatggccctcgttgtgagaacagtgagctactccgaagctcgttcacaagtacatatcgaccacagatatatacaagcaggtaccacaagcatcatataacaaacacatgagacactacaaccgactctcctctttttgtctactc

SEQ ID NO: 630185 - DNA, 2380 bp, Homo sapiens
  misc_feature (593)..(593): n is a, c, g, or t
  misc_feature (1891)..(1891): n is a, c, g, or t
agacggggtttgacgagtgtgggagcaacaagaggacgctaggcgccgagcgacatttgctcgtgctaaggaccccgcgggggacctcagagagagcaccggagggatgatgccttccagatgaactcgatccccaatggggcagcgctatcgacgactgacttcctggcgcgctgcacccatcacttttttcccccttctactacagcactcttgtggccctctgtgcttcatccaaattgagcccatctggtcggcatgcgacaagcaactcacaggaggaggaatgccggcacattgcgccccttgtggggcctgggcccactgagcgcctccccccttgggctctgagtgctttctatggggctgagccgggtggaatcgttggtggggctcccctacttcgacttgcggcgcggggccttactgcgaagccccattgtgccccccgtgcttcttggcgctagtgggccaaaacccctaccactcacgtgcctcttgggctttgcccaggcaattcgttgttccacttccactcccgggctgtggagcgtgccttgcgccaagaaagtggcgctggagaaacccgctcnccacttttcgcacgccagaggcgccgcactgtggaacagcttgcaccttggaatgaaacgaggggcgagttgaaggacaaaagagccggtgagtcacacaggaagcggccccgagagggttcagcaggtccctgggccgccctccagcctccgaaaaagcgggaccccggaccctcccgcacgaagccaagacgccaagaaggcttagggagaaaagacgggacgaaagattggggaacacagaaaggggccttctgaactacggtgctcaagagggacttagtaggagacccttccggttgcgacacccaaccgtgagcaaccactttggtccccccacgacgccaaaaggtgaggaccttggaggatatgagggaaaagataggccccaggaccgaggccactatgtctgcccaagagggttcgccagccctcccccaccccggccccaccaaggaaaagagcccagaaaaggacaacgcggatggggaaggagccccgcccatcaggatagcacaccaacgaccattaggaccgctcacgggtgcgggcctaccacaaacatcttgggggatacaccctgtaggataagacacacttggaaatattggagagaaacacccaattgaagtgagaccccaccaagacacacagaataaatggaattccccgcctgagacgcaaccctaccccatcacaactgtgaattaacaatagaaagaagagatagaaatgagaaaggagaacacacatccactgacaacacttaggagaagagaaatagccgccgaggaccgccccgcgccccacgagacacaccccccatggtgagacaccagagagacaccccccccggtgtgtagccccgttgtgcaagagagagaagttcatacacaaatatgaagcaaagattacaaagaagagaacactacgaaagagcagacgaacacaacgaagacacagatacccacatcccactagagtgcccgagagacaaaacaccgaatgtggcgagagaaaaataaaaacgacaagaacagcaccccacaattcgccgacccatgtagagaccacctcaaacacaccccgacataacagcgacaaaagagaaaaagaaggagatagacaaatgaagacgaaaaaacaaccaaaacaagagaagtaataatagaaaacaccacaccataggaaacgcacaaattataaataaagaaccacagacagacgataaagaacaatagagcaccacaataggttgaaaaaagggacgacaaatagcacaaaggaagtagaatacnaagacacacaagaatgagtgatatgatagaaacacccaaacacacacatgaagcaaagatataaccagaccaacaagagtagaacacaacaaaggaggaaaaacacaccatgatgcacacgaaaccacaacagtagccacaccaacacaacatatcgcacacacagtgagtgagaccgaagtgcaagagaacaatcactacggaaaagtgaacaagcaaatcgaacaacaacacatacgagcagcgcatgatagacaagaacacaagatagaagaagaataaacaaaaacaatgaggtgccacccgcctcgcatgccgcaaacaccacagagagagaaaacaaagaaaggaagaaaacacatcaaaaagtagaaaagcatcagaaggccaactacaacggacgaggcctcacaaccgacaccacaccacccagcgcccacgcgtatgatcaaaacacaaaccagatctacagaaacagagcaccaacaa

SEQ ID NO: 630186 - DNA, 504 bp, Homo sapiens
  misc_feature (31)..(31): n is a, c, g, or t
  misc_feature (78)..(78): n is a, c, g, or t
  misc_feature (87)..(87): n is a, c, g, or t
  misc_feature (126)..(126): n is a, c, g, or t
  misc_feature (283)..(283): n is a, c, g, or t
  misc_feature (288)..(288): n is a, c, g, or t
  misc_feature (428)..(428): n is a, c, g, or t
  misc_feature (443)..(443): n is a, c, g, or t
  misc_feature (476)..(476): n is a, c, g, or t
cagacacaccctcggttcccgatcccgaatnatggccagcctcagtcccccagcagaagagcaccaggtcggaaagancagcatgcnggcattcctagagcccccatgtgggggcttctgaaactntgaggaggtagcagccctgccagaggtgaggggactgtgctggcccagaggggagcccaccagtccacagtcagctcctgccagcacagtggggcaggcaggcagagagggcaccacctcagtgacacagcacctgggtctacaaacatgcagcagntgccnccatgataactgaaagttggggggagatgaccccccgggcgctgctttaacggaagtcaaaaggcctccgtccgagcccgcacacgggcgacctctgacatgagggtatggccagcacatgatgggtgggcagagcgcgnagataccccgcctgnggcagtgcaccagccacccggacctcccgctgnttcttcacccacgtctgcaacgggagat

SEQ ID NO: 630187 - DNA, 309 bp, Homo sapiens
  misc_feature (13)..(13): n is a, c, g, or t
ttttcaaacatanctgtggagtgagttaggtttgggggatgtgtggagggcttggtttggtttctcgagacgggttcttgctttgtcgcccgggctggagtgcggtgccagatcacggctcactgcggccttgacctcccggatttaattacattcaccaaccgggcggggtggctcgtgcctgtgatcccggcactttgggatgatgaggcgggaggattgcttgggccccaggagttggagaccagcccgggcaacatagtgagactctgtctttaaaaaaaaataaacaaaataattacattcaaa

SEQ ID NO: 630188 - DNA, 446 bp, Homo sapiens
  misc_feature (10)..(10): n is a, c, g, or t
gaattcccgngcccacattcatggccacatatgtagcaaattttgtgaaaacaccaccatttgaagcttctgtaattttgagccctgctctaacaacaagcataatataaaattagttagattttgcaagtctacaaatgaggtcttgcaacagaactcacagcccttttacttttttcccccaactttagcaatgtaggatcttgagcccttaatttttggggttttttaaaatccagaagggatatagaaaccctttcagatttttcatttgatttgtttttgcagatgtttttttatcaaaaaccctattttaccctacaaatatttgttgcccaggcagaaactgctggatttagacatttttatttcaggtcattaaaaactgcaaaacccatttggatcatggacccaactgacttaaaataaatttacatgtttattta

SEQ ID NO: 630189 - DNA, 367 bp, Homo sapiens
gagatactcaaagtcagagaattgaagagcgcacttaatcttaaatcggaaaatgacttgtgatccaaatacccatagaactccaagaatttaatggcacctggaaataatcaagataaagctatcttgattatttcaagacataatcaagaaataatcaagataaagctatcttgattattccaaggaaatatgacctatgccggttagatttacaaccaattcaagctaaccagcttcttctgggctcactacagtcctttaaacccagttatttgtgaatattcccttacctctctgaccacacctcagtttccctaactggctcctcctttcctctcctgagattcctaaaattctgctcgtg

SEQ ID NO: 630190 - DNA, 743 bp, Homo sapiens
gtgagattacggcagagagcaccgcccagcagccagtgggttcccgcgtcgtgcctgagcagtctgatgccttgatcctcgcccacagtatcctcgtagcgatggccgtcaacgaagatcgcgatcttcggcgccactggaccagatctggagactcaactacccatggcgcacgcgagtgccagcacgtgttactcgaattgacagtgctgcgtgcgggactcctctcatggctgctcatcagagggcggccggcggcccacgtggtagtgggagatgttctgcaggcagccgatgtggacaagaccgtggctgggcaggacgctgtcatcgtgctgctgggcacccgcaatgacctcagtcccacgacagtgatgtccgagggcgcccggaacattgtggcagccatgaaggctcatggtgtggacaaggtcgtggctgcacctcggctttcctgctctgggaccctaccaaggtgcccccacgactgcaggctgtgactgatgaccacatccggatgcacaaggtgctgcgggaatcaggcctgaagtacgtggctgtgatgccgcacacataggagaccagccactaaactggggcgtacacagtgaccctggatggacgagggccctcaagggtcatctccaaaacatgacctgggccatttcatgctgcgctgctcaacacgaatgagtacgacggacacaggactaaccctcacacagtacagtagcatctgtccc

SEQ ID NO: 630191 - DNA, 254 bp, Homo sapiens
caagcggaatgcggcccccaactttccctttatcccacctgtggacgtcttggtcatccttcaacctcttctgtgaagtctgtcctgcgagctgagctcacactgactcttgggaaacacttccgagactcttagaaccaattattgtatccacaggacatctgcgatgatccccgtctgattgtgggcaatatcagcaaccaccagctgatccaagggagactgggacacaagccaatggtctctgcgttttc

SEQ ID NO: 630192 - DNA, 654 bp, Homo sapiens
gcaggcaggcggcgggcgctccagaccgcttctcctcctcctcttgctcctccgtgctcctgcgtcctacgccgggaggccgcccgtcgagtacctgacgcgagcgccgaggtcatgcgcgctgcgcgccatcccgtcccgtcgggctacgtcggagggcagcgctgccggagggaaaggcttgaaccgcacggccctggcggagctgagcgacggctagcgggcctggagcagacccgtcggtcggcgcgcagggcaacctatgggagacggcgagcatgcagtgcccggaagcggcgggagcgagccgtgaaatgaacgcgccgtttggtgttcgtagtcttccatatcgtgcctccctagaggcagaggtggacgcacttgcgggatgacatgtgagtagcccgaagggacgttgtcacaatgactcagaccacagggacacccccagagacgtccttgccttgacgaagcgtcccgaactcaatacggtaaatgcccggcggcccaaagggttggctgcgggggacacgaaaaggttgcgtatactagtgcaaggcggtccgcgttcgggagaagggcgcgtctcgtagcaatcaattcgaaagacacgatttgatcgcatggtaccctccgggcttcgactcaaaaatg

SEQ ID NO: 630193 - DNA, 268 bp, Homo sapiens
cgatctagagcatccccttgggtgcatgcatgtgggcacttcccaaagccattccattagtacaagatgattgatttgcccgctcggggcaatgactatcttcttcctttgaagaaacttggaagcagagcccagttccatggaccatgagggaagggtacacaccaagtgttggggagacacagcaggtggtgtcccaccatgaagcagggtcctgagccaagacctacatgcacacatgcacacatcccacatgcattcacccagg

SEQ ID NO: 630194 - DNA, 113 bp, Homo sapiens
acacttgtagaattgattagattacctgtttatttaatgtgagttgtgccttttgtctcaatcttccaatacaggtatattgagaaaaaaagcagtctaataaaatcctagac

SEQ ID NO: 630195 - DNA, 328 bp, Homo sapiens
ccatactgtgaaggtgagactgcctaggaattctgtcacatttacacacacaccctgggcaaagtgatattttttttttccatgtagaacaaattatgggcagaaagtgaagttagttttagaagtgctgtttgtggttggagaattgtaaaaatcttttaaagggataagggaattagtggcttttaatataaccactgtgttaggccgaaacactcactgtgtacatgggtgtatgtggtggttacggtggctgtctccaaagactctcatctcttttaatcactgcgaataaagcaatactgtcttgagagaatgcacctttggg

SEQ ID NO: 630196 - DNA, 852 bp, Homo sapiens
ggagcagccctggaggctgtgaggtgcagcaaagttttaagtttacctgagcccgggaggcaggggtgcagcgagctgagatcgtaccactgcactccagcctgggcaacagagtgagaccctgtctcaaaaagaaaaaaaaaaaagagagaaatcaggaacatcatgaaagatacagcaaaaggttttaccccagcccacggcaccacaccggggatggtgacaattaactggataaatggttccttttccggttcggaactggactaggtggtgcgtggatggaccagtgaaaagaaaatccggttggggtagggaagagggaagtagaaaacctcttggtatctcggtgtccaagaaactgggaagagacatgagggagcagagacctcgcggttgagtgttgggctctgcactaaacagctgtgtgatctggtctagtgccttaacctctctgagcctcagttgtcacatcagtaagcatgggataatgacatccacatgcccacttcaccagagctgctgtgaggcctggatgacgaaatgtcagacaagtctctcgcacacataacgtcaaatacacgtgtggtccggaacagtctcaacgggagtggtagccaacctggatagccctccaattcaagaataagcgtgcatgagagatgcaacggcacaatgtgccgtgagtgaaacctcggaaaccccgagagaggcgtggcacatcagctcctatacaagggaccatcggtgggcccaacacgacatagcagactatcgaagcaccaggatccagaagaagggccaggcctgggaaggaagaccttaaccgacaacgacgtagaggcaacggga

SEQ ID NO: 630197 - DNA, 569 bp, Homo sapiens
  misc_feature (6)..(6): n is a, c, g, or t
  misc_feature (27)..(27): n is a, c, g, or t
  misc_feature (32)..(32): n is a, c, g, or t
  misc_feature (34)..(34): n is a, c, g, or t
  misc_feature (39)..(39): n is a, c, g, or t
  misc_feature (78)..(78): n is a, c, g, or t
  misc_feature (95)..(95): n is a, c, g, or t
  misc_feature (105)..(105): n is a, c, g, or t
  misc_feature (107)..(107): n is a, c, g, or t
  misc_feature (111)..(111): n is a, c, g, or t
  misc_feature (124)..(124): n is a, c, g, or t
  misc_feature (171)..(171): n is a, c, g, or t
  misc_feature (193)..(193): n is a, c, g, or t
  misc_feature (205)..(205): n is a, c, g, or t
  misc_feature (208)..(208): n is a, c, g, or t
  misc_feature (218)..(218): n is a, c, g, or t
  misc_feature (238)..(239): n is a, c, g, or t
  misc_feature (260)..(260): n is a, c, g, or t
  misc_feature (265)..(265): n is a, c, g, or t
  misc_feature (279)..(279): n is a, c, g, or t
  misc_feature (281)..(281): n is a, c, g, or t
  misc_feature (291)..(291): n is a, c, g, or t
  misc_feature (294)..(294): n is a, c, g, or t
  misc_feature (298)..(298): n is a, c, g, or t
  misc_feature (311)..(311): n is a, c, g, or t
  misc_feature (319)..(319): n is a, c, g, or t
  misc_feature (334)..(334): n is a, c, g, or t
  misc_feature (348)..(348): n is a, c, g, or t
  misc_feature (367)..(367): n is a, c, g, or t
  misc_feature (371)..(371): n is a, c, g, or t
  misc_feature (374)..(374): n is a, c, g, or t
  misc_feature (376)..(376): n is a, c, g, or t
  misc_feature (392)..(392): n is a, c, g, or t
  misc_feature (395)..(395): n is a, c, g, or t
  misc_feature (403)..(403): n is a, c, g, or t
  misc_feature (408)..(408): n is a, c, g, or t
  misc_feature (426)..(426): n is a, c, g, or t
  misc_feature (433)..(433): n is a, c, g, or t
  misc_feature (435)..(435): n is a, c, g, or t
  misc_feature (438)..(438): n is a, c, g, or t
  misc_feature (444)..(444): n is a, c, g, or t
  misc_feature (448)..(448): n is a, c, g, or t
  misc_feature (456)..(456): n is a, c, g, or t
  misc_feature (463)..(463): n is a, c, g, or t
  misc_feature (472)..(472): n is a, c, g, or t
  misc_feature (475)..(475): n is a, c, g, or t
  misc_feature (485)..(485): n is a, c, g, or t
  misc_feature (522)..(522): n is a, c, g, or t
  misc_feature (543)..(544): n is a, c, g, or t
  misc_feature (547)..(547): n is a, c, g, or t
  misc_feature (551)..(551): n is a, c, g, or t
  misc_feature (563)..(563): n is a, c, g, or t
  misc_feature (565)..(565): n is a, c, g, or t
taaaanaaatttattctttattaaganacaangntaggngttatgaaggatttctgttggaaaaaattttgaaaaaanagtagctttagtttaanaacttgcacngnaganaaaattgttaaanaaattcaaaaaaaagtccaagtattagttcaatgtcccgtatttgantccaagatcttcaaaggaaggncttctgcaaaanaanatgctcctanaaagccgacatatttaaggnngcttgatttccttaaaattantccantgaaagcttctggngnaatcccacanagnaagncagtcttcattgnaaaagggnaggaaaggcctcgancccttttcccccgnggcctctttgttgttgggnaccnccncncgcacctcgaacgccnctngcggaacnagganaaccccccggggaaaaancggctcnancgnggggangaanagccccangacctcnggagggagnagnaccccttgcncctcaaaaaccccttcctcaagctccaaattgaaaancttcaaaaccaaagtagggannttnaaanccaaaaagaaantnatgg

SEQ ID NO: 630198 - DNA, 923 bp, Homo sapiens
tgcggtgactcacacctgtaatcccagcactttgggaggctgaggtgggcggatcacaaagtcaggagatcgagaccagcctggctaacatggtgaaaccccgtctctattaaaaatacaaaaaaaaattagccgggcgtggtgatgggcgcccgtcgtcccagctacctgggagactgagtcaggagaatggcgtgaacccgggaggcggagcttgcagtgatcgcaccactgcattccaggtcaggcaacagagtgagactccatctcaaaaaaaatacaaaactaaaaataattagtcaagatataatgccatcaggatatgaaggacacacacagaataggtggaacaaaagtggtagggcatccataccaagaaactcaaaatcagtagggcaaagacatggacacactgaacagacatgggggactcaggggaaaaacttccaaggtgtcctctgtgaactaggagtacagaaaagtgcagagcagggaaaggagcacggagaacgcctgaagaagtagccatatcaggagatagaggggcttgaatacccatacgtaggacagtaggggccttccactgacaggagtttaaggaggggaatacatgattcaggtggtctgattgtagacctgccatcggaagagatgaggaacacggattaagcaggggcagcgcgggaggaacgagaaccaaccagggaccgtgcagataactgctgcaacgctacgccaacgcagacgttaaccacaggaagtctgaacagtgggatgaagcaaatgcaaactcaagccaatagcacaggggagcacacaggacgaaaggaacacatcaggccgggacagaaggacaggacaccgaagacaacaacgacccaccggcatgacccaacaccaagacgcagcaaagggagcaggag

SEQ ID NO: 630199 - DNA, 166 bp, Homo sapiens
ctgagccggaccgcgcttgatgccttggtgaaaaagggaatgtcttccataaaaactagacagaagcattctcagaaacttgttgtgatgtgtgtacccagccaaaggagttgaacatttctattgatagagcagttttgaaacactctttttgtggaaaatgcag

SEQ ID NO: 630200 - DNA, 418 bp, Homo sapiens
aactgcgaagaggtgacgatcccggcccctgggttcccagcagcacacgggaagtctgactctcaactcccccgctaaagtgcctgtactttagtgaacctgagaggtgatgtgagtaatccgcgctgttctttgcagcagtgcgttccaagctctgtttttggtgagccgaatgggcatggctgcgctggatcctgcgcctccggacgtgctagccatttccagtgtcccaactactgtcttcgtgaggtcttcatcgaaagtgccatttcccaacgtcttttgggatttacatctgtctgtgttaaaataatcaaacgaaaaatcagtcctgtgttgtcagcatgattcatgtatttatatagatttgattattttaattatcctgtctcttttatatgtaaattttatgtacaga

SEQ ID NO: 630201 - DNA, 507 bp, Homo sapiens
aattatgatacagaaaaataggggccgaattcttttttttaataaccccttagcctttgaaaaaaccaaggcttttggtaacaaaggcctgccggctcaaattccccactttgtttttggaactccaaattccataaattgggggtttggcaccccgcccctaaaaaaacccatgcccgataagcctgaaaatatataaggagaaatgcccaaacaggggaggctaaagccctcccccaaaaattttatatttccccaagagggcccaaaaggcacggaagtttgtcttctacacctatgcaaaaggtttctcttttgaccccattttaaaggatccttccaaactctgtagagacattctcccaacactcataagctgctttttgggcctggttttggactttctcatctttcaaacgttgccccgtggttgatataagccctctcatataaaaaatgctctttttgtgctcctccgccacgttcttttaaccgaatcaaaacttt

SEQ ID NO: 630202 - DNA, 1143 bp, Homo sapiens
tccaaattcggataactgcacaaatgtaaccgtttccatctcgtagtacagcctgtctggaaaaacaagggcactccatggataagcggtatacttcttctgcattctcaagagtatgtttacacacactgcaaattcgttttacttacctctccaatttctcacgacgccgcattccctataggccccttcgggacgcgtttggttctgtgagtcaccgcgtagtgcttccaaacgcctgtgatctgcgacgttcccagacctccatttgccacgaagatgtaacgccctcgagaatttagggcctggctggacagacgcttgacttgcctcttaacacaaggccactggattctcctatgcagaacctgaaggaagactcgctttcgttagtactcttctggagtaccactatgtaaaaaggcttctacggaggctgctaatgacgccctgatgaagcttgagtttggtccatcactgggcccataggcagattgctctcctgaagtatatgatgacttcctccactactgaaagcggatctaccatccacactggtctaagagacccgtttcaacccctttgagcatgactaatcatgctgttctgcttgtgggctatggcacgtgatctcaacctctgggatggattactggaattgttaaaaacagctggtgcaccggctcggcgcgtgagaatggctacttccggatccgcagacggaacctgatgagctgtgcaattgagagcatagcagtcggcacgccacaccaattcctaaacttgtaagggtatgccttccagtatttcataatgatctgcatcagttgtaaaggggaattggtatattcacagactgtagactttcagcagcaatctgcagaagcgtaacaaatacgatttccatgaagatatttgtcttcagaatgtaaaactgccccttgaagttgtgttactataccatttcaatcggccactaggccaggttatttctaagtattcaattaagtgggaattttgtggaagatggtcagctgatgaagtaatagagtttctgttataatcattagtaattcaaaacatgcaatatgttattaaaatcaatgtgaaaacatagagcttatgttgttaaagttgtaccaa

SEQ ID NO: 630203 - DNA, 1006 bp, Homo sapiens
agaattgtagccacctggctaactgggatgagcctccagccgcctctggaagaagtgtcctgtggacaggcggaaagcagtgagaagcccaacgctgaggacatgacatccaaagattactactttgactcctacgcacactttggacatccacgaaggagatgctgaaggacagaggagtgcgcaccctcatttaccgcaactccatgtttcataatccggcacctcttcaaggacaatggtggtgctggtactgtcgaggctcgggcagccggcaatcctctgtcattgtttgctgccaaggccggggcccgctatggtcatcgggatcgagtgtgccagtatctctgattatgcggtgaagatcgtcaatagccaacaagttagaccacgtggtgaccagtcatcaaggggaagcggtgcggagttgaggctcccagggcaagaagtgtgagacatcattcatacacgcgagtggatggcgctattagtcctcttctacgatgatctcatgactcaacaacgtgactctatgcccgtggacaagtggctggcgcccgatggcctcatcttcaccagagccgggtccactgctgtatgtgacggtcatcgaggaccggcagtacaaacgactacaagatccactggtgggagaacgtgtatggcttcgacatgtcttgccttcaaacgattggtggccatttaagcgagccccttagtgggatgttcgtggagcccccaaaacaggtggtcaccaaacgcctgctcataaaaggaggtggacattctataccgtcaaggtggaagacctgaacgttgacttcccccgtttctgcttgcaagtgagcggatgactacgttggacgcctggaggcctattcgactcggttcacgctgccagaggccggttgccacaacccggcccctaacctggagacagtctccgggagaccacggaaacgcgaggacttgccgggggcacaaacggcgaccggggcggtcgcca

SEQ ID NO: 630204 - DNA, 325 bp, Homo sapiens
gctcgacggaaaagccctttataaaactatcacccggtgcctcggtgcggtcgctcacacctgtaatcccagcactttgggaggccgaggtgggtggatcacgaggtcaggagatcgagatcatcctggctaacacggtgaaacccatctctactaaaaaaaaaaaatacaaaaaaattagccggacatggtggcgggtgctgtagtcccagctactcaggaggctgaggcaggagaatcacttgaacccgggaggcggacgttgcagtgagctgagatcatgccactgcactccagcctgggcgacagagcaagactccgtctc

SEQ ID NO: 630205 - DNA, 338 bp, Homo sapiens
gagagaactaggctagggcaaatcaattacgattatatataaaggggtgaatggtatggaacgggaatgatctattccatttgaaaagcaaactgtcctgtggtgataggcctgaaacaggaaactggagaagccaagtggagctttaccctactcatggagaacagggcctgagagaaagctgacagcttttagaacgcgatgagcctctgggcacccttcaaggcagagactgaccctatggagcctgatgttagcataggaccagggcatgtgctcacagcaccacagtcatgcccagatcatggtattaacccaccttgaggctgctcaggctt

SEQ ID NO: 630206 - DNA, 278 bp, Homo sapiens
tttagtcttctctgaacttagtccatatgagacaacacggcgttttttttggtcatagaccgtcgccaggtaaactcagtctctattcatcagctggatgtacgtgatgtcagtcgttagaacgccactcaaatcatccaaattcttcatgagattgggcttttgtggtgtgtcagtggtcgtcgtcggcttcttatatgacttcctgaccatgcgagatttaaggctcatctcattcatgagctcccaaaccaaacgttcaccatcttcagtgttca

SEQ ID NO: 630207 - DNA, 461 bp, Homo sapiens
  misc_feature (399)..(399): n is a, c, g, or t
  misc_feature (449)..(449): n is a, c, g, or t
gataggttctatagcaaattctactgtaaaggctgcagttgcacagtgattctaaattctcttgtgaaagttgggatagaaatggctaaacagaaaaagtatctgtgcagctgctggcacttgtggcctatggggaaatacatcaaatgaggattataaaaattcagtagtggccaggcataggtggctcacgcctgtaatcccagcactttgggaggacgaggcaggcagatcatgacatcaggagattgagaccatcctggctaacacggtgaaaccctgtttctactaaaaatacaaaaaattagctgggtgtggtggcgggcgcctgtaggcccagctatttgggaggctgcggcgggcggatcacctgaggtcaggagttcgagaccagcctgngagacagagcatggaaacctaaagtctgtacccaaaactacaggactatntgacatcataat

SEQ ID NO: 630208 - DNA, 279 bp, Homo sapiens
ttgggaggcagcttcccacttttattaagggggttgtaaatctcagaaggggaacaatcacttttgttgttttgtttttgtttttttgagaaggggtctcactctgtcccggctggagctcagtgatatcttgttgtttttctttttttgagaaggggtctcagtctgtcacccaggatggagtgcagtggctcgatctcgtctcattgcaagctccgcctcctgggttcaggcgattctcccacctcagcctccagagtagctaggacttcaggcgtg

SEQ ID NO: 630209 - DNA, 328 bp, Homo sapiens
attcgcgggcgcgtagaccggcagccactcccagggcccctagaactctggccaaaggctctctgactgactccttcccagatcttctcagcttagcagctgaagactgatgctgcctgatcgccttggaagccccctggaccattacggatgctgagctttggataactcttacagtagaggatgcccaactatatgaagacaccctagctggacgatcagttcttattaagaacctgacccctcaaactctacaacctcgatggactggaccctacttaggcatctataggaccccaactgccggccgcctggaggatcctcccca

SEQ ID NO: 630210 - DNA, 320 bp, Homo sapiens
gtatagaatcactatagggcagtcattatttaattttaaaactctcatttaaatttagcaatgttttagccgggcgtggtggctcaagcctgtaatcccagcactttgggagggcaaggtggcacctgcctgtaattccagctactcaggaagctgaggcacgagaatcgcttgaacccagaaggcggaggttgcagtgagcagagatcactccactgcactccagcctgggtgacaagcaagactccatctcaaaaagaaaattaaataaataaaataaatttgcaatgttttaaatgaatatcacttaaagtagtaat

SEQ ID NO: 630211 - DNA, 199 bp, Homo sapiens
tggctgcgtcgcggtggctcaacgcttgtcatcccaacacttcgggaggccgaggcaggtgaatcactagaggtcaagagctcgaaaccagcctggcggaaatggtgacatcccatctctactacaaaataaacacacaaagttaactgggtgtgctgcttggcccctgtcatccccccttcttaggaggctgtggttt

SEQ ID NO: 630212 - DNA, 242 bp, Homo sapiens
agatcgaatacaacaccaagacccagggtttcctggtgcgctcggtggagcgcatcgtcaatatgagctggggagaaattcatccgccgcccaagggcacggggcgcgatcactacctgacggcggtgacgcgggtcgataaccagttggtggaaatcatcgacgtggagaagatcctcgccgaagtggcccccacctcggaaaccatttccgttggggtggtggatgccgaaacgccacac

SEQ ID NO: 630213 - DNA, 321 bp, Homo sapiens
tgtttgggagatgactatctctctgtcgcgcagtcgtgatttcagtgtcaagatgttgtgttactgcagtctcggcgtcgcgtgttcacgccattctcgttgctcatcctccgtattagctttgagtacaggcgcccgcaccacgcccggctaattttttgtatttttatcagagatatgatttcaccgtgttagccaggatggtctccatctcctgacctcatgctcgcccgctttgtcctcccaaagtgctggcattacaggcgtgacagctgcacccggccaagaaatgatttgtaaccttttaggaaagttatatgg

SEQ ID NO: 630214 - DNA, 225 bp, Homo sapiens
  misc_feature (53)..(53): n is a, c, g, or t
  misc_feature (68)..(68): n is a, c, g, or t
  misc_feature (86)..(86): n is a, c, g, or t
  misc_feature (101)..(101): n is a, c, g, or t
  misc_feature (105)..(107): n is a, c, g, or t
  misc_feature (111)..(111): n is a, c, g, or t
  misc_feature (114)..(114): n is a, c, g, or t
  misc_feature (126)..(126): n is a, c, g, or t
  misc_feature (137)..(137): n is a, c, g, or t
  misc_feature (174)..(174): n is a, c, g, or t
  misc_feature (183)..(183): n is a, c, g, or t
  misc_feature (210)..(210): n is a, c, g, or t
  misc_feature (219)..(219): n is a, c, g, or t
  misc_feature (222)..(222): n is a, c, g, or t
gagagagagagagagagagagagagagagagagagagagagagagagagaganacacacggggacagngatctgcagctggaccgnatctctgtgtactanaatnnngccnccngtggcaaatatnttcctcgtgcnatcccggtggatctagaacccgggaccatggactctnttcgctcangtcctttcagccagatctttagaccanacaacttcntanccc

SEQ ID NO: 630215 - DNA, 172 bp, Homo sapiens
ctctagagatccctatgtctcgatcgaatgatgttgtgagatacaaatcaacattgtattaaaactttttctttgctcttaacaatgtatcatgtcaataaaattcctccacattatttcaaatggctgaatactgttcactggtatgagatgttgcttaaccaaatctcct

SEQ ID NO: 630216 - DNA, 178 bp, Homo sapiens
ccctttttttttttagcttttttaaagggggctttttgggggccagtgtaacgttacattctttttttaaaaaatttaggatttttttttccccccttttttgttttaaaaaaaaaatttttttttaaaattaaaggtttttttttaaaaaaaaaaaaaaaccccattttaaagttta

SEQ ID NO: 630217 - DNA, 912 bp, Homo sapiens
gtgtgtagttttcttctatttctcttctttttctttggtagttgtccattctagtcaatcaaggcccagcttaagctctttcttcagccttcctccaaacaataagtatgtttacagcctggtttatgggacagataccttctaatgttagccttctatgtctatgtctggctgtcctgtaaactaaagatttgagactgaccgaaaactgtcatcccaatgccttccagaggccctaccttttatacccagtaaatagtcactaaaactttcctgatgtctttaaacctacactggatcatgttttgttttgtttttgagatgacagagcaagatcctggctggtgggggaaaaaagcatttggctgggcacagtagctcactcttgtaatcccagcactttggcagacagaggtggaggattgcttaaggccaggagttcatgaccagcctgggcaacaagcaaaactccatctcaaacaaacaaagaaagaaacaaaatattatgaaagaacaaccagataagctggtaattcattggatgcgagagaaaatttatatatcgagactttttgacttacaatggagttatgtcccaataacttctgttacttgaagatatcattaagtccaaatgcatttggccaggtgcagtgatttacatctgtaacccacacttgggaggcaggggggggttgctggagtcagagtcgagaccgcccggtcgggcgctggagtccttcaaaaagagtaaaaaaaaaaaaaaaggggccgcgagccagaattataaaataggggcgcccaagaaggtgaagctgacaggcagggggttcaaaaacggagggaaacgcaggtgtagaggatcagcacagcacaagagagagacgagagaggaaacaacagagaacaaca

SEQ ID NO: 630218 - DNA, 192 bp, Homo sapiens
aagaaatggaagccaaagctgaagattaacttttgttgggaaacagagtccaattttagggaccacagagcagcgtttcttggcttgtaaatctagacttgaaagttttcagtattgaaaacttcaaggctgatatttttatttctaggtatttaaagtttcttacagatagacatgaaatgccctcctaaa

SEQ ID NO: 630219 - DNA, 486 bp, Homo sapiens
  misc_feature (478)..(479): n is a, c, g, or t
tgggacaatgcacgctcaccccttgaaggcaaacttgtggcttggtgatccaggggttgcaaaacaggctgttcactgccttggtcaagaggagctgggatgtgctcgtcttcacaccaggaagcaggtttttccagcataaccaggatgacacttgcacttgtttggcccgatacattcaccatgtttgcatcgtggttggcacacagctgtgaaaagaagatggcatgcattatttctaggtcaacgaaacaccaatcatatagcattgatgtcgtgcactagtttaataataaaagaaaaaaaactagaacttacaacaaagtagccaaagtatacaaaatcagtttcctataaacactctgtaagctacacacacacacatgtgttatgtatgtatatgtgtgtgtatcagttggggctgaaaaaaattttaaattcaaggacaatactcaaatagacaaataaaactaggtannactaaaa

SEQ ID NO: 630220 - DNA, 282 bp, Homo sapiens
ccctcgctattcgatcggcactcgtattcatcggcacccatcttttctatgtttagatacacaaatgcctaccattgtgtcacagttgcctatagtatttagtacagtaacatgctacacaggtttgtagaccaggagcaataagctacactatatagcctaggtgtgtagtggtaggttatcccatttgggtttgtgtaaagatgccctgtggtgccgatgaattcgctattcatcggcaccccatggtgaccacgggtgacggggaatcagggttcgatt

SEQ ID NO: 630221 - DNA, 458 bp, Homo sapiens
  misc_feature (450)..(451): n is a, c, g, or t
ctacctgcaaacttatgctggggaagaaaaatcaagtggagttttttaaggagcaaactgagataataagagcatcacttatttaaaaagattatgcaggtttttccagcataaccaggatgacacttgcacttgtttggcccgatacattcaccatgtttgcatcgtggttggcacacagctgtgaaaagaagatggcatgcattatttctaggtcaacgaaacaccaatcatatagcattgatgtcgtgcactagtttaataataaaagaaaaaaaactagaacttacaacaaagtagccaaagtatacaaaatcagtttcctataaacactctgtaagctacacacacacacatgtgttatgtatgtatatgtgtgtgtatcagttggggctgaaaaaaattttaaattcaaggacaatactcaaatagacaaataaaactaggtannactaaaa

SEQ ID NO: 630222 - DNA, 328 bp, Homo sapiens
atcattaatatatttttattcaccagcaaaatagcagctcacatattttggaaaaatagccatggaaagtagtttgagataagaatatttttaatttgggagtgatagaggtgtcttcgattgtgtatttatgtcagactgttttcctaccttgattacaggtttttccagcataaccaggatgacacttgcacttgtttggcccgatacattcaccatgtttgcatcgtggttggcacacagctgtgagctgacactgtccccgaattcggcgagcccagccccagcagcagtcaatcctcccaccataacgacataggccaatcga

SEQ ID NO: 630223 - DNA, 311 bp, Homo sapiens
cacatccaccttctcatcatagctgcgagcgttgatcatctcagcgtgccatccagtaggggttgcccaccacggtgtagacgcttcttgcggtctggcttcttgaggctccgcaggccctcaggctgagtcttctcgtccacagtgatacgcgccagtcccgatagtcaggcatccaccacagttcttggttctcgccggaccaggcagttgtgggagttgaggtctcggtggatgatgttcctggagtggaggttggccatccctgatgcgatgtccttgtgccaagctcactctctggctccctgggt

SEQ ID NO: 630224 - DNA, 1845 bp, Homo sapiens
  misc_feature (211)..(211): n is a, c, g, or t
  misc_feature (930)..(930): n is a, c, g, or t
  misc_feature (943)..(944): n is a, c, g, or t
  misc_feature (949)..(949): n is a, c, g, or t
  misc_feature (1122)..(1122): n is a, c, g, or t
  misc_feature (1206)..(1206): n is a, c, g, or t
  misc_feature (1339)..(1339): n is a, c, g, or t
  misc_feature (1621)..(1621): n is a, c, g, or t
  misc_feature (1646)..(1646): n is a, c, g, or t
  misc_feature (1653)..(1653): n is a, c, g, or t
  misc_feature (1701)..(1701): n is a, c, g, or t
  misc_feature (1712)..(1712): n is a, c, g, or t
  misc_feature (1719)..(1719): n is a, c, g, or t
  misc_feature (1721)..(1722): n is a, c, g, or t
  misc_feature (1734)..(1734): n is a, c, g, or t
  misc_feature (1743)..(1743): n is a, c, g, or t
  misc_feature (1746)..(1746): n is a, c, g, or t
  misc_feature (1756)..(1756): n is a, c, g, or t
  misc_feature (1773)..(1773): n is a, c, g, or t
  misc_feature (1779)..(1779): n is a, c, g, or t
  misc_feature (1797)..(1797): n is a, c, g, or t
  misc_feature (1836)..(1836): n is a, c, g, or t
cagtggccacccttgttcacctttgagacacgctctgatgtcagcccctcgcaagtgatctgtgtttcctccagccatgccaccatgtcttccgcacagggctgctccgtgggcaccgtgttttctcacaaacacctggagtgtgccagagtgcagccccgtcaccttgtgcctgaatgacaggcacaggtcccctgaatgcatgaggcgnccgagaggtagcaccaagcgtgcagcttttcccactggggctttggctgccgacactgtcagatattgtccacctgctgggtccctgattggttcccagtgcaagtcattgtctttctccctgatccatccacaaagtccatggtcaaaattacaactgtgtaccagaacacctggatcatcctttgcttcatcgtctgcactgactcctctttctatttcaaatatttcaaacaagtcatttgaaggttgccgtggaatgaacacatctcctctgggtttctgagggtctgtctgtaccctgttgtcaactgtaatccctcctggaggtgtactggcagctggtgctatagttgtcagtccggtggttggcctttctggggttgtaggtggtagaggtgttctgagctctgttggcaggggtggtggtggtggtggagtaggaattggtgttggctttggtgtaggtcttgttgttggcttagaagtaggcctgttggtaatgataggaggaatatatggtgtcttcggaggccaccaagtacttccaacatcaggaatccaattattatttcctgtgtcaccctttaaaatggtaccatttccctttggtacatgaattggacctgaaggttcaatcataacttttgggatatacacacaagtcagtccatcaccctggtatccttctttacatttgcacttgtaggacccacgtangttataacatcgnncaaanctgctgcactgatactgaccaagtgagcattcgtctatgtcatgacattgatatttgcctccaatatacatgagatcgaagcctttatgacacttgcagatgtagctcccaaaagtgttgacacattgcctaaatctagggcaggaggctcttcctgtagcacattcatcaanatctacacaggtcctcccatcaggagccaggtgcaggccaggggatgggcactggcaccgtatttgtcctttaacaacatccanccatactgacagtttgccatggagcaggtcagggcacttgagcaggaaccatccggcatgagcatatatccgttgagacagtagcacttgtagctgccgtaagtgttcatgcacctgtgcttacagggccggngcttcaggccacactcatttagatcttgattacaggtttttccagcataaccaggatgacacttgcacttgtttggcccgatacattcaccatgtttgcatcgtggttggcacacagctgtgagctggcaccttatcctggctattctctgccttaagacgtagaaagctgcaaaacaaatgtccaaaaaaagaaattccagatcttttctctgtaaggaggctggacttgggtatttatcaacttgttacattcccggagacttacacatattcaactttnagtgctttttcttgaaacaaaaaanaatctangacatgtttaaaataagtaatatttttagtcaccattttgttataaanaaaacatttcntaacaananntattaaccaatnattggaagnttntgcctattcnttttataggtcccaaanttttanaattttaaaatatttccngacctttttgtggatggcctgttatttttgcaaattccnatctttttc

SEQ ID NO: 630225 - DNA, 250 bp, Homo sapiens
gtatttacccccttcttctctttgcggcactaccgtgtgctcttctttctaacacttgttaatattacccctattctaactaaaacatctgttcaggggctgatcaaaagcgttttggcgccgcacccatatgttttttcagtctgacactaagactaaaaacaattgtgaatatgcttgtttctcccaaattagtgggctaatgaaggttccctagttatgattctacggcgtcttaaactttgcggac

SEQ ID NO: 630226 - DNA, 198 bp, Homo sapiens
aacacaatttacaagctttgtggcagttgagaaaagggatgagaatgtagtcaccttttcctgatattccaaaagtttctgaacttatttccaaagtaagtatgttagtacttcctgtccctacatgtagtctgtgtcagtgtgtgtaacccaaagtatagttcgttcagtaaccagttctctttaagtcaatccctc

SEQ ID NO: 630227 - DNA, 380 bp, Homo sapiens
atatcggaaaccattgtgcttcactggtcatgcgttttgtgataggccacgctacgagatcaactcgtgcagtcttcctcgacaataagggtagaaagtgctgtgtcgcaacatttacatcactcattcgacgcatggtctttcgtaaagaccgtatataatggcatcaattgccgggtgtgttggcatgggcatgtgtatctgacagttttgggaagctgtggcggccgactcttaaggtctatagttcccagcacgcttggtcaacatggtacagccccgtctgtgtcatgcatacctacatcagcctggtgtgttgggtggcgtttagagtcccagaagctacacagtgttaggcaggatcatcgcttcaacgtggg

SEQ ID NO: 630228 - DNA, 1733 bp, Homo sapiens
  misc_feature (211)..(211): n is a, c, g, or t
  misc_feature (930)..(930): n is a, c, g, or t
  misc_feature (943)..(944): n is a, c, g, or t
  misc_feature (949)..(949): n is a, c, g, or t
  misc_feature (1122)..(1122): n is a, c, g, or t
  misc_feature (1206)..(1206): n is a, c, g, or t
  misc_feature (1339)..(1339): n is a, c, g, or t
  misc_feature (1725)..(1726): n is a, c, g, or t
cagtggccacccttgttcacctttgagacacgctctgatgtcagcccctcgcaagtgatctgtgtttcctccagccatgccaccatgtcttccgcacagggctgctccgtgggcaccgtgttttctcacaaacacctggagtgtgccagagtgcagccccgtcaccttgtgcctgaatgacaggcacaggtcccctgaatgcatgaggcgnccgagaggtagcaccaagcgtgcagcttttcccactggggctttggctgccgacactgtcagatattgtccacctgctgggtccctgattggttcccagtgcaagtcattgtctttctccctgatccatccacaaagtccatggtcaaaattacaactgtgtaccagaacacctggatcatcctttgcttcatcgtctgcactgactcctctttctatttcaaatatttcaaacaagtcatttgaaggttgccgtggaatgaacacatctcctctgggtttctgagggtctgtctgtaccctgttgtcaactgtaatccctcctggaggtgtactggcagctggtgctatagttgtcagtccggtggttggcctttctggggttgtaggtggtagaggtgttctgagctctgttggcaggggtggtggtggtggtggagtaggaattggtgttggctttggtgtaggtcttgttgttggcttagaagtaggcctgttggtaatgataggaggaatatatggtgtcttcggaggccaccaagtacttccaacatcaggaatccaattattatttcctgtgtcaccctttaaaatggtaccatttccctttggtacatgaattggacctgaaggttcaatcataacttttgggatatacacacaagtcagtccatcaccctggtatccttctttacatttgcacttgtaggacccacgtangttataacatcgnncaaanctgctgcactgatactgaccaagtgagcattcgtctatgtcatgacattgatatttgcctccaatatacatgagatcgaagcctttatgacacttgcagatgtagctcccaaaagtgttgacacattgcctaaatctagggcaggaggctcttcctgtagcacattcatcaanatctacacaggtcctcccatcaggagccaggtgcaggccaggggatgggcactggcaccgtatttgtcctttaacaacatccanccatactgacagtttgccatggagcaggtcagggcacttgagcaggaaccatccggcatgagcatatatccgttgagacagtagcacttgtagctgccgtaagtgttcatgcacctgtgcttacagggccggngcttcaggccacactcatttagatcttgattacaggtttttccagcataaccaggatgacacttgcacttgtttggcccgatacattcaccatgtttgcatcgtggttggcacacagctgtgaaaagaagatggcatgcattatttctaggtcaacgaaacaccaatcatatagcattgatgtcgtgcactagtttaataataaaagaaaaaaaactagaacttacaacaaagtagccaaagtatacaaaatcagtttcctataaacactctgtaagctacacacacacacatgtgttatgtatgtatatgtgtgtgtatcagttggggctgaaaaaaattttaaattcaaggacaatactcaaatagacaaataaaactaggtannactaaaa

SEQ ID NO: 630229 - DNA, 118 bp, Homo sapiens
  misc_feature (4)..(4): n is a, c, g, or t
ctgncagcttcctgacttcggtatgtgaagaaatagtgggtggatgtacagagctaagttctggcagaacacgatgtggaaactgacacagtaatatccccagttgttgctacacatt

SEQ ID NO: 630230 - DNA, 796 bp, Homo sapiens
  misc_feature (211)..(211): n is a, c, g, or t
cagtggccacccttgttcacctttgagacacgctctgatgtcagcccctcgcaagtgatctgtgtttcctccagccatgccaccatgtcttccgcacagggctgctccgtgggcaccgtgttttctcacaaacacctggagtgtgccagagtgcagccccgtcaccttgtgcctgaatgacaggcacaggtcccctgaatgcatgaggcgnccgagaggtagcaccaagcgtgcagcttttcccactggggctttggctgccgacactgtcagatattgtccacctgctgggtccctgattggttcccagtgcaagtcattgtctttctccctgatccatccacaaagtccatggtcaaaattacaactgtgtaccagaacacctggatcatcctttgcttcatcgtctgcactgactcctctttctatttcaaatatttcaaacaagtcatttgaaggttgccgtggaatgaacacatctcctctgggtttctgagggtctgtctgtaccctgttgtcaactgtaatccctcctggaggtgtactggcagctggtgctatagttgtcagtccggtggttggcctttctggggttgtaggtggtagaggtgttctgagctctgttggcaggggtggtggtggtggtggagtaggaattggtgttggctttggtgtaggtcttgttgttggcttagaagtaggcctgttggtaatgataggaggatatgactggttacactgaaggaggaaattttggcggtggtaactatggtggtggtgggaactataatgattt

SEQ ID NO: 630231 - DNA, 424 bp, Homo sapiens
  misc_feature (81)..(81): n is a, c, g, or t
  misc_feature (396)..(396): n is a, c, g, or t
attcggaacgaggagcaggttgcgccccagcagcttctcggccggctccgcgcggtacttcacgcctttcagcgccagganattcagcgcgacgatgatcagcgcgttgaagatcaccgccgacagattgccgacgtcgggctgtgcagccccatcacgttcagcgcgccgagtgccggatacgtcgcgacgaacgcggccgggatgatcgcgaaatacttcgcgagatcgttcgcgacgctgaacgtggtcagcgcgccggtgcaatggatcatctgcttgccgacctcgaccacctgcatcagcttcgtcgggttgctgtcgaggtcgaccatgttggccgcttcctttcgccgcctgcgttgccgttgttgcattcgcgaacggccaagtggnccttgcgcgaagcccgggcgcattcgtt

SEQ ID NO: 630232 - DNA, 994 bp, Homo sapiens
  misc_feature (211)..(211): n is a, c, g, or t
cagtggccacccttgttcacctttgagacacgctctgatgtcagcccctcgcaagtgatctgtgtttcctccagccatgccaccatgtcttccgcacagggctgctccgtgggcaccgtgttttctcacaaacacctggagtgtgccagagtgcagccccgtcaccttgtgcctgaatgacaggcacaggtcccctgaatgcatgaggcgnccgagaggtagcaccaagcgtgcagcttttcccactggggctttggctgccgacactgtcagatattgtccacctgctgggtccctgattggttcccagtgcaagtcattgtctttctccctgatccatccacaaagtccatggtcaaaattacaactgtgtaccagaacacctggatcatcctttgcttcatcgtctgcactgactcctctttctatttcaaatatttcaaacaagtcatttgaaggttgccgtggaatgaacacatctcctctgggtttctgagggtctgtctgtaccctgttgtcaactgtaatccctcctggaggtgtactggcagctggtgctatagttgtcagtccggtggttggcctttctggggttgtaggtggtagaggtgttctgagctctgttggcaggggtggtggtggtggtggagtaggaattggtgttggctttggtgtaggtcttgttgttggcttagaagtaggcctgttggtaatgataggaggaatatatggtgtcttcggaggccaccaagtacttccaacatcaggaatccaattattatttcctgtgtcaccctttaaaatggtaccatttccctttggtacatgaattggacctgaaggttcaatcataacttttgggatatacacacaagtcagtccatcaccctggtatccttctttacatttgcacttgtttggcccgatacattcaccacgtttgcatcgtggttggcacacaggctgacactgtccccaagactggcgagcccag

SEQ ID NO: 630233 - DNA, 877 bp, Homo sapiens
  misc_feature (48)..(48): n is a, c, g, or t
  misc_feature (81)..(81): n is a, c, g, or t
  misc_feature (98)..(98): n is a, c, g, or t
  misc_feature (156)..(156): n is a, c, g, or t
  misc_feature (192)..(192): n is a, c, g, or t
  misc_feature (253)..(256): n is a, c, g, or t
  misc_feature (259)..(260): n is a, c, g, or t
  misc_feature (318)..(318): n is a, c, g, or t
  misc_feature (322)..(322): n is a, c, g, or t
  misc_feature (324)..(324): n is a, c, g, or t
  misc_feature (327)..(327): n is a, c, g, or t
  misc_feature (331)..(332): n is a, c, g, or t
  misc_feature (336)..(336): n is a, c, g, or t
  misc_feature (339)..(339): n is a, c, g, or t
  misc_feature (355)..(356): n is a, c, g, or t
  misc_feature (358)..(363): n is a, c, g, or t
  misc_feature (365)..(365): n is a, c, g, or t
  misc_feature (367)..(371): n is a, c, g, or t
  misc_feature (376)..(376): n is a, c, g, or t
  misc_feature (378)..(379): n is a, c, g, or t
  misc_feature (381)..(381): n is a, c, g, or t
  misc_feature (384)..(386): n is a, c, g, or t
  misc_feature (393)..(395): n is a, c, g, or t
  misc_feature (397)..(397): n is a, c, g, or t
  misc_feature (399)..(399): n is a, c, g, or t
  misc_feature (402)..(403): n is a, c, g, or t
  misc_feature (416)..(419): n is a, c, g, or t
  misc_feature (423)..(426): n is a, c, g, or t
  misc_feature (429)..(430): n is a, c, g, or t
  misc_feature (437)..(437): n is a, c, g, or t
  misc_feature (449)..(450): n is a, c, g, or t
  misc_feature (452)..(453): n is a, c, g, or t
  misc_feature (456)..(456): n is a, c, g, or t
  misc_feature (480)..(480): n is a, c, g, or t
  misc_feature (518)..(518): n is a, c, g, or t
  misc_feature (520)..(520): n is a, c, g, or t
  misc_feature (529)..(530): n is a, c, g, or t
  misc_feature (533)..(533): n is a, c, g, or t
  misc_feature (544)..(544): n is a, c, g, or t
  misc_feature (546)..(546): n is a, c, g, or t
  misc_feature (557)..(557): n is a, c, g, or t
  misc_feature (561)..(561): n is a, c, g, or t
  misc_feature (634)..(634): n is a, c, g, or t
  misc_feature (874)..(874): n is a, c, g, or t
agaaccaaagtagagaaatatatacaatacattaagtactttcaatanagtggcatttttcatattaaattaaaagagggnactatgatttacaatgncatttcccgtagtttaaaattcaacatgtcaaaagacataatgtacattttttacaanactgacacagcagtattaaaactgctaatgattgtngtttttattttttctataatacactgcacctgtgttaccaaaaaaaaaaaaacaaaaacannnnggnngggctagagggtttgaatactgcataagtcagtatattaacacttgggggataagggngggngnggngggnnttanggngggggtcattcacaanngnnnnnncncnnnnngcgcngnnanggnnnagggggnnngngntgnngggggggggttannnngggnnnnggnnaaggggnaaaatgtcatgnngnnggngaccacaatgccatcacaaaagcngatatcgatataaccctactatttacaatacctaatangngccaaagcnnganaatcactcacngntaaatcatggnaaantattatagtttgtgggaaattttgaatatctataaaatattcaatagactacaaaagagcttgcaacagcttnttctcattatttttcttaggtcagaattagaaaaaagtaaatcctattttttaataagttttgatggcatcaaaaagcttcacatttataaataagatttttatacaaagcaacatgttactgacatagttttctcttgctactatcaattattctcgggactcatgttgtatgttaaggaaggaagtattaagatttcttcctcattcctaaattttcagaatatactctaggccttgnagg

SEQ ID NO: 630234 - DNA, 349 bp, Homo sapiens
  misc_feature (338)..(338): n is a, c, g, or t
gagctcggaccgtgttagcacaacctagggtcagttttgcaggtggtagccatttaccaagatagttgtaggtaagaagggcagatttattagagaaattgtgaaagtatgttgcagtgggcagctcagcagagaaggggctacctgcaaagaggcaagggctggaggaaagttttatagggtcctgctgaagggtgctacgtgtggaatgaggtcattgtgcccgcaggttgtttgtgattagctgtctctaacaattgttcatacaataattgttcattattgttctcaacttggggctctccccaacctggggacccttccttattgttgctacnccacaggggat

SEQ ID NO: 630235 - DNA, 508 bp, Homo sapiens
tgctcgtcctgctctgcccagtgtgatgattgacattgctttatttgtggacaacatataggacgaagaagaaatgtgtctccggctacgggaccaagaatggtggtggcaaaaggaaacgaagcctgtaatcccagcactttgggaggccgaggcaggcatatcacctgaggtcaggagctcaagaccagcctggccaacatggtgaaaccccatctctactaaaaatacaaaaattagctgggcatggtggcacgtgcctgtaatcccagctacacaagaagctgaggcaggtgaattgcttgaacctggggggcagaggttgcagtgagctgagatcatgccacttcactccagcctgggcgagagtccatcagaaaaaaaaaaaaaaaaaaaaagagagaaagaaagaaaaaaaagggaaaaaatgtgtttgggaggtcagtcaccgtgggatctgagcacctccttaaacgtgtcttcaaattaaagcctttggccaatgact

SEQ ID NO: 630236 - DNA, 440 bp, Homo sapiens
  misc_feature (68)..(68): n is a, c, g, or t
  misc_feature (75)..(75): n is a, c, g, or t
ccaccctcctccccccaaagaaaaaagggaacctgggtgattgctttgatccaccttcctcaggggcntggggcntagagagacccgtgcccaccccggggacctcgggtcgcctctgggtgccaggaggagccaggagtccagggaagtccctaggctccgccccttactcggatgggcctttgcggcaaatgctccgcacccagtgacctcggttgggagccacagcggggctgggagtattcactgcccttccgcagggaccagaggcggatgtcgagggaaggtggcggcatgggcggcccctgcctctgagtggctcagcaggcactcagcgggcgccagcaccaaggacagggccggggcctccacagcctgccctcctcgccctccctcctctgacacggtcccagggccgctggaggcgctgcgggcggccg

SEQ ID NO: 630237 - DNA, 1290 bp, Homo sapiens
atccagagatcactctatgatcgtccagcctcatcatcagacagaaatctctgttcagactcagaagtccaaacacacctccatttcgagcatgcatcaactccagcacaggccttcaattatcaatttggcattctggttgcagcttacacctcatccaagttgcccgcaggcacatggcagtttattaggcgttccacaaaaattagtgtcccaccgtgcatctggctgctcgccaacgtcctcctggccaccaaggaacaaaatatgtgaagcatctgatagacttatggccatggccagcagcacatccatagccatgcattccgaaactcatggtagtcggacacaggcaggtcacccttatcattgcccgttgcaagtggcataggctcctgcagcagcaatcttatgacaaacactactaaaccaacaacagtggagatggactgtacatagggatcgtatatcgagacactatctggatactggagcagaatcctaaaaccccctttgagatggaaaaacccatataaaccccaggacaatgaatgtgtagagagtatactaacattacataacaaattaaggacatcaaagacgttgggattacccccgggaacagggaacacaagcacctagaagaccacagaacttaacccacgagagacacagatcccacaccggacggacatcccatcggctggaacaacatgcgcctagggaaaccacgactggacagaacccacgagacaagaacagcaggaacgaccaataccatgagagatcaaaccaagcatcggaacgatggacaggacatatggggcgggacaagacaaaactcaagaaatggaccgttgggcaacacagataacattctaaaacacaagacaagacttaaattggtaacggaacaaacagtatatgatagaacagtagagtaacacagagtatcaccagatcgagacaaaagacaggtggacaccaacacaaaaacaatagagaagagatagggcaaacaagcaaaatagacgaatgatacgaaacccataccaggacgcaaaaatagaagaataaacaaattaggagaaagattcataacaaataaacgaaaacagaaaaaacaacacaagagcaacacaaacagaaaaattcgacagggaactagagaacagaagtatatagaaaatggaaaaagagagcaagaaacacgaagagagataggataggaacagtaagagatatcaaatacatataaatacatagaacgaagaaacagatacagaacac

SEQ ID NO: 630238 - DNA, 642 bp, Homo sapiens
cgccggtgtttccctattgtctcctatctaccacgccttcctaaaatttctccccctttaaatactgaagccctcaaaatcatcttaggagaaaggcacagaccttgggcctgggtgcatgcccttaaccttggtacaataaacttctaaataaattgaggcctgtctcagatactttttggtttgcaacaaatataaaatggttttacaatttgcgtttacaacaacaacaacaacaataaaatggaacaattataacaataataaaagtaattaagtaaagttaatttttctagagagagtctcactctgtagcccaggctaggagtgatcatggctcactgctgcctcaaactcccaggctcatgcgatcccaagtagctggggctacaggcatgtgccaccacacctggctaattttcatcagtatctcagaagacacaagtatacccccaggtagcctgggctgaactcaaactcctgggctaaagcgatcctccagcctcggcctcccacaatgctgcgataacaggcatgagccaccacacctggccctaagattaaattcaaaagtatcacaataataaaatcacatacgggtcacttgaacacaagcatgggacccacgtgatgatgtgtaat

SEQ ID NO: 630239 - DNA, 509 bp, Homo sapiens
agaggatcccccacacctaaccccaccctgtgcttgtataggaaacacgctggatttgaaaggtggcaaggagtttgtggaagctgtggtggttctccggaaaaagaacgggcccttggaagtagctggaggtgaggtgggaaagccaccgtgcttatctggttgtgacacatgcagtattaggaaagccattttgtgagagggcttagaattcagaggtgtgtggcagcacagccgcatcttcaagatggaggccaaggacagcctgtagctttacatcttagagtttcaccacatgcaggttgtctgggaaaatcacctttgcatttttttttattacttaaaatagctcctatatgtttgatgtctagatcacaaattttaagaaattataggagctgagtttggtacatctaagagctgagagtgagtgatactgagccatctgcaaaactgctggtgagagatacaaattaaaaatcttcagccatttgtgtgtgtaagaggaa

SEQ ID NO: 630240 - DNA, 118 bp, Homo sapiens
tcccaagatgagaaattgctcccactctttccatcttctgcactgatctccagcaacttcactttctcatagtcttctcctcttgccgcacattcctttttcaatttctcatccttgg

SEQ ID NO: 630241 - DNA, 262 bp, Homo sapiens
agaacacctgacagatatggtctcgctactggtggtgcagtgtaaggagaagagggcttgaccctgaaatcttgaagacgtcagagctcatgactataggaaaagtcggaaaggtcattgagaccaaagacgatgccatgctctaaaaaggaaacggtgacaaggctcaaattgaacaacgtattcaagaaatcattgagcagtaagatgtcacaactagtgaatatgcacaggcacacaactgattgaacggcttgcaaaa

SEQ ID NO: 630242 - DNA, 138 bp, Homo sapiens
gagggtgtagtatctaagtccggcgatgatggtgtgggcacgagagagtgcggcagttctatacgggcgaggctggcgtttggtgagtgcgggtgaggtgtgtgtgtgaataagcaagagagagaggtgatgtggcaa

SEQ ID NO: 630243 - DNA, 400 bp, Homo sapiens
  misc_feature (400)..(400): n is a, c, g, or t
cgttagtgaatgaaatcttgtggctgatcctgacgcatcacaacacgatttttttggtagtgttgcttaatgttgatcaccggtttgctaacaatcctatcaccacctctaaagtgccggttcttaacactggcgcttccagtgtggacgggagggaggcccctctgaacacgtgacgtggtccatccaagccaaagttgtcaccctcctttcctcttctacctaccgctttaaaatacattcaaataaagtgtaagtgactgcacgtatttgcagcagccaggagagcagagaacgtgatgaaccagcactctgtttggagaataaatagtttgaaatcgtgggactgacgctggctgcttggggaccttctcaaagcatccttggtgggcataaggtn

SEQ ID NO: 630244 - DNA, 1094 bp, Homo sapiens
tgcttgcagcgcgtgagctgagccggctgggtgagcggcggccacggcatcctgtgactgtgggggctacgaggaaagatctaattatcatggacctgcgacagtttcttatgtgcctgtccctgtgcacagcctttgccttgagcaaacccacagaaaagaaggaccgtgtacatcatgagcctcagctcagtgacaaggttcacaatgatgctcagagttttgattatgaccatgatgccttcttgggtgctgaagaagcaaagaccatttgatcagctgacaccagaagagagcacggaccggcttggaatgattgtcgataaccatagacgtggcatacaacgatgggtttgtgacggaggcggagctgaacctcctggattaagcacgcccagaaccaactccatatatgacaactgtcgcaaaccaatggacaggagctctgcatctgaatcaacgcacggcttactctcctgggatgagtacagaaacgtgacttatggcacttaacctggaatgatccagatcactgatgactggatcacaactatacaaacagcatgactgcgtctagcagcatgcacggaaggtataaacatgggcacaaaaacgaatggacagacactacaatgccacacacggaagcgaaatacaacagagtataacctggacaaacatgaaggcagctctgcactcaccgtgacacgcatactactaaacaacaaggaaaacaagtagaagactcatgcaatacacctgacaccggacccaagaacgatgaacaaacaaacaagaaacctgacaccccagcaagcaacaaaccgacaaacacacacaggcgaagaaaccgagacacccagcaactcatcctaataaaacccactccacacattcaaaagaaaatatactatatatacattcatcaacatatacataacgacactataccacccaatcaataaaaacatcaaactccccacatccagaaatcaaaaaaaaaaaactttaatcaaccttacaacgacacaataaacaacagcaccccccactcacacaccacacacacaaaacagacctaaccacaataacac

SEQ ID NO: 630245 - DNA, 235 bp, Homo sapiens
tctacaagattacctgtcatatactgaagaatctcttctaccagtcttatgcagcacctggctaagaatgtagtcatggtaatatcaaggtacttacaaagcacattgactgtcaatgaacaagtatgccacatcgaagcatgctaacgatcagcactctaccacacgttgaattctgcactagttcaaagatttagccaaggctgtgtgcaaagtgtgtaaccttgtaaagctt

SEQ ID NO: 630246 - DNA, 394 bp, Homo sapiens
tacatctgacacagcataatcaaaagatgagggggtacatcttgttgccacttgtgcagaaaatgatggcacgattttgcagtattggagattccaggaaacaagcattttgattctttgagggccacaacggaggtcatgaagatgtccagcggcacatggtaatgacctggcttaatggggctggctcactgatgagtactagaagtgttcaagaaacctcagcagcatatatccacttggctgcagatatccacgtggccgcagatatgccttattcttgagcccatgtaaaacactgtgtaggggctcttagaaattatgggcagaggattttgcaaggagctgaagttcggcatcagcaagcaaagacaggagccaatgaaatacggat

SEQ ID NO: 630247 - DNA, 118 bp, Homo sapiens
gatacaatcgagctggtacccattccggatagccgagaaagtgttgtgaagaaagttagatttacgccgatgaatatatagtgaaatggattttggcgtaggttagcgtctacctggt

SEQ ID NO: 630248 - DNA, 1426 bp, Homo sapiens
ggtggtgaggagtgctggaggtgcggcgaaaggcgtacggacgtcgggtgaacgtggatgcgagccagatttatccgtgtgcatcccccaaggggtaatacgatgcttcaagttgataacgttggataggcacgcgtcgacctgtgaaccggagtagttgcaccattggagctttgcatatcgcttaccgactagaggtgtgatccgagatcaaggagtcgtttggaggagacatagggactccacctctgaaaaccaacctataggctccattctaccaggggacgataggcgaaagtggagatgaattgaggaagtgacagctagctgcattaactgagcagtgtgttacggtggatttcgagtccttccaccgtgagtgttggactcagtactaggagggactggatgtgtcctgtattgtcgaggtagactagggacccaccatcgcactattgtacttcttgctataatctcactgatcgtattcactaacttgagagcaatcagtagtactgcactgctacatgattcgtctgggtcgataaggcggtgtgcctagcatgttgcttcccttctaaccgtggcaatagtccgcgaggtcacaatgctcaattggttctactcgagggttgtgcgcacgcatcttgattggacgtggaatacccccatgggaatttcaacgttagttttgctgggggccgcgaggaagagagtccacctgtgtctttcgaggtaatctagggaatagtttaacgatggaggcaaagttcccgttggttaggttgacattccactccgtgcatgcggtttaatacgagcttggtagtcaccctttgaggattagtccgacatagaacctttcattttgcccgaagggaacctaaagattcccactatcctagggaagtttacttcaccgaggggcgatccgagatggaatcgcgggattgatcgggaaaacccaatgggggtgctacctggaaatttctgggccgattctggtccacaagaaaagcagatgtttttgacagtgacatcacaattggtcactcggttaacaacacggtggccaggaattctaggcagtatactggatctagatagggagacccccgaacaaaacacccagcacaaaggtgcaagtgtacacccaggtattacagagcgccggacaacaataaccagaaaacgggaaccgttcccagcaccagcacgggcccagctgccaggggagcacgcagcgggttaacatgagactgactccacgcctgaaaaagaatgagaacaaacgaagctacaaaaacacttgaaacaccgggcaccagatgccggaagacagaagagcgaccggacacagtagagagcacaaacaaacagagaggaaaacacggaagacacactaaaacaccacaagcgaccagag

SEQ ID NO: 630249 - DNA, 327 bp, Homo sapiens
actttacttgttggcatgccagagtctgcgtccgttatcagtgttgcccgggactaatcgctccaccaactcgggaacggccatccacgaccgcccacggaatcgataaagagctatcattctctcactcctattccgtgtccgggccgtggttaggttcccgtgttgggtgcaactaagccgcaggctccatccccattgtggatgccctaccgtcgacttcctttcatgtttcatggggatacctgcagtctcgaatccgatcttcatggctcttgacctttgcctgtgtgcaaagatcctacaacttctgaattggaaaaccct

SEQ ID NO: 630250 - DNA, 895 bp, Homo sapiens
  misc_feature (173)..(173): n is a, c, g, or t
gtaggagttcaagaccagcctcagcaacagcaggagccccaccccccgtctctacaaaaaaatttaaaaattaactgggcatggtggctgaggtggaagaatggaagaatcacttgagcccaggagtttgaggctgcagtgagctatgatgcaccactgtactcctgccttanaaaaaaaaaaaaattcccaatagtccatgaaggcttggatctctggggaagtccttcatagatgcggtcacaatttcttaaagcaaccttttaatttgcaggataataccccccaatttttttagagacaggccgggctcttaaaaaaaaatttctttggggagtgaagacgctgggtgtcactggccacctctggttttatccctgaatttaacgggataccatacagggagggactggggcctttctggacatcatcctgaaagagaccagggacttcggcgttttccctctggggaccctacaggcgatgagaattacatggataatctcctccatataaatcctctaaaggggggatttgaaatcaaaaccagtgaatcccataactcctagagaaacgagagattccttcaaagccttgtgaaggccatgtgttcacaacgaaagctggttggaaatccgtgtcctgaaggagcacttccaggcattagtaacacggtcccccgggattacaagccgaagtgggactctcctgcacacttataaagtgcagagtcctaaaacgcaaacacattttaatatcctgacaatgggtgcatggggtgataatcccaagagggttcccctatctgaagcccagcttgttcacgtacttacaacatagtgcgcaaggctttgacacatagccggattcggaggcggtcaagctaaaagggaga

SEQ ID NO: 630251 - DNA, 106 bp, Homo sapiens
cgattctactatctactcactgaaggaagaggtggtttccgtggtgctgctgtgagccacagctgctccctcctcccccaggtgcctggcctcttacaatggattg

SEQ ID NO: 630252 - DNA, 732 bp, Homo sapiens
caaccttctagcctgcgatctgcggagaagaacaattacaattgatgttcttgcaccatacataccttgaggcgagcaagaaaattaaagttttaagccatgagggaaatcgtgcacatccaggctggtcagtgtggtcaaccagatcggtgccaagttctgggaggtgatcagtgatgaacatggcagtcgactccccggaccggtcacctacgcacggtgggacatgcggaccggagtccgacgtcgtggagccgcatctctgatgtactacagatgaatgccaacaggtgcgcaagagtactgtgtcctcgatgccactccatggtggaatcataagaatactgtggaccataggcactctgttcgctcaggtcactttttggccagatctttagaaccagagaactctggtatttggtcagtctgggcgcaggtaaacaatgtgggccaagaggccagtagcacagagggcgccgacctggttgattctgtcctggtatgtggtacaggaaggaggcgagacaagcctgtgtacgtgccctgctagggcattccagcttgacctctagtctactgggggggtagctacaggctcgtggcaatgggcactctccttatgagctagatccagataagaataccctgatcgcgctcatgaataccttctgtgtggtggcttcaccctaacagtgtgtgacaccgggtctgagccctacaaatgctaccctt

SEQ ID NO: 630253 - DNA, 3883 bp, Homo sapiens
cagctggtacggctctggatttttggataggcggagccgccgccgcgcggccggggcttctcactctgacgggcccgcgcgcacgatggccggcgccgcgccgcgggtccgctacctggcgggcttctgctgccctctcgggggcctggcggcgggcaagccccgcgtgctgtgccatgaggcagaggtcttcctgtccaccgggagcgagctcgtctacgtgtacgaccaggagggcgggctgctgaccgcggcgttccggttccccgaccaggtgtggcacctggagctgctggcgccgcgcaggttgctgtacgcgctgtgcgcccggaggggcctctactgcctgtcgctggaccacccgggcaggagcaggtctacgagccaggatgacagggacagcgaggacggtgaccagccttcccccgtgatccctgtggaccccgatgcctgcatccttcccgatgctgcgctgtgcgcgttcaccttgctggacagtgtgctggtcaccctggtgcagggccctgcccgatggaagatgcagctgtttgagcagccctgtcctggggaggacccccggccaggaggccagatcggtgaggtggagctgtcctcctacacgcccccagccggggtcccaggaaagcctgcagccccccacttccttccagtgctgtgctctgtgtcaccatcaggctccagggtcccgcacgacctcctcgggggctccgggggcttcacgctggaggacgccctcttcgggctcctctttggagctgatgccaccctcctgcagtcacctgtggtcctctgtggtctccctgatggccagctctgctgtgtgatcctgaaggccctggtcacctccaggtcagcccctggtgacccaaatgcccttgtcaagatcctccatcacctggaggagcccgtcatcttcataggggccttgaagacagagccacaggctgcagaagctgcagagaattttctgcctgacgaggatgtgcactgtgactgcctggtggcctttggtcaccacggccggatgctggccatcaaggccagctgggatgagtccgggaagctggtgcccgagctgcgggagtactgcctcccaggccctgtgctctgcgctgcctgtggcgggggtggccgcgtgtaccacagcaccccttctgacctctgtgtggtggatctgtctcggggaagcaccccgctgggccctgagcagcccgaagaaggcccgggaggcctgccccccatgctgtgcccagccagcctgaacatctgcagtgtcgtctcgctgtccgcgtctcccaggacgcatgaaggtggcaccaagctcctggccctgtccgccaaaggccgcctgatgacctgcagcctggacctggactctgagatgcctggcccagccaggatgaccacagagagtgcaggtcagaaaataaaggagctgctgtctggaattggcaacatctctgagagagtgtcttttctaaagaaggcggttgaccagcggaacaaggcactgacaagcctcaacgaggccatgaacgtgagctgtgcactgctgtcaagcggcacgggccccagacccatctcctgcaccaccagcaccacctggagccgcctgcagacacaggatgtgctcatggccacctgcgtgctagagaacagcagcagcttcagcctggaccaggggtggaccctgtgcatccaggtgctcaccagctcctgtgctctcgacctggactcggcctgctccgccatcacctacaccatccccgtggaccagctcggccccggtgctcggcgggaggtgacgctacccctgggccctggtgagaacggcgggctcgacctgcccgtgaccgtgtcctgcacgctgttctacagtctcagggaggtggtgggcggggcccttgccccctcagactctgaggacccctttctggatgagtgcccctccgacgtcctgcccgagcaagagggtgtttgcctgcccctgagcaggcacacagtggacatgctgcagtgtctgcgcttccctggcctggccctgccacacacacgggccccctccccactcggccccacccgagaccctgtggccacttttctggaaacttgtcgggagcctggcagccagccagcaggacccgcctccctgcgggccgagtacctgcccccatctgtggcttccatcaaggtgtcggcggagctgctcagagctgccttgaaggacggccactcaggcgtgcccctgtgctgtgccaccctgcagtggctccttgctgagaatgctgctgtggacgtcgtgagggcccgagcactatcttccatccagggagtggcccctgatggcgccaacgttcacctcatcgtccgagaggtggccatgaccgacctgtgcccagcagggcccatccaggccgtggagattcaagtggaaagctcctctctggccgacatttgcagggcgcaccatgccgttgtcgggcgcatgcagacgatggtgacagagcaggccgcccagggctccagcgctcctgatctccgtgtgcagtacctccgccagatccacgccaaccacgagacactgctgcgggaggtgcagaccctgcgcgaccggctctgcacggaggatgaggccagctcctgtgccaccgcccagaggctgctacaggtgtaccggcagctgcgccaccccagcctcatcctgctgtgaccaggcgggcctgcccctgggctctggccacgcttccagcctctgtcacagcccccccaggcctcatgggttagagggaaaccgagctggcctggccagagccgtcagggaaggtaggacctggccacgtaggagcagaacgctcatgaaagtgcttggaggccgtggagcacaaagcagattctgattgggagcaaccgaggcgggctctgaacctggccggtccagcttcgcgtcctctgctggtgtctctccttctctgaccgcggccgcagcccctgcactcgccttcctcactgctgggcagccttcccaccaccgcagcagcccctgaggccaggaggcagtgcagggcattctggacccggagggccagagaaacaggatttctggggtttggacttggggtgagtttgtaactgttgctgccacaccaccaggagcaccggctgcccctctgggtggcactaccaggtgccccacggtacccttgtcacactgttcacacctgcccggctgcccactctgggaccccgaggtaggagggtgctccctgagctcctgcaagtgcccgtggtctcgtgccacaccaaggaagggccagcgggtggcctgtggccggaatgctcaacaactaggtgcctccggccggggcagtacccagcactgtgcactattttcagggccactcagggtggcgctgtggccgggggggggccctgagccccagcccccagcctcctccctcagcctgggctacggcccacctcctggtgctggtgttttcatctggggagggtgctcgcgccgctcccgctgcaggcactgtccgcgatgagtgcgggtaggagccgtgaggtgcttctctgctgtgacaaacgaccctgtctgtccgtgaaaaaaaaaaaaaaaaaaaaaaaaaaaaaaaaaaaaaaaaaaaaaaaaaaaaaaaagaaaaaaccgcgcggggcgagacattcatagggcgcgggcgggaaaaagagagggagaagaacaaatagaccaaaacactcaactcaatcccacaagacgaaaccacccaattagctcttcaacaaaccattacaaacatacacacgcacacacaccacataaaataaaaaaataaaataaatactaaaaacacacaaa

SEQ ID NO: 630254 - DNA, 1324 bp, Homo sapiens
ccacctgccacttcccaagtagggtcctgcgagtggtgggtcccccagaggtacccagtgacatccccagggccaggtgtggggcctgagctgtgtctgcttcacctgcagacactgctgcgggaggtgcagaccctgcgcgaccggctctgcacggaggatgaggccagctcctgtgccaccgcccagaggctgctacaggtgtaccggcagctgcgccaccccagcctcatcctgctgtgaccaggcgggcctgcccctgggctctggccacgcttccagcctctgtcacagcccccccaggcctcatgggttagagggaaaccgagctggcctggccagagccgtcagggaaggtaggacctggccacgtaggagcagaacgctcatgaaagtgcttggaggccgtggagcacaaagcagattctgattgggagcaaccgaggcgggctctgaacctggccggtccagcttcgcgtcctctgctggtgtctctccttctctgaccgcggccgcagcccctgcactcgccttcctcactgctgggcagccttcccaccaccgcagcagcccctgaggccaggaggcagtgcagggcattctggacccggagggccagagaaacaggatttctggggtttggacttggggtgagtttgtaactgttgctgccacaccaccaggagcaccggctgcccctctgggtggcactaccaggtgccccacggtacccttgtcacactgttcacacctgcccggctgcccactctgggaccccgaggtaggagggtgctccctgagaccaaagcacaaaacagcatgcagggagctcctgcaagtgcccgtggtctcgtgccacaccaaggaagggccagcgggtggcctgtggccggaatgctcaacaactaggtgcctccggccggggcagtacccagcactgtgcactattttcagggccactcagggtggcgctgtggccgggggggggccctgagccccagcccccagcctcctccctcagcctgggctacggcccacctcctggtgctggtgttttcatctggggagggtgctcgcgccgctcccgctgcaggcactgtccgcgatgagtgcgggtaggagccgtgaggtgcttctctgctgtgacaaacgaccctgtctgtccgtgaaccttcaggcctcggctgttttctctcgccccttcccaccctctctcactgggctccttccagagcctggcgctgcttgggagccctcaccaccggggtggcctccgaggaagacgcgtccctgtgacccagttacccctgaggaggctctgctc

SEQ ID NO: 630255 - DNA, 3148 bp, Homo sapiens
cagctggtacggctctggatttttggataggcggagccgccgccgcgcggccggggcttctcactctgacgggcccgcgcgcacgatggccggcgccgcgccgcgggtccgctacctggcgggcttctgctgccctctcgggggcctggcggcgggcaagccccgcgtgctgtgccatgaggcagaggtcttcctgtccaccgggagcgagctcgtctacgtgtacgaccaggagggcgggctgctgaccgcggcgttccggttccccgaccaggtgtggcacctggagctgctggcgccgcgcaggttgctgtacgcgctgtgcgcccggaggggcctctactgcctgtcgctggaccacccgggcaggagcaggtctacgagccaggatgacagggacagcgaggacggtgaccagccttcccccgtgatccctgtggaccccgatgcctgcatccttcccgatgctgcgctgtgcgcgttcaccttgctggacagtgtgctggtcaccctggtgcagggccctgcccgatggaagatgcagctgtttgagcagccctgtcctggggaggacccccggccaggaggccagatcggtgaggtggagctgtcctcctacacgcccccagccggggtcccaggaaagcctgcagccccccacttccttccagtgctgtgctctgtgtcaccatcaggctccagggtcccgcacgacctcctcgggggctccgggggcttcacgctggaggacgccctcttcgggctcctctttggagctgatgccaccctcctgcagtcacctgtggtcctctgtggtctccctgatggccagctctgctgtgtgatcctgaaggccctggtcacctccaggtcagcccctggtgacccaaatgcccttgtcaagatcctccatcacctggaggagcccgtcatcttcataggggccttgaagacagagccacaggctgcagaagctgcagagaattttctgcctgacgaggatgtgcactgtgactgcctggtggcctttggtcaccacggccggatgctggccatcaaggccagctgggatgagtccgggaagctggtgcccgagctgcgggagtactgcctcccaggccctgtgctctgcgctgcctgtggcgggggtggccgcgtgtaccacagcaccccttctgacctctgtgtggtggatctgtctcggggaagcaccccgctgggccctgagcagcccgaagaaggcccgggaggcctgccccccatgctgtgcccagccagcctgaacatctgcagtgtcgtctcgctgtccgcgtctcccaggacgcatgaaggtggcaccaagctcctggccctgtccgccaaaggccgcctgatgacctgcagcctggacctggactctgagatgcctggcccagccaggatgaccacagagagtgcaggtcagaaaataaaggagctgctgtctggaattggcaacatctctgagagagtgtcttttctaaagaaggcggttgaccagcggaacaaggcactgacaagcctcaacgaggccatgaacgtgagctgtgcactgctgtcaagcggcacgggccccagacccatctcctgcaccaccagcaccacctggagccgcctgcagacacaggatgtgctcatggccacctgcgtgctagagaacagcagcagcttcagcctggaccaggggtggaccctgtgcatccaggtgctcaccagctcctgtgctctcgacctggactcggcctgctccgccatcacctacaccatccccgtggaccagctcggccccggtgctcggcgggaggtgacgctacccctgggccctggtgagaacggcgggctcgacctgcccgtgaccgtgtcctgcacgctgttctacagtctcagggaggtggtgggcggggcccttgccccctcagactctgaggacccctttctggatgagtgcccctccgacgtcctgcccgagcaagagggtgtttgcctgcccctgagcaggcacacagtggacatgctgcagtgtctgcgcttccctggcctggccctgccacacacacgggccccctccccactcggccccacccgagaccctgtggccacttttctggaaacttgtcgggagcctggcagccagccagcaggacccgcctccctgcgggccgagtacctgcccccatctgtggcgtcctctgctggtgtctctccttctctgaccgcggccgcagcccctgcactcgccttcctcactgctgggcagccttcccaccaccgcagcagcccctgaggccaggaggcagtgcagggcattctggacccggagggccagagaaacaggatttctggggtttggacttggggtgagtttgtaactgttgctgccacaccaccaggagcaccggctgcccctctgggtggcactaccaggtgccccacggtacccttgtcacactgttcacacctgcccggctgcccactctgggaccccgaggtaggagggtgctccctgagaccaaagcacaaaacagcatgcagggagctcctgcaagtgcccgtggtctcgtgccacaccaaggaagggccagcgggtggcctgtggccggaatgctcaacaactaggtgcctccggccggggcagtacccagcactgtgcactattttcagggccactcagggtggcgctgtggccgggggggggccctgagccccagcccccagcctcctccctcagcctgggctacggcccacctcctggtgctggtgttttcatctggggagggtgctcgcgccgctcccgctgcaggcactgtccgcgatgagtgcgggtaggagccgtgaggtgcttctctgctgtgacaaacgaccctgtctgtccgtgaaaaaaaaaaaaaaaaaaaaaaaaaaaaaaaaaaaaaaaaaaaaaaaaaaaaaaaagaaaaaaccgcgcggggcgagacattcatagggcgcgggcgggaaaaagagagggagaagaacaaatagaccaaaacactcaactcaatcccacaagacgaaaccacccaattagctcttcaacaaaccattacaaacatacacacgcacacacaccacataaaataaaaaaataaaataaatactaaaaacacacaaa

SEQ ID NO: 630256 - DNA, 323 bp, Homo sapiens
aacttcagcgagagggaagcatcgagactctgagtaacagctcaggctccaccagtggcagcatcccaagaaacttcgatggctaccgatctccgctccctaccaacgagagccagccgctcagcctcttccccactggcttcccataggcaccagccacctgcttctgactggctggcccactcaccctctagaggggccagggcactctcttcctcctggctgagcctctggtgcatttgctgaattttgccagcacctcggaagacttaccacatgccatgaccctttctgaacactacagagtttagctcattgaatcg

SEQ ID NO: 630257 - DNA, 2964 bp, Homo sapiens
cagctggtacggctctggatttttggataggcggagccgccgccgcgcggccggggcttctcactctgacgggcccgcgcgcacgatggccggcgccgcgccgcgggtccgctacctggcgggcttctgctgccctctcgggggcctggcggcgggcaagccccgcgtgctgtgccatgaggcagaggtcttcctgtccaccgggagcgagctcgtctacgtgtacgaccaggagggcgggctgctgaccgcggcgttccggttccccgaccaggtgtggcacctggagctgctggcgccgcgcaggttgctgtacgcgctgtgcgcccggaggggcctctactgcctgtcgctggaccacccgggcaggagcaggtctacgagccaggatgacagggacagcgaggacggtgaccagccttcccccgtgatccctgtggaccccgatgcctgcatccttcccgatgctgcgctgtgcgcgttcaccttgctggacagtgtgctggtcaccctggtgcagggccctgcccgatggaagatgcagctgtttgagcagccctgtcctggggaggacccccggccaggaggccagatcggtgaggtggagctgtcctcctacacgcccccagccggggtcccaggaaagcctgcagccccccacttccttccagtgctgtgctctgtgtcaccatcaggctccagggtcccgcacgacctcctcgggggctccgggggcttcacgctggaggacgccctcttcgggctcctctttggagctgatgccaccctcctgcagtcacctgtggtcctctgtggtctccctgatggccagctctgctgtgtgatcctgaaggccctggtcacctccaggtcagcccctggtgacccaaatgcccttgtcaagatcctccatcacctggaggagcccgtcatcttcataggggccttgaagacagagccacaggctgcagaagctgcagagaattttctgcctgacgaggatgtgcactgtgactgcctggtggcctttggtcaccacggccggatgctggccatcaaggccagctgggatgagtccgggaagctggtgcccgagctgcgggagtactgcctcccaggccctgtgctctgcgctgcctgtggcgggggtggccgcgtgtaccacagcaccccttctgacctctgtgtggtggatctgtctcggggaagcaccccgctgggccctgagcagcccgaagaaggcccgggaggcctgccccccatgctgtgcccagccagcctgaacatctgcagtgtcgtctcgctgtccgcgtctcccaggacgcatgaaggtggcaccaagctcctggccctgtccgccaaaggccgcctgatgacctgcagcctggacctggactctgagatgcctggcccagccaggatgaccacagagagtgcaggtcagaaaataaaggagctgctgtctggaattggcaacatctctgagagagtgtcttttctaaagaaggcggttgaccagcggaacaaggcactgacaagcctcaacgaggccatgaacgtgagctgtgcactgctgtcaagcggcacgggccccagacccatctcctgcaccaccagcaccacctggagccgcctgcagacacaggatgtgctcatggccacctgcgtgctagagaacagcagcagcttcagcctggaccaggggtggaccctgtgcatccaggtgctcaccagctcctgtgctctcgacctggactcggcctgctccgccatcacctacaccatccccgtggaccagctcggccccggtgctcggcgggaggtgacgctacccctgggccctggtgagaacggcgggctcgacctgcccgtgaccgtgtcctgcacgctgttctacagtctcagggaggtggtgggcggggcccttgccccctcagactctgaggacccctttctggatgagtgcccctccgacgtcctgcccgagcaagagggtgtttgcctgcccctgagcaggcacacagtggacatgctgcagtgtctgcgcttccctggcctggccctgccacacacacgggccccctccccactcggccccacccgagaccctgtggccacttttctggaaacttgtcgggagcctggcagccagccagcaggacccgcctccctgcgggccgagtacctgcccccatctgtggcttccatcaaggtgtcggcggagctgctcagagctgccttgaaggacggccactcaggtgccccacggtacccttgtcacactgttcacacctgcccggctgcccactctgggaccccgaggtaggagggtgctccctgagaccaaagcacaaaacagcatgcagggagctcctgcaagtgcccgtggtctcgtgccacaccaaggaagggccagcgggtggcctgtggccggaatgctcaacaactaggtgcctccggccggggcagtacccagcactgtgcactattttcagggccactcagggtggcgctgtggccgggggggggccctgagccccagcccccagcctcctccctcagcctgggctacggcccacctcctggtgctggtgttttcatctggggagggtgctcgcgccgctcccgctgcaggcactgtccgcgatgagtgcgggtaggagccgtgaggtgcttctctgctgtgacaaacgaccctgtctgtccgtgaaaaaaaaaaaaaaaaaaaaaaaaaaaaaaaaaaaaaaaaaaaaaaaaaaaaaaaagaaaaaaccgcgcggggcgagacattcatagggcgcgggcgggaaaaagagagggagaagaacaaatagaccaaaacactcaactcaatcccacaagacgaaaccacccaattagctcttcaacaaaccattacaaacatacacacgcacacacaccacataaaataaaaaaataaaataaatactaaaaacacacaaa

SEQ ID NO: 630258 - DNA, 2377 bp, Homo sapiens
cagctggtacggctctggatttttggataggcggagccgccgccgcgcggccggggcttctcactctgacgggcccgcgcgcacgatggccggcgccgcgccgcgggtccgctacctggcgggcttctgctgccctctcgggggcctggcggcgggcaagccccgcgtgctgtgccatgaggcagaggtcttcctgtccaccgggagcgagctcgtctacgtgtacgaccaggagggcgggctgctgaccgcggcgttccggttccccgaccaggtgtggcacctggagctgctggcgccgcgcaggttgctgtacgcgctgtgcgcccggaggggcctctactgcctgtcgctggaccacccgggcaggagcaggtctacgagccaggatgacagggacagcgaggacggtgaccagccttcccccgtgatccctgtggaccccgatgcctgcatccttcccgatgctgcgctgtgcgcgttcaccttgctggacagtgtgctggtcaccctggtgcagggccctgcccgatggaagatgcagctgtttgagcagccctgtcctggggaggacccccggccaggaggccagatcggtgaggtggagctgtcctcctacacgcccccagccggggtcccaggaaagcctgcagccccccacttccttccagtgctgtgctctgtgtcaccatcaggctccagggtcccgcacgacctcctcgggggctccgggggcttcacgctggaggacgccctcttcgggctcctctttggagctgatgccaccctcctgcagtcacctgtggtcctctgtggtctccctgatggccagctctgctgtgtgatcctgaaggccctggtcacctccaggtcagcccctggtgacccaaatgcccttgtcaagatcctccatcacctggaggagcccgtcatcttcataggggccttgaagacagagccacaggctgcagaagctgcagagaattttctgcctgacgaggatgtgcactgtgactgcctggtggcctttggtcaccacggccggatgctggccatcaaggccagctgggatgagtccgggaagctggtgcccgagctgcgggagtactgcctcccaggccctgtgctctgcgctgcctgtggcgggggtggccgcgtgtaccacagcaccccttctgacctctgtgtggtggatctgtctcggggaagcaccccgctgggccctgagcagcccgaagaaggcccgggaggcctgccccccatgctgtgcccagccagcctgaacatctgcagtgtcgtctcgctgtccgcgtctcccaggacgcatgaaggtggcaccaagctcctggccctgtccgccaaaggccgcctgatgacctgcagcctggacctggactctgagatgcctggcccagccaggatgaccacagagagtgcaggtcagaaaataaaggagctgctgtctggaattggcaacatctctgagagagtgtcttttctaaagaaggcggttgaccagcggaacaaggcactgacaagcctcaacgaggccatgaacgtgagctgtgcactgctgtcaagcggcacgggccccagacccatctcctgcaccaccagcaccacctggagccgcctgcagacacaggatgtgctcatggccacctgcgtgctagagaacagcagcagcttcagcctggaccaggggtggaccctgtgcatccaggtgctcaccagctcctgtgctctcgacctggactcggcctgctccgccatcacctacaccatccccgtggaccagctcggccccggtgctcggcgggaggtgacgctacccctgggccctggtgagaacggcgggctcgacctgcccgtgaccgtgtcctgcacgctgttctacagtctcagggaggtggtgggcggggcccttgccccctcagactctgaggacccctttctggatgagtgcccctccgacgtcctgcccgagcaagagggtgtttgcctgcccctgagcaggcacacagtggacatgctgcagtgtctgcgcttccctggcctggccctgccacacacacgggccccctccccactcggccccacccgagaccctgtggccacttttctggaaacttgtcgggagcctggcagccagccagcaggacccgcctccctgcgggccgagtacctgcccccatctgtggcttccatcaaggtgtcggcggagctgctcagagctgccttgaaggacggccactcaggttggtggcactgcttggctttgctcagccttggggattttttttttttttttaagagacaggaacttgctctgttgcccaggctggagtgcagtggtgcaatcatggctcactgcagc

SEQ ID NO: 630259 - DNA, 472 bp, Homo sapiens
gcctacacgctggcactatggtcatggcggaggggacggcactgctgatgcggaacaggccgggcaccaacgcgcacgattcctataattggcctgatgaatccttagatgaaatggacagcacactagctgttcaacagtatatccaacagaacataggagcacattgctccaatattgacaaaatgcttgaaccacctgaaggccaagatgaacgtgtgcggaagcatgaacatttaaggcaggtctgccttgagctaaatggacttgctgtcaaacttgagagtgaatgccatccagatacttgcactcatatgacagcgactgaacaatggatttttctttgtgcagctcatacaactccaaaagagtgtcctgctatagactatactatacacacacttgatggtgctgcatgtcttctgaatagcaatagatattttctcagcatgggtatgataaaggaatcatc

SEQ ID NO: 630260 - DNA, 222 bp, Homo sapiens
attggatagcggataaggggggcgatacatgaggtcaggagatcgagaccatcctggctagcacatactgcctcttctaaaaatacaaaaaattagctagggtgtggtggcgcaccccgtgcagtccccagctaatttgggaggcttgaggcagggagaatggttgttgaacccccgtgagacggagttttgcagtgagcctgagatcgcaccacgtgcact

SEQ ID NO: 630261 - DNA, 1739 bp, Homo sapiens
  misc_feature (1404)..(1404): n is a, c, g, or t
  misc_feature (1430)..(1430): n is a, c, g, or t
gttcgcaccttagttgttgttgctgtcgtatcatcactgtatgttagttattacatatatagtgtgtgttagttcactactaggtagtgagctagcttcttccgtcgtagtgtcttgtttgatttggtagtatgaatagtattagtgtcttcttcccgttatataagtcggcggtcgtatggtatattactcggtggtgtctagttgttatctccccaacatttatttgttgtttatattcatcatctcgactgttttttttttatctcctctcgtgtgttgacacccaacaactacagcggatgttgttttaataatggagaaggggtgttttttagatactgtttagatagggtgttgtctgctggctgcaatagaatgtgtttgtatgcctgccgccccgctcgtgtgttttactctacgcataaagaatgttatattcgcctgtctttgtgtgaggcttgtctcccctcccgtttgtatgtttgaggggctcctccctcgctgctggtgctgctccgatcagagggagaaacaaaagagattgtttgtttgaacgggcgcccgctccggtgggtgtatcgatacttaatttaccttgcgggtcctatcaatgggtggtggcgcattactatgatgacataacctttggtgtgtgtcgctttataaaatttaatgggggggcaccccctctttattagtttgattggtgggcctcttccacaacgaagagggggtttatacaggcgtgtggttgttttttaatacctttttttatacacccaccgtgtggtattatgtttactcgtctcgtgctccctcgtgtagaatagagagcccgggggggcacatagattcacctctgctctcatagttgcgatggagtatagaccaccctctcatttgggaagcttttttttaatatttgtttattattagatcgcttcactcaccagcttgtatacttcttattaacatctaaatctcccacacgcgggtgttctctttaataatgtttttcccctaacacgctggcgcctcttttttataaataaaattggtttggcgttgttggtggggggggggcagcacatctcttgcggggagcatcaacgagagacgctcacaacacacgtctcgcgggggcgcacgcgtatatcacatgttcttatataagatgtgtttacacacacacttgtccataaggcggagtacatatatagataatatatatatcacatatgtgagtagttccacacatatatatctgtgtgcaccactttctgcgtgagcacacacatgtgtatccctctcagtggggtgatatacacacaggcgccacactttctatatgttgtatagagaggtccacatatatacgcacacacacatataggggtgttnttccacgacctctcagatagatgttnggagatacagcgagagacatctctccccgagcgggtgcgcacacccgcctatattataaagtggtttggtttgttgttacacacggattataaagtctctatacgggagtattgaggtgtctaagaccgcggggtaataccccgggcgggttgtttattttatcttctcaaattcgtcccctgtatcgaaaagagaacaaaaagaaaaaaagggctatattttccaaaagggcacttcccccggaaaagaaaaaatttccacttgggggaaaaccccccccccccccaaaaacaggggtttctccaaca

SEQ ID NO: 630262 - DNA, 1037 bp, Homo sapiens
  misc_feature (3)..(3): n is a, c, g, or t
  misc_feature (70)..(70): n is a, c, g, or t
gtngggtcccgagagcgaggggcctgtcactccgggtccctgtggtttagggctgtttctgtagcgcctncgacccccctggtcttcactgtgaaggctgcaagggagaaaagaggcccactaggaacattctggggagccaagggtggggtaatgcaccacccggcccctgcgtggcccagatgtgggtggtgcgcttctcatacctggcagattagcctaggtccccggagcaccagcttcatcctctgtcctctttcctcctgtggcccaagaggagaggtcaggtcagatggctggaggcagcttccagcagaggctcggtgtgggtggggccgggagaaacatgcccctggggcggtggctcactctctggtggtggttccacacccaccgtgtgctggtcgtggagccaggctcggtgcctaccaggcctgagtcaagatgtggcacctggtgctgtgggtgtccccccgctcccgggggtcatgtctgtccttcgcagagtgtcttttctaaagaaggcggttgaccagcggaacaaggcactgacaagcctcaacgaggccatgaacgtgagctgtgcactgctgtcaagcggcacgggccccagacccatctcctgcaccaccagcaccacctggagccgcctgcagacacaggatgtgctcatggccacctgcgtgctagagaacagcagcagcttcagcccagcccccagcctcctccctcagcctgggctacggcccacctcctggtgctggtgttttcatctggggagggtgctcgcgccgctcccgctgcaggcactgtccgcgatgagtgcgggtaggagccgtgaggtgcttctctgctgtgacaaacgaccctgtctgtccgtgaaccttcaggcctcggctgttttctctcgccccttcccaccctctctcactgggctccttccagagcctggcgctgcttgggagccctcaccaccggggtggcctccgaggaagacgcgtccctgtgacccagttacccctgaggaggctctgctc

SEQ ID NO: 630263 - DNA, 422 bp, Homo sapiens
  misc_feature (115)..(115): n is a, c, g, or t
  misc_feature (140)..(140): n is a, c, g, or t
  misc_feature (152)..(152): n is a, c, g, or t
  misc_feature (157)..(157): n is a, c, g, or t
  misc_feature (166)..(166): n is a, c, g, or t
  misc_feature (245)..(245): n is a, c, g, or t
  misc_feature (347)..(347): n is a, c, g, or t
  misc_feature (411)..(411): n is a, c, g, or t
ggcggcgacaccatgcgatcagcggcatggggcaggttatggtagtgcggactgcggtgtgagcagacgacacacggggccgccaatgcgccggcggccatgacatgggcgccangggtccaaagctcggggccatgtcntatcagcctcgnggccnggacggcgngcatcaagaggcagcaggagctgagcaagctttggtgcggcctcgggcaagcatgtgcccccttcgtattcacgcgccngcattaggcttctgctatttcagtctttgacactgggccagcagcatcttctggagtgagaccaacatgcccaggccaccacccttgcccactctagaagtncctgggtgaaggcaaagtcctgatattagaatggctgcccttgcttgaacaaatcaaggatgangactggccttg

SEQ ID NO: 630264 - DNA, 863 bp, Homo sapiens
ggaggacgcggacccgccatggcgcgaagaaggtgcgtccgcggtgatcgcgagtggcccgccggtgcgcgccctgggaagcactgaacaggccggcgatccagtctacgcgtgtgactacgagaccttgacgcggccgttctctgaacgcccggctgccggtccgggtctggcccgagtccgccggaaaaagccgctctttgcaggttgcttcggggcacgcctcccgactcttgcggcctgggcccgcttgttcaaccggcgacaaattccttgttggtggacagcacgaaaagcagccgttgcataagtgggcgccttccacccgcggggtgccggcgccccagaattaacggggggcggcaagaacttttttggacgccaacggggacggcctgggggcatcccttgacctttcccaagggacaagactttgaagagccggaaggcgcggggaaatcgaacacctttcgttgtacccaggactggggcggttggtccccaaggacacggagggagagaggccttacaccggtgttccagcccggccgcgaaaagaacaggctggcttccgaggcggtacacggcttcttcctacggcgacatgttttttgccaagaaacaacgagacaggagaacaaacaaattgtgttgccgcgctcggtgcccgaagagaatttttaacaccatgtgggggggggcgggccccaagtgaaaggaaccggccacgacgggtccgaggacacgtgtacgagaggggttgttttccccaaaaaacgcggcaagggggtggacatccagggtcggcacccgggccacggacggtctaccccagcggtggaccaaggaattaagggagagaa

SEQ ID NO: 630265 - DNA, 199 bp, Homo sapiens
ttcagcacgaagggacagtggctcctaatgacgattcttgatcacacgatgctgaccacttatacagtgcaaaggtaatgctgatggctagccctagtatggaagatttatatcataagtcatgtgctcttgctgaaggggccacaatgaactgcgaaaatggattccaacatgcctgctagacttgtaacagtattta

SEQ ID NO: 630266 - DNA, 544 bp, Homo sapiens
agttctatacaaatcgatcaaggggaaaaaacacagatacctcaatggaaatgactgagagatacacttctcagcagctgcagcagaggtcagaagaagaatgaagtaatatcttcaacaaactgtggaaaaataactgtctagcaagttggtatgctgccaaaccatcatttgagaactgaaagagacgtattctttagatatatagaggctaggaaaattagaccacctattaaagatctctgtaaaaagctcttacaagatgcagtgcatcacgaagaaaagtggaagcagatggaacccatggtctataagaaaccaagttatggtgagaatcactaaaatgttacctactagtattggcaaagtaatgtctgagggtttaaaaagtgtcaaaactcaaactctaagaaataataagataggtaaggacatgtttagatggtaaggcatgctaccaactttgcatatattcagctggtgcaagagtactttgatttttaccaccttacttacacaaaccccgattacttttgcatcaact

SEQ ID NO: 630267 - DNA, 245 bp, Homo sapiens
  misc_feature (33)..(33): n is a, c, g, or t
  misc_feature (46)..(47): n is a, c, g, or t
  misc_feature (56)..(56): n is a, c, g, or t
  misc_feature (78)..(78): n is a, c, g, or t
  misc_feature (84)..(84): n is a, c, g, or t
  misc_feature (105)..(106): n is a, c, g, or t
  misc_feature (113)..(114): n is a, c, g, or t
  misc_feature (162)..(162): n is a, c, g, or t
  misc_feature (169)..(169): n is a, c, g, or t
  misc_feature (171)..(171): n is a, c, g, or t
  misc_feature (214)..(214): n is a, c, g, or t
  misc_feature (244)..(244): n is a, c, g, or t
ggatcaagtttaaatgactgtgctggccctttnaaaataaaggacnnattgcaaangagggccgcgcctgcctttccnatctgntatctatctggctggcagggnnggaaagnncttgcatgttggtgaaggaagaagtggggtggaagaagtggggtgggnacgacantnaaatctagagtaaaaccaagctggcccaaggtgtcctgcaggntgtaatgcagtttaatcagagtgccattcnt

SEQ ID NO: 630268 - DNA, 154 bp, Homo sapiens
ctgctagaaaggaggggctgctcagaagcctctttccatacgagttttggttttgttttttaatatttttttctattaaaattactcatgcatttaccttcccgttattcaaccagtctctggttgcatccctgcacttctactacaagtgaga

SEQ ID NO: 630269 - DNA, 273 bp, Homo sapiens
tgatctcagtggtgaacggaattagggttatccatacccagcgcacatgccatgcggcttacatgcaggtttcctcagctggtgcctgctggccctaggcgggaggaggcaaagctgtggctcccaggcaagcatagcaaaaagagttcgcccatggatcgaaacacgtgacgagtatcggctatgccgatagaggaacaacatggtctgtgaaaaagagccggttgaaaagcaagctgaaagcacaagacacactgcagagagtcaatcagg

SEQ ID NO: 630270 - DNA, 673 bp, Homo sapiens
  misc_feature (579)..(579): n is a, c, g, or t
gtgtcgtccgggagccgcgaccgcatggatcgctgcagagtggacatcccgcaccgcactgcatcggagcggcgtgaggcacggcaggagtgtgcgggtcaagtggtccaagacacagctctcgctcgggggcaagacaacaagctgctggttggaagtcatcgagcctgaccccgtgcacatacacggagcactggcggcgaaggccatcgctggtccccacatagcacgggctgctggcctcgggggcggacagtgacgtgtatcgttctggaacacgctgacaggacaacatgagtgtatcgacagggctcccaatgtaatctggctggtccaagcacgccaagactggtgagcacgcacggtatcaaaacaatccttgttgaatacctcctgaccagtggcagtgacgggcatcctacggtgctgtacgcaatgtcccctgatggggaggcatcgtcactggtgctgagagaacctgagtctgacgtttacaaaccgtgaaaagatctggttggtcaactttacagatcggtaaactgcagcaggacgtgcacacatgtcagaatcgagacccantcctagttgatggattgcttccaaggttgtcccgaagaaggggtgggcggggggagctggctgaaggactggattcattaatgctgattgtgac

SEQ ID NO: 630271 - DNA, 263 bp, Homo sapiens
  misc_feature (259)..(259): n is a, c, g, or t
gtactgtatcctgggggacagggcagaggtggtcagatcgttgtgagccaaaatcccttgcctaaaaagtggatctgtggagctccatgaggggaacctcagagatgcagaatgacagtttagctaaaagggcttaaagaatgtgaatggattgtcagctctctccatatctgctgaaaaaaggttcaaaatttgtgaaaaagttcacaaagtgtttgtctaaagaagagggacaagcaggtctggacccgtgaagatngctt

SEQ ID NO: 630272 - DNA, 629 bp, Homo sapiens
cagtcagaacatatgcaacacttattaaattctctatcttatatgggtacagttcatgctcccccaaaataattacaatggtaacatcaaagattatcaatcacactgttgcgggaagtcagggaccccaaacggagggactggctggagccccagcagaggaacataaattgtgatgacttcattttaatatggacatatatcagttcccaaaattaatacttttataattttttacgcctgtctttacttcactctctgaacataaattgtgaagatttcattttaatatggacatttatcagttcccaaaattaatacttttataatttattatgcctatctttaatctcttaatcctgttatctttgtaagcaggaccactattgtgttaaactgtacaaattgattgtaaaacgtgtgtttgaacagtatgaaatcagtgcaccttgaaaaagaacagaataacaatgattttcagggaacgagggaagacaatcataaggtctgactgcctgtggcgtcgggcagaatagagccatatttttcttcttgcagagagcctataaacagatgtgcaagtagggaaagatatcgctgaattcttttcctagcaaggaatattaata

SEQ ID NO: 630273 - DNA, 158 bp, Homo sapiens
tcggaccgcgagttgtcagcagtaagcggctttgctgttatacttcctcgttctgccagattccagttcgttcaaagtctatgtgctctcgcagcatgggccaggtacgagaggttgaactggcagacgaggaagtatagacaccaaacccgcctgat

SEQ ID NO: 630274 - DNA, 1170 bp, Homo sapiens
ggaggctgcgagatccctaccgcagtagccgcctctgccgccgacggagcttcccgaacgctcattcagccgcccacggagccgcatccacggagccccggccgtagaggctgcaatcgcagccgggagcccgagaaccaggccaccgagcccgacgcacgcactatccgagggcagccccaggcacagagccaagtggtagaaggtgacgtttcaacatccgatctgggacccagaaaggagggccaacgaaggagcgagcccaaagagcggacgacggaggcgcatcatcatccgcacccgcagaaggccgatacgcggttggacctgcaagggacccagatgactgtaggtaaccaagtgggccaaagagaaacgagaccatggtgatatgggtagacagtgttgcattatgggacatagacaattaatgcatagaaggtgataaaattcataggaggagcattacttggtaacaaaatattatgagcacattcaacccagatgaaagtgtacatactgtggaataaaagatacatcaaagatgaattgtccactcctttcaaagttgaaggccctcttggcaagactggcccacaagggtgatcatctagcaggacaactgggatagaacacttctttacaacatcttttgacaggaacgaaaggacagtggcacttccatctaggtggtgacatggcccccagcagttaggccgcatagatgatccgggaccacacagttggttacaatgacctgttaaagcaggacaagctttaacaggcgtatttaagactctaaaccctggaatcagtatgtatgtgatacccatctggacgaaattcgcaatgtatatggcgcacccaaaacaacatactgggagtttacgtattacactgcacggggtggaaaaccctatatagcacttagatcctatgtgactacatgaaaaacccagcgaagaaaaccgcgacacgacaatggcagaccattgaaccaccacgaagtccaagacaagatcgaacagggcatcagaaaaaggaacaattaaaaaggacagacaagaaacacaaaagggccgcgcaaaacagaaagcaagcacaggacaacaaccgagcgcgacagcaaatgccggacaaaaaaaggaagaacaccacacaaccaaagag

SEQ ID NO: 630275 - DNA, 401 bp, Homo sapiens
ctttcactgtttggcggcggcaggagaggttgcggcgctaggtgctctaagccatccagcgccatcctcgtcgttgcagcgacacacgctcttcgcggcgccatgactgagcagcatgacccttcgtggcaccctcaagggccacaacggctgcgtaatccagatcgctactagcctgcagttctcggccatgaccctctgcgcctctcgagatcagaccaccaccatgtgccgcctcccacccctgcgcccctccgcgcctccacagcgcgctcccgcgcccccactcccactctgtaggtgccgcggcacgaccccccctctccggccccctcccccgcccccccccctcgcccccggccccgccccccccccccgcccgcccccccccccctctcccc

SEQ ID NO: 630276 - DNA, 572 bp, Homo sapiens
  misc_feature (19)..(19): n is a, c, g, or t
  misc_feature (491)..(491): n is a, c, g, or t
gtttccaaacttctggganacaggcgtgacgcaccgaacccagcacattttatctctctaaagtcgggtcccagtattaaacctattctttagtaacctcatatatactgttctaaatcgacagaaattatttattactctgtactcctagactcaaaattctttatcaaagatcgtctcaaagaggtagtacaagtcctgtataactgcactttttcacattcacagtgcttcctcgtgatatctttccttacatcattatacagggttgatatccattttactcttctttctcttctaacatttcttaaattggggtactgtccctgtaacatgtgtatcagcggggccccttttctttgaactttgtctaattagccgtgtacatttgggttctcttttaaggtagaaccagatctttttgggtttctcctttaaagtctactggtttcacaagaggtaaatgtatccatagaccacagtgccgttgnttttaccctctgccagcacaatgcagcacgggattagatgcacaaacctatttagggaaccatggcgaaacgggggatcct

SEQ ID NO: 630277 - DNA, 375 bp, Homo sapiens
aaaaaaaaaaacccaaaaaagcccccataactttcagggcccctattgctttaaaagcataaaataacttgctgcccgaacccgatgggtttaaaaaagaaaataaaacccccttctttttatagcccttaaagccaactttctgggtctaaccaatttggattttttttttgccttgccccccctctggttatttaaaaaccacacccccttgggagtaatgtttcagggcaaggaggtattaccgcttgatgtttgggggttttaattttaaaagttttttattcccgatcaaaaaaaggagttaaaaccactggaacagcctttttttaaaaaccttgttaaaaaataaaagggcccctaatttaaatcgga

SEQ ID NO: 630278 - DNA, 534 bp, Homo sapiens
  misc_feature (72)..(73): n is a, c, g, or t
  misc_feature (87)..(87): n is a, c, g, or t
  misc_feature (94)..(94): n is a, c, g, or t
  misc_feature (96)..(96): n is a, c, g, or t
  misc_feature (101)..(101): n is a, c, g, or t
  misc_feature (107)..(107): n is a, c, g, or t
  misc_feature (114)..(114): n is a, c, g, or t
  misc_feature (122)..(122): n is a, c, g, or t
  misc_feature (158)..(158): n is a, c, g, or t
  misc_feature (163)..(164): n is a, c, g, or t
  misc_feature (200)..(200): n is a, c, g, or t
  misc_feature (208)..(208): n is a, c, g, or t
  misc_feature (225)..(226): n is a, c, g, or t
  misc_feature (246)..(247): n is a, c, g, or t
  misc_feature (264)..(264): n is a, c, g, or t
  misc_feature (285)..(285): n is a, c, g, or t
  misc_feature (297)..(297): n is a, c, g, or t
  misc_feature (326)..(326): n is a, c, g, or t
  misc_feature (354)..(354): n is a, c, g, or t
  misc_feature (364)..(364): n is a, c, g, or t
  misc_feature (371)..(371): n is a, c, g, or t
  misc_feature (404)..(404): n is a, c, g, or t
  misc_feature (409)..(409): n is a, c, g, or t
  misc_feature (419)..(419): n is a, c, g, or t
  misc_feature (425)..(425): n is a, c, g, or t
  misc_feature (433)..(433): n is a, c, g, or t
  misc_feature (442)..(442): n is a, c, g, or t
  misc_feature (472)..(472): n is a, c, g, or t
  misc_feature (507)..(507): n is a, c, g, or t
cttccccgggccccgatggtttataccaattttgcgggttcttttaaaagcccgagagtccaagagcccctnnggccccccccaganagatccntncccgngtcctnaaaaagnaccccctngaaaaccttgggatcctttttaggttaacccctttnccaannccctgggccgggaccccctttttttcccggcccggnattcccanccccgggggggttaggnnggtttttcccccccggcccnnccaacccaatccaattngaagggggcgggttccggccnaaaacccttggntggttaaaaaagaaaaaaggccccttttngggttttaaaacccaaaaaaccctttgnggggaaaaanggcgccncttcccaaaaacccgcccctttaaaaaagcccnccaanaaaaaacccncttccngggggganaagcccccngccttaacttttttattttttttttccccnaagggccaatccttttgggccgctttttttttatnaaaaccctttttttccggccgggggga

SEQ ID NO: 630279 - DNA, 597 bp, Homo sapiens
  misc_feature (228)..(228): n is a, c, g, or t
agcggggaataatcacttatgtgaccctttcgataggcactgggtgcatgtccagtgttctgctggcatcaaaggagggacatgaataccctgtatagtaccctcgtctcacacacaataacaactgtttccctgtcttcttatttaaaatcaactcttagatggcgcgtctcaagtatattactacttcatatgtattgtaactcctaacctttaaaccgttgggancagatatattttggaattcagaaactttcagattttggaaagataacatggtacatatgctatgcattaccaaatcctcatcgtaaataaaatctgagaatatttctacaataacatagatttgtgtgtgtgaacagttgtactaatggagactatattttattttattttagtttttgagacggagtcactctgtcacccgggctggagtgcagtggtacaatctcggctcactgcaacctccgcctcctgggttcaagcaattctcctgtctcagcctcttgtgtagctgggactacgggcacatgccaccatgcctggataattttttatattagtagagacaggcttcaccatattggcaggctg

SEQ ID NO: 630280 - DNA, 703 bp, Homo sapiens
gtggtatcatcacccgatgaggcaaccagccagaacgcctgaagcaggcacatacttcctattctacaccctagtaggctcccttcccctatcatcgcataatttacacttcaaaaaccctaggtcatagaattctatatcatctcatggccaagaactatcaaaactcctgaggccaacaaattaaatatgactagcttaaaccaaatagctttatagtaaaagataacctctttaacggaattccactttaatgactccctaaagcccaatgtcgaagcccccatcgctgggtcaatagtacttgccgcggttactcttgaaactaggcggctatggtattaatacgcctcaaactcaattctcaacccctgaaaaaaacatagctaaccccttttcttgtattatccctatgaggcattattaataacaatgctccattgcgtagaaaaaagactaaaagtcgtcattgatatcttaataggcaatagccctcttgttacgcatctcatccaaacccgtgaagcttaccgggcaggattttataatgcccagagtaagtctcataaatttgctagaacaagagagcgccagggtaaactctcaggtaactacaatatagtttgggttaagcgtatcttaccaaaaatggattggagcgcagatcggatggcctttaagcgcgacctcccccgcaatatta

SEQ ID NO: 630281 - DNA, 504 bp, Homo sapiens
aactacgcacagatagagtagctgctgtagcagccccgctgcgctctcacgggcatacaaactagtgatgctcggtgctggatggtgtagggaagagtgccatgaccatgcaggtgcatcagccaacgatatcccagaagatcatgatcccaccatagaagatgcttataagatcaggatccgtattgatgatgagcctgccaatctgaacattaaggatacagctggacaggcagaagtttacagccatgcagaaccagtatatgagaggcaggcagaaagggtatatcatctgttactctatcacggatcgtcgaagtaaccatgaagtacgtgagttcacaacagcttattaatcgagtccgacgtactgacgatacagctgtggttcgagtgagaaacaagtcagacctcaaacagataagacaggtcaccaaggacgaaggattggccttggcccgagaatacagctgtccctttttagagacatctgatgcataccgc

SEQ ID NO: 630282 - DNA, 317 bp, Homo sapiens
ggagaaaccattgctacaggagtgatctttactgaatgggacctttataagagagccagtgaatttctagagcaagtcccaaaactaagggacagctataagtttaatggttgacttcaaaggcctacactgtgttattgtgatgtccactaaacaacttgattaaaagacggaattgtgactcgtgtctgtatcatacaagtacaaatactaattttgcccatatgtatccgtcaatgtcatttgtgattttgacttatttatttaatgccctttcttatgccgtgggtatacaagtttactcatcctatggttgt

SEQ ID NO: 630283 - DNA, 220 bp, Homo sapiens
aaataactgttcttcttagcatgatgtagtgcttagcatgtctctatggggccaactttgaaccattattaagaactggtttgtcttgttttgctataactgatattaaaaatggtttggtggggcatggtggctcaccactcttacagaggcaagaggcaggaggatagcttgagccccggatttcgagacctgcccaggcaatataacaccatttgcc

SEQ ID NO: 630284 - DNA, 1243 bp, Homo sapiens
  misc_feature (158)..(158): n is a, c, g, or t
gcccgtcccttcctcccgaagacgccgggaggagtcgtggtgttcagccctcagctctcctggggactcgagccgtggatccccctgatggtttttcgttgcctaagattatgtgacgtcacaaagtgcctcccttccactgcactggctgacttcangcgtgtggttgctgtgtgagggtgggctgtgagatttatgggaaggagggcatgtgatcgtaaaacgagtatccccttgtcaccctagacgggcgcattcagtgctgatgtcagttccgtcgatttcatatcccattatcctaggaacagatcatgaaccctcatgatcacgggggtatagcgacgtcagtggtgttgtggcccatggtcattggagggcgcacacgagagtatgattgccaaacgccagtccggggaatgcactgatcttatgctcatgtgtgtatggcctgttctacaagaatggcatagcgaatcggttgctcgagtgaggacatgagaagatggggttactataccacgcaccagatactcaggctgtctccacacggacgcacacggcaaaacaacggcgtgatcgtagcaccataagacagccggagatgacagcgggcgagatgaggagggacgcccacaagaacctactaccgagacgatggcgctggtgggccacagggcacgagaaaggacgatgtgtgcaacaacttcctcgagaaagagtccacagcgtacccagcagaacccgaagcggatgggtggtgatagcatgtgcaaacaacacggtaggacggatcggagaaaccgaacaactagagagaacgaaggaggacacccatagacccccacagccccataacgcacagccgcaaaaaggggacagggacaggcaacaggagcacgagacgcgcaacatcatctcaggagcggtagcatgggccacatctatccccgcggaggcaagcggcccaaaagaggagacctcaagatcataaacatggttcccacgataggggagaacagtgtacgcaggcacaccgggcgcagatcacgcgaactccaggccgaacacccagaaatatgaggacaacaatagatacgtacgaccgaccgagagagaacacgcctcaagataccgaatggaacaagcacgcacagaatgcagaatcacgatcaccatcgaagacataggacaatatacgacggaaactataaacacgaatacgcagaaaagacacgggaaccga

SEQ ID NO: 630285 - DNA, 775 bp, Homo sapiens
agcggtgctggcattatagacacgaaccaccgcacccggcctatatggctttctataatataccatattctaggatacagttgctgttggaagacaaatgataccaacaaattaagagaagaaagggaaagagggcatgtaaactgatataatataaatatatgcaaccgagccgtttcggggaagaatggagaatgaatgcgctttgattaataataatcagcgattagatgtgaattagaaaacaaggacagagagaacgataagcaatataataaggaaaatgtcaaggaaattaaagtcatagcgaattgacaggaggcataaaaggttggatgacagaagaggaaatctagcatagccagtaatgcagacggagggagagtaaaaggggggactagatagacagggaggttgtgaaggcgtatttaaacaaaaatatattttatatatatataaggaacgtcgagtgaaaattcgcatctagacctatacataagctgagcctagcaaatccagcgtgatgtacatatatcaggaacgtctcagttaggaagtcaagggcagtgttagggggaccttattgaatgcacaagcagaatgaagaacatggaaaaaaaaccacacagcacttcgaaaacattaagaagagggacgctgaggtggagatggcggaggtggcttagttaggggtttcaggcatggggatcgaagtgggaatgtggtgggctgctcaggggcgtgtagggaatgactttctgtattattgtttggg

SEQ ID NO: 630286 - DNA, 948 bp, Homo sapiens
  misc_feature (68)..(68): n is a, c, g, or t
  misc_feature (73)..(73): n is a, c, g, or t
  misc_feature (91)..(91): n is a, c, g, or t
  misc_feature (119)..(119): n is a, c, g, or t
  misc_feature (126)..(126): n is a, c, g, or t
  misc_feature (128)..(128): n is a, c, g, or t
  misc_feature (137)..(137): n is a, c, g, or t
  misc_feature (152)..(152): n is a, c, g, or t
  misc_feature (198)..(198): n is a, c, g, or t
  misc_feature (202)..(202): n is a, c, g, or t
  misc_feature (221)..(221): n is a, c, g, or t
  misc_feature (224)..(224): n is a, c, g, or t
  misc_feature (264)..(264): n is a, c, g, or t
  misc_feature (309)..(309): n is a, c, g, or t
  misc_feature (317)..(317): n is a, c, g, or t
  misc_feature (323)..(323): n is a, c, g, or t
  misc_feature (332)..(332): n is a, c, g, or t
  misc_feature (342)..(342): n is a, c, g, or t
  misc_feature (353)..(353): n is a, c, g, or t
  misc_feature (356)..(356): n is a, c, g, or t
  misc_feature (378)..(378): n is a, c, g, or t
  misc_feature (384)..(384): n is a, c, g, or t
  misc_feature (441)..(441): n is a, c, g, or t
  misc_feature (456)..(456): n is a, c, g, or t
  misc_feature (468)..(468): n is a, c, g, or t
  misc_feature (476)..(476): n is a, c, g, or t
  misc_feature (482)..(482): n is a, c, g, or t
  misc_feature (491)..(492): n is a, c, g, or t
  misc_feature (512)..(512): n is a, c, g, or t
  misc_feature (525)..(525): n is a, c, g, or t
  misc_feature (550)..(550): n is a, c, g, or t
  misc_feature (557)..(557): n is a, c, g, or t
  misc_feature (567)..(567): n is a, c, g, or t
  misc_feature (570)..(570): n is a, c, g, or t
  misc_feature (575)..(575): n is a, c, g, or t
  misc_feature (578)..(578): n is a, c, g, or t
  misc_feature (586)..(586): n is a, c, g, or t
  misc_feature (620)..(620): n is a, c, g, or t
  misc_feature (623)..(623): n is a, c, g, or t
  misc_feature (627)..(627): n is a, c, g, or t
  misc_feature (634)..(634): n is a, c, g, or t
  misc_feature (660)..(660): n is a, c, g, or t
  misc_feature (672)..(672): n is a, c, g, or t
  misc_feature (683)..(683): n is a, c, g, or t
  misc_feature (687)..(687): n is a, c, g, or t
  misc_feature (696)..(696): n is a, c, g, or t
  misc_feature (698)..(698): n is a, c, g, or t
  misc_feature (734)..(734): n is a, c, g, or t
  misc_feature (753)..(753): n is a, c, g, or t
  misc_feature (789)..(789): n is a, c, g, or t
  misc_feature (816)..(816): n is a, c, g, or t
  misc_feature (858)..(858): n is a, c, g, or t
  misc_feature (873)..(873): n is a, c, g, or t
tcaccagaggtcctcacagttcagtttccctacagctcagtgtcaggccccagccacacagtccagcngtgcnccgattggcaggcgggtnagacctgcaggttgacaaaaggtgcganccgccanancctgcagcngccccagggcctggngcagcggcggctccacgtcgatgtccacgccgcgcttccgcaagcngctnaggctggactccgccacanggnggcagttccgcacccgcagcgaacgcagcacggggcagtnctcggccaatgtcctgacaccgtcgcttccgacgcggaggcagcnggtgaggncaaggnggtggagtnctgggcagtnccgagccaacnctngaaccgcggcgtcccccacgtnggcgtngacggccagagagaggctgcggagaccagcgccgcgcctttgcgccagggacacganggcctcgtccttganctggcggcaggnggtgaganccagcncctccaggnncgggcagcgatcagcgaggncgcgcagccagcncgttcacccagttacagttcgcgangatatgngctgcaggtntgncagcnctnggccaaanccccaagcgcccggcgactcagttgcccgcagcngcncaangccacantccgcagctgcggattccgcgccacnccggcaccaggncctcgtctganagcnatttgtgananggcgccagttccagctcctgcagcacctcggcatcncgcagcagctgggccaatncggcccgcgggaactgcggacccacctgcgcggcancgaagcgacgcagcccggccaggtgangctgcaccagcgaccggaaggcccggctaacgcgctgcagcnggagcagctggcgcnggggacccggttcaggacgtgtgggagccgccacgtcttcccagggcaggtccaggacctgaaggctccgggctc

SEQ ID NO: 630287 - DNA, 280 bp, Homo sapiens
  misc_feature (22)..(22): n is a, c, g, or t
  misc_feature (64)..(66): n is a, c, g, or t
  misc_feature (69)..(69): n is a, c, g, or t
  misc_feature (79)..(79): n is a, c, g, or t
  misc_feature (82)..(84): n is a, c, g, or t
  misc_feature (118)..(122): n is a, c, g, or t
  misc_feature (146)..(146): n is a, c, g, or t
  misc_feature (148)..(148): n is a, c, g, or t
  misc_feature (151)..(151): n is a, c, g, or t
  misc_feature (187)..(187): n is a, c, g, or t
  misc_feature (194)..(194): n is a, c, g, or t
  misc_feature (245)..(245): n is a, c, g, or t
  misc_feature (254)..(254): n is a, c, g, or t
gaaggttattaaattaaaaganagatcatttgtaacatactctttgtatatatttattatatgnnnggngcaatatttnatnnngtacagtatgtaataaagacatgggacatatatnnnnnttattaacaaaatttcatattaantngcntcactttgtatttaaagttaaaagttactatttttnatttgcnattgtactttcattgttgtcattcaattgacattcctgtgtactgtatttnactactgtntttataacatgagagttaatgtctct

SEQ ID NO: 630288 - DNA, 120 bp, Homo sapiens
ttgaatggaatgtctgtaagtgtctattaggtccattggtctagaggtagtttagatttgctatttcttcgttaattttctgtctgaatgattgttcttagctgtagtgaggttccatcg

SEQ ID NO: 630289 - DNA, 494 bp, Homo sapiens
ccctggcagaatcacactcaaatacatatactctatagtaattgctgaaatagcagcagctcgttagaatactgttatggtagttacagtatgtctctatctggatagagagagggtaccaagtaagaaaaaactcctatgtcagagataagtcctaccatttgcagatctgatacttgttgatgttgtaaattacaggcctataagatttgtctggcacaatgagaatgcacatgtggttagtggctcaatagggtaaatgcctgtagtgctctatgggtgaattcctgcgagtcataatcagcagtaaagtgaagagctgaagtgtcagacgcctcggagctagaacgacttctctaagcctagggaggaagacagattagagcttcggccagagggaaagtcacatggcactgagtagtagatcatcgtaagtctttattctggaaataaagtagtaacctagacctctgtgaatagcctagtgtgtacat

SEQ ID NO: 630290 - DNA, 663 bp, Homo sapiens
taaagtcaatacgatggaaatcaagtaaatctgaattccgaacatgtcgtgtggaatactcttaagtgtgtttgagagtagatctgccaattatgttgacaagggaatgatcaaaagcttgtttttttttttaaaaagaaaagcagtttcaatggaaatattttcatacatcttgggttgcaaacattgggactgcatggcaatgagtgggggtagtatttattttccctttctcggtataaaatggtatgcaaaaggggggttgggttagtaagccacatatttctgtccatggatctcagatcttaattctttccctttttcatctctctcgcttccatcaattggagatttcggtataaagaacccaaagagttgtcagtcctctcatttgggtaccatcatcaacgctgccatttccggggcatccctcaccgccgatgcatgcatgatagcctgtgaacgcacggggggagaggaagagctgcacagcatggggcaaggagctctcacactgtgctgtggagtccgcttgagcagcagagtatctcccagatgactccgtgataaatgtctggcctagggacccatatccaaggagtccatcgcgagcaggaagcacgtctgcccctcaacgagctggcaaaagccccggaacgatag

SEQ ID NO: 630291 - DNA, 136 bp, Homo sapiens
gctcaaggtgactttactacataccagattaaacctgtaatcactttatttctcttcgcttcctgtactggaagacttttctggcaattagtggatgggcctttttcttttatggcatctcaggggaccgatccat

SEQ ID NO: 630292 - DNA, 432 bp, Homo sapiens
ccgagcgacttgagatagtagagagtcccagataagtttaagtataaggcagaacactctcaaggtcgcgcagactggacaagaacatcaaagagggagcatccgtgggtcgactacactgcccctatccttaatcactctgctgtttacaggacctaggcgtgctgacaaccctcagcagtcagcgatgagctcatcaagctcctatctgtaacctgtgagccctttcctgccagagtgaagataacgtagttaaggcaggggtgagtaagctacttgaaaccccagtgagtcaggccaaaaactgagatgtgtttaatgaagatttatggagtaacggacttaacatccataacatcttggagaaccttatcttactcatttcagtcccatctaaaaattgtgtcagccctttttgaatccgaagtacga

SEQ ID NO: 630293 - DNA, 534 bp, Homo sapiens
tcagtcactgtgtgccggaaccctctctccttgatatttcatccagggggccttcgtggggcctttgtgagcccctcggcgttctgacacagtgctgagattaatgccataaactggtgacaaggagaagagaacagggcctggacttcactgcaaagggccctgtgccctagcgtgtgtgtctatgtgcagggagtgcatgcatatattacaagacactgccacacccccaccctgtgttacctgtccatctggcacacaggcacaagggctgagtgaccccacagcttcctctttagctgctgcccaggtgggaagaggcccgcgccagctgggaccctgagaaggatgtggctcttctggtctagcagggcagaacctcccctctatggagccctgcttgcagcagacggacagtggcctcgtgcagcagggacagcttggccttgcacaccacgcctgtgggagtgcacacttacgggcgcttgctgctcaagtgggaaattcaagctggagggtgacgcaggtggccgc

SEQ ID NO: 630294 - DNA, 874 bp, Homo sapiens
tgtttaggttggagggggaatgcgggagatggtaaggggttgggagacatgtcatataagtaaggtagggtgagtggtaggaagttttcataggaggtgtatgatgggtcgtacggaatcgggggtatgcggtcgaatcataagaacagggcggttaaccgtagggtctgggtgacacacctatgtggtgtcgcagttcaggggagagtgcgtcactatgtggccctaggaagatggcaggggtgagggtgtcatcacactacacgtgggtatccggctatgacgactcgggcgaaggggcctggaggtatcgatgtgaagcctgaactagttcggactccccttcggacaaggtcgaagggggtcacggaggggcctcggacaacgggcggagataaccctcatacttatggccaaggggtcctgagggcagagacgaaaaccagaggggacctaccgcaccgacaaccgggcgggcacaggaacacgagagccacacataccacaatgtcagcaaccccacaagctgcccccacgcgcacacaaaagagcaattgtagaaccacagacaaaacggagcgccgaatcaccggcgactacatagtaattcagacacaaccaccccggaccacaacatcgacccccacggccacgccaaaagcggcacacccacacaaggacgccaccctagacgataccaaagggacaccacgccccacgcgcccaacacaacacaaccacaaccacaacagcgctacagaaaagccaccaagcacaccccacaaccccaacccccccaccagcaaacacccaaccaacgacccatacacacaagtacccccaaccagccccacaccccaccccgacccaccga

SEQ ID NO: 630295 - DNA, 722 bp, Homo sapiens
  misc_feature (4)..(4): n is a, c, g, or t
  misc_feature (6)..(6): n is a, c, g, or t
  misc_feature (8)..(8): n is a, c, g, or t
  misc_feature (11)..(11): n is a, c, g, or t
  misc_feature (23)..(23): n is a, c, g, or t
  misc_feature (32)..(32): n is a, c, g, or t
  misc_feature (35)..(35): n is a, c, g, or t
  misc_feature (39)..(39): n is a, c, g, or t
  misc_feature (46)..(46): n is a, c, g, or t
  misc_feature (59)..(59): n is a, c, g, or t
  misc_feature (77)..(77): n is a, c, g, or t
  misc_feature (79)..(79): n is a, c, g, or t
  misc_feature (83)..(83): n is a, c, g, or t
  misc_feature (91)..(91): n is a, c, g, or t
  misc_feature (101)..(101): n is a, c, g, or t
  misc_feature (106)..(106): n is a, c, g, or t
  misc_feature (112)..(112): n is a, c, g, or t
  misc_feature (114)..(114): n is a, c, g, or t
  misc_feature (168)..(168): n is a, c, g, or t
  misc_feature (179)..(179): n is a, c, g, or t
  misc_feature (184)..(184): n is a, c, g, or t
  misc_feature (191)..(191): n is a, c, g, or t
  misc_feature (193)..(193): n is a, c, g, or t
  misc_feature (201)..(201): n is a, c, g, or t
  misc_feature (206)..(206): n is a, c, g, or t
  misc_feature (209)..(209): n is a, c, g, or t
  misc_feature (214)..(214): n is a, c, g, or t
  misc_feature (219)..(219): n is a, c, g, or t
  misc_feature (227)..(227): n is a, c, g, or t
  misc_feature (250)..(250): n is a, c, g, or t
  misc_feature (253)..(253): n is a, c, g, or t
  misc_feature (260)..(260): n is a, c, g, or t
  misc_feature (265)..(265): n is a, c, g, or t
  misc_feature (267)..(267): n is a, c, g, or t
  misc_feature (274)..(274): n is a, c, g, or t
  misc_feature (280)..(280): n is a, c, g, or t
  misc_feature (282)..(282): n is a, c, g, or t
  misc_feature (285)..(285): n is a, c, g, or t
  misc_feature (288)..(288): n is a, c, g, or t
  misc_feature (301)..(301): n is a, c, g, or t
  misc_feature (319)..(319): n is a, c, g, or t
  misc_feature (321)..(321): n is a, c, g, or t
  misc_feature (323)..(323): n is a, c, g, or t
  misc_feature (325)..(325): n is a, c, g, or t
  misc_feature (327)..(327): n is a, c, g, or t
  misc_feature (350)..(350): n is a, c, g, or t
  misc_feature (355)..(355): n is a, c, g, or t
  misc_feature (357)..(357): n is a, c, g, or t
  misc_feature (359)..(359): n is a, c, g, or t
  misc_feature (368)..(368): n is a, c, g, or t
  misc_feature (376)..(376): n is a, c, g, or t
  misc_feature (383)..(383): n is a, c, g, or t
  misc_feature (400)..(400): n is a, c, g, or t
  misc_feature (405)..(405): n is a, c, g, or t
  misc_feature (411)..(411): n is a, c, g, or t
  misc_feature (436)..(436): n is a, c, g, or t
  misc_feature (472)..(472): n is a, c, g, or t
  misc_feature (475)..(475): n is a, c, g, or t
  misc_feature (496)..(496): n is a, c, g, or t
  misc_feature (509)..(509): n is a, c, g, or t
  misc_feature (540)..(540): n is a, c, g, or t
  misc_feature (669)..(669): n is a, c, g, or t
taanangnaangttttcttttanttaaaaaancantcanaaaaaancaaaaccaaaaanttactttctgtcaaaaancngaangtgttaantgtttggaantccantcttananttaaaaatcaactggattgcccagcagtttaaaagcatgtgttttgttctttancttaaccacantgaanaagtaantngggcaacngaaancancgggnttgantacaccanaaaaagcatgtctttctgaagtnaantgttggngttananaaaaggntcttancncanaancagaaaagctganagggggaaggaaggagananantncngtggattgctgaggccttgtaanaaaananantaggaaaancccaggangacggcnggggaccaaaaacaaancacantccgcngggggccccaggccaccccggcccngccaacacctggcgagggcccctttcccaggccccngcngccggccgcccccaaactgcnccccaaaggacanactgggacttgggtactgaaggatttttcanctgttcacacgcaggcgttcaagctcaaaagcctaacccctagcactcccacataactgctgaaccctgcacatgggaacagtccagtgtgtccccaagatgtggccgcagacctagacagctgcagtnctctactgctatctgaaggttcctgacagctctgcatagtacaatttatcaaa

SEQ ID NO: 630296 - DNA, 570 bp, Homo sapiens
  misc_feature (383)..(383): n is a, c, g, or t
ccaaattagccgggtgcgaggacacacgggtggtttcatgctactcgagaagctgaaacaggaggagcacttgaggccggaaattcaaggctgcagtgagctacaatcgtgccactgtaccccagcctggctgacagagcaagatgccatctcaaaaaaaaaatgaaaacccgggcacggtggctcacgcctgtaatcctagcacttaggaaggccgaggcaggcggatcacaaggtcaggagatcaagaccatcctggctaacacggtgaaacccggtctctactaaaaatacaaagaattggccaggccttggtggcacgcaccctgtagtcccagctactagggaggctgaggcttgcaggagaacccagaaggttgaanctgggaggcgcaggatacattgagccgagatcgcgccacctgaactccagcctggtaacagcgcgagactgccaacaaacaacaaaaaagccaggcgtggtgtcttaagcttgcaatcccagcactatggggaggctgaggcgggcagatcatgaggcacggagatcggaacagcctgacaacatgg

SEQ ID NO: 630297 - DNA, 186 bp, Homo sapiens
agagttccggcatatgctgtgaaatcacagttccctttcatcttcagaacctctgtcgtgaatgtgttcaagaggcttgggttgattcaggaagaagtgcccaagctgtgtgtccccagtctccctgtggcctggactcgcccatgaacccaagtcgggttctagacagcgtgtccctgacagtag

SEQ ID NO: 630298 - DNA, 311 bp, Homo sapiens
  misc_feature (192)..(192): n is a, c, g, or t
  misc_feature (227)..(227): n is a, c, g, or t
  misc_feature (276)..(276): n is a, c, g, or t
ttctgggtcctcaaacacctaacaaccctcaaaaatgatcacagcgcacaccttgatagtgctgtataatgtacacaacccagccattacctcaattcatcctaacagtcctatgaggtaggtgtttctttttgcagatcagaaaaccgaagttccgccttgtccccagatcacctaggattttgcccaggngaccaggggagcttgtggaagaagtcacgcaagtnaaggatgggttgtttaaagtggcgccagggagctcaggcgacgatgccnttctttcctagccccgggacctttcagaactagtt

SEQ ID NO: 630299 - DNA, 271 bp, Homo sapiens
ctgatgagtggtctggtctccagtttgcctcctgctatatccattggaagagaaaagtctgtgacttgtggcccccaagtttttgagagaactgtggctttctggctgcggtgggtgacagagtgaggctctgtgtggtgagctcttcccacatggcatgcttacccgatgcctgcatgaatgacctccatccatgcacggtggatccgtcatagatgtctgaccttgcatgtgcatgcaatgcttgtgcacttgtgcctgtctgttctta

SEQ ID NO: 630300 - DNA, 80 bp, Homo sapiens
ctcttggggaaccgcgcagccttccgatgcccgattggactgggggatacgcgactttgacagcacaactcttctttgga

SEQ ID NO: 630301 - DNA, 399 bp, Homo sapiens
  misc_feature (12)..(12): n is a, c, g, or t
  misc_feature (37)..(37): n is a, c, g, or t
  misc_feature (254)..(254): n is a, c, g, or t
  misc_feature (358)..(358): n is a, c, g, or t
  misc_feature (365)..(365): n is a, c, g, or t
taccccttaccnagctggggggcccccctggaagganaggctctgtggccctattggtgtcagcatatcaattcaatcccagcatatacttttgactcaccttatatttgttgacaaccccatacatctatggcccaggtgattttcaacaagtgtaccaaggccattcaatggggaaagaatagtctcttcaaaatatggtgccgggacacctggatgtctacatgcaaaagaatgaagttctccccttcctnacaccatacacaaatattaactcaaaatagatcaaagacctagatataagagcttaaaccatacaactcttagaaaagaacagaggggcaaatctttatgaccnttagatntttagatacgacaggcactaaaagcatacacagc

SEQ ID NO: 630302 - DNA, 154 bp, Homo sapiens
gatagtggcatgccgtcatccagtgtgcatgccctgcatacagatggttttgatttgcatttctctgatgtgcagtgatgatgagcattttttcatcgtgtctcttagcttgcataacatgtccttctttttgaagcagtgtcttgttcactat

SEQ ID NO: 630303 - DNA, 649 bp, Homo sapiens
cgtgacgcgtgggtcgacccacgcgtacgcgcctggggcctggtgctgtgcctggtgcccccggctgctccctgccgcctgccctggaccctgctgcccctgcctggggcagctggtggtgagatgcccctgacttcccctgtgactgcctgccctgcctgtgccatggtgtgttccctggcctgcggctgctgctctgctgcgctgtgcttgctggcctcctggcccctggttgcccgcgccggctactccgaggagcgctgcagctggaggggcagcggcctcacccagtgagccctggcagcgtggggcagctggccctggcctgtgctggagggcgcggttgagtggctgtaccctggctggggcgctgctgcctgaccctgggcgtgcccgatcccagagcgcggccggcatcgcctgtctgcggccggtgcggcccttcgcgggcgcccaggtcttcgcggagctgcgcagtggtggcgccctggagctgctgctggccgagggcccgggcccggcaggggtgcctgttgcgtgcgctggggtcccacgagagcagcagggccctactacctgcagggcacgccgaaaccaggacattcagacagccgagtggacagcttccgctttgagctagcgcgaggac

SEQ ID NO: 630304 - DNA, 168 bp, Homo sapiens
agaggagataaatcaggactgccgaatcattggtttccttgattcaaaccaatagccggtttcttaggcttgatatttaatagaaggaaatgagccaaatccaaagtctcatagtcacacacatacaggaatctctatctccacatgcatcactcgggtaccgagctc

SEQ ID NO: 630305 - DNA, 120 bp, Homo sapiens
  misc_feature (120)..(120): n is a, c, g, or t
gtcattttttctgctgtgaaatatgaccaggcttgtaggaagactcatcttggagaaaatgttgaagggaatcaaattgctttgagatgaggttcccttggttatgagggccaaaccacn

SEQ ID NO: 630306 - DNA, 325 bp, Homo sapiens
cctcccaggttcaagcgattctcctgccttagcttcctgagtagctgggactacaggcacgtgccaccatgcccagctgatttttgtacttttagtagaaacggggtttcactatgttggctggtcttgaactcctgacatcaagtgatccgcccacctcgggctcccagagtactgggatttacaggcatgagccaccacgccaggctggtagcagtctttcctagaatgtggatgccttgggaaacaggggctctgccttgtttcccttgaacctagaatgggatctgggacacagcagatgctacatctattgtaaatgaat

SEQ ID NO: 630307 - DNA, 131 bp, Homo sapiens
  misc_feature (8)..(8): n is a, c, g, or t
gtgctgantcgatctagaggatcccttttccggcaaagatgatggctctagtttaagcagcgttgctgtcaggccctcctggtgtgggcaaaaccaccacagcttccctggtgtgtcaggagtggggatac

SEQ ID NO: 630308 - DNA, 314 bp, Homo sapiens
  misc_feature (14)..(14): n is a, c, g, or t
  misc_feature (44)..(44): n is a, c, g, or t
  misc_feature (143)..(143): n is a, c, g, or t
  misc_feature (297)..(297): n is a, c, g, or t
aatccaaataaaanaattttaataaaattgccatataaaagatntgtacctaggctgggtgcggtggcctcagttctgtaatccctagcactttgggaggccgaggcaggtagatcacttgagtttaggagtttgagagaccngccctggtgtacgtggcgaaaccttgtctctacaaaaaaaatacaaaaattagctgggcgtgttggtgcgttcctgtagttccagctacttgggtggctgaggcagtggatcgcttgaacctgggaggtccaggctgcagtgaacatgatggtngcctctggaccctagcc

SEQ ID NO: 630309 - DNA, 247 bp, Homo sapiens
atacaggttgtggcacacagaattctacagtataattagagattatataattatagatgcacatttttatttcttgggggagccatggggtagagaattacataaccagtgtgatggtaacagaaacccatttaatgggtaagtaaccaatgagttgaaatgaatgtgagtgacttgctcaagcaatgcaaacatagatgacttcctgataaagagatgtaacagcttgggccaagcaagacttaca

SEQ ID NO: 630310 - DNA, 129 bp, Homo sapiens
aaatgtctccttccatggttcttcactcacaattatgacttgaccaaaaccaaactctgataattgtatgaatttatagccgggcacggtggctcatgcctgtaatcccagcactttgagaggccaatg

SEQ ID NO: 630311 - DNA, 830 bp, Homo sapiens
  misc_feature (830)..(830): n is a, c, g, or t
gtatcaacgcagagtggtcattacggccgggacaacattccaaacctaagggagtacagagaaaaccagtgctaacgaggaaacgcttatagcaacgaacatgccatagcttcactaaaagttgagtaaatttcaatataagagcaactttaattcagtgcatactcgatggagctagaacaaggaagaatcgaaacccaacatcaaattgagtgagaaggaaagaaatagacatcagagacagactaagttgaaggtagagactcaaaaatacagatatatgagattcacattaaatgaacagctgctatgctgtgggcaacacactcataaagaaatcacattggcaatatcacatacactactaccgaaccaagaaagagaaaatacccgaaactaaaacgcagagaagtcacaattgatgtcacaagatacgaaatgtcatccgtgtaaaccaaataataggattgtctgaactcccaccatcccaaccagtctagacatggtcttcttaccgttgtcaagggcactctaccctgaaacactggttcaggccatgacaggaagtggaggtcagacaagcctcattatacctctccagcattaacatcaacacagatcttaagtctgataagtaacatttacaatctattctctccgaatcctgctagcccaaaggctttatctgcacgctaaaccttaggactctacaacggtcttattgcaacccagaagttccctttctatggataactccttcaacgaatggctatcagaaaacgttagaatcacctataaacatggaatgtcccagtttagcagtcctgcgn

SEQ ID NO: 630312 - DNA, 126 bp, Homo sapiens
gtgactctacaggatcctggctcgtgtaagctagcgcgtcgtcgtctccttcagtcgccatcatgattatctacggtgactcatcaagcacgatgagatgttctcggaatttacagatccggggag

SEQ ID NO: 630313 - DNA, 897 bp, Homo sapiens
taatgtcgctaccatggtctccggtggagcgacctcgccgcgcgccgtgtcctgtcgcgcatgttcctcctgccgcaaatggaattcggattgtcctacacagcttctctgggacatctctatgtcgataaaagagtagcaaagattatttgccaggtttcactggcaaacagggcacctttcacagccagcaggcattggacatatggcaccaaactcgttggaggaaccactccaggaaaggaggccagacacatctgggctacctgtctttaatactgtgaaggaggccaaagaacagacaggagcaacggattctgtcacttatgtcctccgccttttgctgcgtgcgtgccattaatgaagctatagatggcagaaatacccttggtgtgtgtgtatcactgaaggaattccccagcaggacatggtacgagtcaagcacaaagtgcgcgccaggaacacgacatggctacattgggcccaatgccctggagtcatcaatcttggagagtgtaaacttgggatcatgcctggcatattcccaacaatcaggacggacttggcattgtgtcagatccggaaacccgactaatgaagtcggtgtcagcataaacgcacgtggacataggggacagcgtgcgacgagaactcgggggcgatcctcatagatgcccgaattcatgacgccgcgaagccacgaccggctgggcacgaggcccaatggagggaacggtgtccgaaagcaacctcctgggaacacacagaccacccacgtcagaagatacaaaggcccgacaaatctagcgcaagggaccaccgagcggaacaccaaaacagcaacacaagccacaagcagaaacaccgcgcgaaaacaggtcacaacatgcggcgaaa

SEQ ID NO: 630314 - DNA, 338 bp, Homo sapiens
attttaccaaataccattggttaaaggaatgaaatttctaagggcagtgtcgtgttctacttcaattgtttttaccaaaccaccactcaccaaaaggcatttttaacagtttacacttctcaccaacaatattgacaaatgtgatgagaataccttggcaacctttcccatattttctatagctttaggggcagttcagggtttcatctacttaactgaaatttaatgtcagtgttgattgttcataaactaaacaaatggcccaactgccccttaaggattttccatatcatacttaacaccactatcaggcagatttctacagacagctatgcgct

SEQ ID NO: 630315 - DNA, 451 bp, Homo sapiens
caaaaggttaaaacatgactgccatgggttttcactttttgagacccttgggatgggccagatgacatcaagcaatagatcagatttagtgctcaggccaaagagtcccacccacaacatagcctgagcaccctgtgggcccatgtagtgcatgaatgggcatatgtacttgggcaatagagattagattcctctagggctgagcggggcaaggtgggagccaggagacactgggccatgaccccagcagagttctaggctgcccatgtcacgtgagccagtgaaaatccagagagtggagggccctagagagagaccaccttgtcatccccgacggacaggaggaggagcaggaagctgccggggaagggagaaaccagcagaaactgagaggagaagatgactacaacatggatgacacaatgaagcagaatctgagcacacgacaagc

SEQ ID NO: 630316 - DNA, 754 bp, Homo sapiens
gcaccgtgggtatgcagacagtccttcaaaagcaggagcggtccatatgtgcaggcatttgactcgctgctattgctggtcctgtggccagagtacttgaacgatcagtcaccggagattggggtgagacgtgcagaacacatgcggagatggtccacacaggtttgaagtttggatcgacggctcgtgttgggttacagacttctcatgctgtcaagcagccagcagaaaagtacaggcttgtccgaatattggtatggcacccactctcagagcatgatcaaagaagatgactagccctttcgggagacagaaacgcgagtgcagacaacgttggtatgtcaatcactcgtgctcatggctgatcacgcgaagagtatctcgagggcgctgggcctggggtgagctactggtctcccagaggcctggtcgccttatggtgcaacacgaaatgagagtgatcgccgccagtggtgtatcatagcaaatcgcgagctcctcacaagagtacaacagactggttggaatagatgaagccgtgtagaacgtgggtcaaacgtcttactttaaaagtactatggacacgatgctagcaaggcttacgattaacggagttaccagtaccagccggagtggacgctggagtcgaaaccgtgggcctgtggtcaagaagaactgagcggacttgccatctggaccctcctgccgatcaaggtcctaatccacgcttggcaagggggaggaaccatcccca

SEQ ID NO: 630317 - DNA, 1117 bp, Homo sapiens
  misc_feature (419)..(419): n is a, c, g, or t
gcgcagcatgcgatccacgataggaagaccttgcgagctcccgttgagtacaggatgccctggatgggctgatgcttgaaggggagaagcatcgtgtctgcggcccggaaggaccattgtggcgacagcgacgtccgtccacggagggctcaccgctccttcgcgccaatcgctgacggtcaacagcgctcgaagcagaacggcaagaccctgagctattggaacccaggctgcctcgcagggagcgagcggcgtggagcagtcgacaagaggaagcgaagactgcctggcgctccagtcgacgatccagtgggagatcactcggaggaccgagaagcggcttgcgaagagactatcccgcatagatcgaagaagtcgaacggaattgagccctagggatcgagagggatcgatacaancgagtcgacctgaacggaacagagcgatcgcgagtatcagcggattgcgtcaaccaaagctagctggccaagtcccttcgtttcccttgcaattgctagctgtatgttgggatcggttcccaagggattgacagggcattggcgggcccgattggctgggcgcgtctccccaaggattggacccaacggcgtcgtgtgcgagcacgagcctaagacgtaaacacgtcgtgcgtggaacgggtatccaggccacaagggcagggcgttggcctatgaagccaaacacgtaacttaattcgtcggtgaaagggtgtccgtagaggggacaaaactcgtggcaaaggtatggataacttttggcgttggacggccaaacggtccaccaaagtgggtggcttaccgaagggggaacccacgaggactatcctaggcagagccggccccagatacttaatccctaggccaatcaaagcaaaccttaaccgaaattgtgaaccacttccccataccagaaggtttcccctcggggaagggaagagtcctgcggacacccgtggaattacgcacgccttaggagtcgcggctatgttagaagaccccagcaagagaagctagctttgaaggcgggcctccccttagcccagtgggatagcgagcacttgtggaatgccaacgcaacgagtctcaagggaccctag

SEQ ID NO: 630318 - DNA, 228 bp, Homo sapiens
ccgcgtccctgtctgacgaccagaactgaataacattaaataacgttctccatgtgaacttcttttctgatttatcatctataattctttgttataaaatccaggcttacaatagacattttaggaaaagtaaaaagaaactgaagacagtgaataaaaatcactctaaaatattttattcaccttttacccagttgtaaaatgatctctcgtaagacataaccgcgg

SEQ ID NO: 630319 - DNA, 291 bp, Homo sapiens
atcccttaatccccttttatatttttttttccccattttaacccttgaaaatattaaaactggatattttttccaaccaatgtcctggatgatgggccctaaaaataatgaaaaaggagtttaaaaaggatgggccgtttttccggcaaaatttgtaggttatgttttgggtaaaaagtcaagggggaaaatgggcctgttgtttagtgtttccttcctaaaaagcccttttggattggaatttatttttttttatgcttttaaccctatgtaaataaacccttagtaata

SEQ ID NO: 630320 - DNA, 190 bp, Homo sapiens
aagcaagaaggtcatggaaggattacagaccacatgtactttgttatgtttctttcttttatatttcttgagacggagtctcactctgtcgcccagagtgaagtgtaatggcgctatctcggtctcactgacaacctccgcctcccgggttcaagctattcttctgcctctgcacttcagccggggcgac

SEQ ID NO: 630321 - DNA, 144 bp, Homo sapiens
aaaacatcaacttcctgaagttagaaataagaatgttgttaaaatccacagctattatccttatgcctggatggattaatcttgtgtagcttcaacttggttagtgtgaaatagttctccacctcttgacgaccacttccaatt

SEQ ID NO: 630322 - DNA, 425 bp, Homo sapiens
gacactgaccttcagttcctcgaatgcagagccatggcgccctacaggacggccttcgctgacggctggcagatgaacgcccgcacgcggacttcagaggcagcccatcgggactcagacaagcgctcaaggtgccggccgacaccgagccgatatgcgccgctctactgcccatcccgacttcgccggaccagccctacctcccaagaccgccgtcgctccgcaccccggcaaccaagccaccaacgcaaccgcccacagggcacagaacgcacagcctccgcaagcactgtcccccccacaacggcgcgcccccgaacacttagagcccccgacggcccctacccagtcccagcgccccacacgggacccatggcccacgctccggccccaccactcgctccacacaccaccactcccccccc

SEQ ID NO: 630323 - DNA, 159 bp, Homo sapiens
tacattagtttgatgtctgctactgacaggctatgtggacatacttctggtgggcactgtgcggaaacttgaggataaatcagtgagctgcatcactttgaaaggcatagcctgtctcctcactaaagtgcaaggtccatcgaccaaagccctattctg

SEQ ID NO: 630324 - DNA, 144 bp, Homo sapiens
ggtgatctagaggatcccttctgcaggatgtacatatgggaccagcttctgcttggtttctagggaggcctcagggacatttaactcatggtggaaggtgaggtggaacaggcctgtcatatgatgtcagcaggagcaagacag

SEQ ID NO: 630325 - DNA, 1222 bp, Homo sapiens
gcttttggacgatggagactatggaaaactaggcttagcgaaattccactgcaaaatcttcacctcagaaaattgacgtcctttgtggaattggaataaaaaaggttgcttgtggaactcagttttctgttgctttgaccaaagcatggtcatgctgtatacctcttggctcaacgatcgcctgcatagcgctctgccaccaggggcgctgctccgcaatcacaatcgaccgccacaccactccctgctcctgcgctggcagctaatcactcgcaagactgtggcagcctcggacgcctgcacccacacccctctgcctctcgcgccctcacacactgcgcaccactgctgctctcgccctgcggcgcgagcacactctcagcacacgcggccacgcctcgagccttcacgcccactaccacccccatgctccgacacacccaaccccctggtaaaccagcgtctgccacaggcgcaccccactgccccgccccaccactctcgcgcctcggccgcctgcccaccacgtgcctagccatcggcacacgcacccacccatgctccccacccacccgacgcacacacgcgctgctgctccaccactcctcctgccacgcctcgcgcgccctcgccatgaccacaccctgcccccccccacgttattgcggcgcgcctgccccacaccgctccgcccctctccccccgcgctgccgcccctcgggctccgggcctgctcctaccacctctctctgaccccttcctgctcctcccctcccgccacgactgctcaaccctttcgcctccaaccaaccccgcaccccgcccattcccacttactacctgcctgcaaccctcaccgccctgctccacggaccaccctcccgccctcacgcctcccccccagcagtccacccctcccgcccaccgcgcgcgccccctccacacaccacgcccccccaccccccccggccaccccacacaaccccgcccccaaggactccacccacaaacacaacgccgccccttctggtcccatccgccgccactcgctcctcgcacgtctcaccaccagggcctcacaccctccagctactgcccgcccacgatcgcaactgacctctctcgcctcccccccccttccgtctcacgcactcgcactccctccacacaccgccgacttccctccgcccctcctcctcccccgcccggcgacgccccctgc

SEQ ID NO: 630326 - DNA, 294 bp, Homo sapiens
cccccccccccccccggtttttaaaacccagaattttttcctaagagcccttcgagcaaagggggccgaagttagttgttttttttgggggggcccttttttaggcccccaaaaaagcccaaaaaatgggatctgggggaatgttttgcaaattcaaaaaaaagttggggaattttttttccccgttgatttttaaaaaaaaccgggggccaggggtgggcctttgccccttttaaaaagggaacccccccctgaaaatggtttaacttaaaaaaaaagaaaaacctttttaga

SEQ ID NO: 630327 - DNA, 382 bp, Homo sapiens
ctcggctacctcctttatggccacgccttactttatcaagtgtatataagctgatattaatcttatctgagcaaaatggttcattcattatgacaaatttacacagtaatcgcatggtcaaatatattgctcaacattatcccccaagatgcgtaatcagacctatgtaaattggaagttaccttatgcacgcttaactatcattatcatagcatagagtgcaagagattggacagttcaaatctgaccccgatgtagatgttcgataagagaattctctggtccccagctctaagttgccagccctcctagagctacctgtggagcgacctgctcagatacatcaaacatggagacagcactcaaagtagaattataaaga

SEQ ID NO: 630328 - DNA, 110 bp, Homo sapiens
cttgaggatcccctaccccgtcgttctggctggcctccctagctggcgcgcggcggtgcgcgcggtgttccagcggattcgaggtactcgtatgccgagctgcccgaacg

SEQ ID NO: 630329 - DNA, 348 bp, Homo sapiens
  misc_feature (20)..(20): n is a, c, g, or t
  misc_feature (60)..(60): n is a, c, g, or t
tgtatatttatgatggcacncttctatggtgtgaacctttggtaggtacaagccattagntaaacagctaataatttcttttaatgcttttcttaaaagactgctgatatagctacatgttctggccacatgtaaaaaacttccatttgtggtagtggcattacatagggatcttttagctaagtaaagatttttaagtcaagttgaattgagagtatttgaaaagttttgaccccttccttttggaagtagttatcccaaagaaactatctttgagggtattcctggaagttaaaaaaataggttggagaagtgaggtttttattagtacatagtaccatttataca

SEQ ID NO: 630330 - DNA, 952 bp, Homo sapiens
  misc_feature (6)..(6): n is a, c, g, or t
  misc_feature (106)..(106): n is a, c, g, or t
  misc_feature (311)..(311): n is a, c, g, or t
  misc_feature (358)..(358): n is a, c, g, or t
  misc_feature (949)..(949): n is a, c, g, or t
gtgaanatagaaaaagtttgtaaaaaaagaaggatggtaaaggtaaggaattaaagggataggagggttaagggataagggatatgggtggaggaggatgtgagangaggaaatgaggagaagaaagagggagaagtaggggatggaaatgtaggaagagggatgaggaagaggaaagagaaagtagaattggagaatgagagatgagaagaagagggatagtaataataaggataggaagaagaggagatggaagaagaatgaagaatgaagaagaaaataagaatgaagggaaaggaggaggatgaganagatgagaaaagaagagggaatgaagagggagatgggaaggagaaanggagtgtggttgagaatgaggaagataattttatgtgttttggggttgtaaattgaaattaaatttataataaaaatatgtaatggaataaaggaaaaaatgattttattgaatttagtaagagttaaatatttaattgatttgaaaaaaaaaaaggataaaggtttgaataaaaagtgtaaataataaatgaagaaagaggaagaagtgaaaattggagtatggaaaaaagtaaatgaagtatggtggaagaaagaaaaaggaaaagaaaagatgtggtatgaggatgaattggattaaagaaaaaatataattatgtaaatgaatgggaaagaaggtaaaagaggaggagaaaaaagagtggagatttaaaaggtgatgagttaaattggttaaaatgtggtaaaatttgaataaagaggttggggtgaataagtgggaaagaaatatgagaggggaatgaaatatgaagaaataaaagtttttgaatggataaaagaaagaagtggtgaaaaaaaagtgtaaatatgggggaaatatatgggaaatggagtggagaaaaatatggtgaggagaatatgtgagagaganaag

SEQ ID NO: 630331 - DNA, 940 bp, Homo sapiens
gcatcgttaaagtctctcttcagcctggccggcatgtctaacgtcagagtctcctaaacgagcccgactcgagctgagtgaagctcttcatttggagggttgagctttgaaacaagctgatgatgcagccgtgaggagccgagtttcgatgcacatggggaacgtctcatcggcactgtgtggtaatgagagatccaaaacacctagagacgctctcaggggcctttgggtttgtcacatatgagcactgtggatggacggtggatgcatgctatgaatgcaaggccacggaagggggatggaagagtttgtggaccccgttcgagagctggcgtcctagcagagcgatccatcagaaaggaagctaggttggcctactatacatcctggtcgtacatagaacgatatatagtgggtcgcgcattaacgggcataggacacgctcggaaaaactattaccctaggcagattagtttctcgaaacaagataatgggatacaaatatgaccgttgatcgacaacttgagagacactgcactggcagggggaggaatggagcaacagtaaaagaaggggcggcatccatgggcgtatgcgatcaccccattgtgtatgagggcccatttacatcatccgtatgagaatcatgaaatctggacacggtctgatcaacacaaacaggaccagcattgacttcgggcgcgaatttggggcgcagacacttcggggacagcaagcgaccccgagcagagcaagaccccgtagcacccgaaaaagaacaaggacgcctccgaccttacagagacgactccaaagtcacaacgacagcaaacaagaagcgggcagaacacgagaggcgcgccatcggaacaacaagatagtgaggacagggtcgggacgccaccagtcgacagaacagagagaggcaaagacggacaca

SEQ ID NO: 630332 - DNA, 155 bp, Homo sapiens
agcggagccgcggctgccggaggggaccgggccaggccggggtgcggcggccgagccgcggtagcggcggcggcgggaggggcggcctgagggcggacgggcgggcgcccgggttgcgggggctcggtgccgctccgcactgcccggccggtctc

SEQ ID NO: 630333 - DNA, 179 bp, Homo sapiens
ctgacgtattaaaggtcactatctcagataagaggagtgacagatattctcagatacccaacatttcaggtatctttgatgtaaatttctgcacacactggcctggtagagaaaaaggaaggaaagtgcaaggagagaggcacgaaagtgcaggcaggtagggagagaaatttccagag

SEQ ID NO: 630334 - DNA, 200 bp, Homo sapiens
cagcccttagagccaatcctatatacctgaggttactggatcctggcttgcctgactatcccttaccatacatatgttccaacatgccactaggcttgttcacctctgtgagaccttgctgcgtgatattgggtacttgccctggctgcgacgatcttacacgcctactcacccctgtgcattttccatggtgccacgct

SEQ ID NO: 630335 - DNA, 317 bp, Homo sapiens
ttcggcacgaggaattgcatcagagatgtaaacatttaaaagcgtattaaggctgggcgcagtggctcactcccgtcatcccagcactttgggaggccgaagcgggcggatcatgaggtcaggagatcgagaccatcctggctaacacagtgaaaccccgtctctattaaaaatacagaaaaattagccggtcgtggtggcaggtgcctgtagtcccagctactcaggaggctgaggcaggagaatgcatgaacccgggaggcagagcttgcagtgagccgggatcacgccactgcactccagcctgggcaacagag

SEQ ID NO: 630336 - DNA, 1082 bp, Homo sapiens
  misc_feature (290)..(290): n is a, c, g, or t
  misc_feature (518)..(518): n is a, c, g, or t
  misc_feature (553)..(553): n is a, c, g, or t
ggagttccgaggtgctggtcactaataggtagggcttccaccgcagacatggtagaccgagcgtactggcccgatgaggtggtggtaggtacgagggctggcaagaatcgcgagaatcagtatgaggggttggcgagtgatacccggtcattgaatcagtcacagtcggcggtgatgagtctgcaccatgctgggtggcaatggccagtcgtgggggtggcagaccaggtccttactaggaaggagttccttgtgtgtatgtgcactgctcgtgttgatgcatggactcngtgcatgctcccgagtctatatgcgttgtcgtctaccagggactcgggaacagctgatgaacacgtcgtactcgtgacagcaggtgggacatggtgctcgatgctggtgcgacacaccaaacgacacgtggcgctgtatgtgctgtctggcaccgcatgaggacgcccgtgccaacatcaatggagtccgctagggtgccgcgctaaacgagcctcgcggagtcgtantcacctgtagggaggtacctatgtgtacacgagantctagcaacacggccctgcgccggcgcgcgactctcagacggtcgtatcactcgagagtacagacgcaaggaggggccgaggtctagccgatgccaaggaacatggcttcgaatggtgagggtatcgccgcaaggtgctgtacctccggacctcagggggatgctgtcgtttggggtccggagtactcccggtgatgtctgatgagatgtgagaagcgtggagcttccaaggcaggaagcgcgtgtgcactggggatacaaggggaggatggtggaaatctgctcgggacgaagggggttcaacttggggagcatttactctccctggttgcttgggtgctaaagggtgggcacacagatcgaaccggagggtcgcgcccgggtgcccttatgggtagacctgcgcggggcagacttggtcgtgcatggatcctgccagggtcaaggtacggcgaaagggttccttaccacacgggagactcacaacagttcgggggtgccccagaatggcctgggcaaatatgggggg

SEQ ID NO: 630337 - DNA, 126 bp, Homo sapiens
  misc_feature (26)..(26): n is a, c, g, or t
  misc_feature (53)..(53): n is a, c, g, or t
  misc_feature (91)..(91): n is a, c, g, or t
ctttaaacttaatgttcaagactttnattgggcctgggggaaacatgcctggntacttgagaccagaaactgcacaggggatttctttgantttcaaacgacttttggagttcaaccaaggaaagt

SEQ ID NO: 630338 - DNA, 82 bp, Homo sapiens
  misc_feature (2)..(2): n is a, c, g, or t
  misc_feature (4)..(4): n is a, c, g, or t
tntntgtccttttaaattttaataaaatagattaatttcatattacatagagagcaagtccatccattcatccgtgataaaa

SEQ ID NO: 630339 - DNA, 141 bp, Homo sapiens
aaatgtcacaccgcacacacacgtacggggaatcatccttgactactctacttttactcacacccctacccatcaactcatcaatacgccatgtacatattattatactttaatagtatcttaaacaccttacttatccat

SEQ ID NO: 630340 - DNA, 169 bp, Homo sapiens
tgttcggcgcgtcgaacacgcgggcgacgtgcgcatcgctgacgtcggctttgggccgagcgcgcggcgcgcgcggtctatcttgcgcaccagctcatcggtcggcgcgtggttgcctgaatagttaatgatgacggtaaagccgtcggcggccagacgctcggcgatg

SEQ ID NO: 630341 - DNA, 138 bp, Homo sapiens
aatagtacgcaccagctgtgctcactcataactaactaactaactgtctatagcaccagctacactatacaacagcaaagctaggagctgcagcacttatagcctgaaagcctgaaataatttacaatcaatcatcac

SEQ ID NO: 630342 - DNA, 700 bp, Homo sapiens
gcaccacactgcccgagggagcctcccaacggccccccaacccagcgaaacccggagtgaggcagcccggcaccaaccccgggaggcgggctcctgagaatatagacaaccgcgccggcgccgccgcgctcgtcgcggcgcaacgatctcccgcacacgcgacaggtcgggacactcacgcacgcccttgtatgtacaccccacgcacacggacgcgctcccgccgacgctcaccgccacgggccatatcgaataaacttcctgggtgcctctcttcggcgactatctcacgcgcggtgtgcgatgcccacaagcctcccactggcactaagggtacttcacacactgttcccagcgcctgcgcgtggttcgaactcctactcgctctctctttcggaggcagtaacaccgctcgcttcgttatatatggccctgggacgcacaggggaaaacggtcatttttgggacccgccacccaggccggccttgatacgctctagcggcacgagctaggaggcgacgcgcccccacgcccaccgcacgccacgcgcgcactgttcgctcgcaggaacacatggaacccaagggttggctacgataagaatagaaaaatagaacaacaaggaaacaaagaagaagaaaacaagaggaaaaaataagaacaaaaaaagaaaacaaataaaacaacaaaaaaaagaca

SEQ ID NO: 630343 - DNA, 81 bp, Homo sapiens
atttaccacaagggacgatttccacaccaaccccaaaaatgtcccctatgacgacgaaatgtgtatttgaaacagctctga

SEQ ID NO: 630344 - DNA, 228 bp, Homo sapiens
cacctcacacccaactggaccaagtctatcacgcctactagaagacgcgcatgttagtataagtaacatgaaaaatactcctccgcataagcacgcgtcagatatacaacactgaactgacaattaacagcccaatatctacactcaagcaacaagtcattattaccctcctctgtgctgtccacctcctctgtgctgtccagctgtccacctcctctgtgctgtcca

SEQ ID NO: 630345 - DNA, 140 bp, Homo sapiens
ggctcggtgcacgggtcatagagcgagagtccatctcagagaaagaaaacaactattttgcacataatcaaactcaccgtgttctcatgactttgggttaagggggttttcccatagtttatttttctcccagtgcttca

SEQ ID NO: 630346 - DNA, 978 bp, Homo sapiens
  misc_feature (71)..(72): n is a, c, g, or t
  misc_feature (79)..(80): n is a, c, g, or t
  misc_feature (91)..(91): n is a, c, g, or t
  misc_feature (106)..(107): n is a, c, g, or t
  misc_feature (109)..(109): n is a, c, g, or t
  misc_feature (113)..(114): n is a, c, g, or t
  misc_feature (127)..(128): n is a, c, g, or t
  misc_feature (134)..(134): n is a, c, g, or t
  misc_feature (139)..(139): n is a, c, g, or t
  misc_feature (147)..(148): n is a, c, g, or t
  misc_feature (156)..(156): n is a, c, g, or t
  misc_feature (168)..(168): n is a, c, g, or t
ggctgaagaaagcctaggtctcttagatgattacctggaggtggcaagcacttcaaacctcatgggttctnncagcgannaggctaaggcnggctcctccgaatgnntngctnntggatgggttggnnagtccntccancaacagcnnggaggatnccttcttcgggncagattggattttgggagaaattggatttaagggaggtacgacgtatgcgatagcccatgctgaggcgtatatgatagtacctaggtagagatcgcatggcgcaggagtgcaccgtatgcttgcaccaacggtatgagattcgagcactatgatggactcgtgctattgggctcggccccctaggtccgaggtgagacttctatagtacagctgtgaccccgctcgcatggaccgggatggcaatcgcgcaaaggttcgggcggcaagtccttgccctattgagacaagttcttaagcgagcatagacctctgggaggcctaagcgtctggccccttcgtttgctaagacagttacgtgttaaccaagcgctcctattcgcccgcattttaaccacgctaagggtgctgccgtagtacacgtacgcgacttgcgcaacgatgcgatgtacacttgtgtaagctgtatcagcgacgctggggggcatgtccgacacgtgggaatatcggactggaacggcggattaggggaagctcggactaactacttgctttaccgttggccagtgataccctgcagctgcagtacaagggagggaaaggacgaccccgtatcggatcagtgatacgctgggcaatcgtgtagtgaagcccgagaaggtcgcttactctgggggtcgtccctcagtcacatggacccctctagtcaggggtgctctccagattagggaggcctgccccatctccaggggtggtcctctgctggggtcttggccgctgccaagaccgtaggatcctcccttggacgagaa

SEQ ID NO: 630347 - DNA, 1030 bp, Homo sapiens
agcggacgcccacctctctcctggagcgctgggccttcgctggccgcaccggcagccatgagctcggagatggagccgctgctcctggcctggagctattttaggcgcaggaagttccagctctgcgccgatctatgcacgcagatgctggagaagtccccttatgaccaggcagcttggatcttaacaagcaacgacgcgctcaacagacacactggctatacatagatgacattgactgtcaccactcagcgacggaacttgccagcaacactgatgctggatgacaatgctatagcctcaagttccacgccctggaacgtctttgaaactccctgcgaactaatcagcacaggagggcctagccaggccgtccaggccaactcacacaagcctgcgaagacccattacagcgctcttccctccagcgccccaagcacagcacgcagctgcgcaaggcccacgcgcactcactggcaacccaggctactccacgcacaacaccccaggaaaccccgccctcacacccagccccgcccctaatcacccacgcctcccctcccgcgcacacgcactcccgccccacgcctcagccgcacaaccgagccccagtcacccaatgcccctctccaccaaaggatcccctcgccatggcgcacccgcatcttcattccaccactcttcatccttaagcgccctcggcacattcctcacaccacccaccgttcatctccccccacgcacacaaccccttcacacgcttcaggcggccgacaaccgcagccttctccgctctaccgcagcgcttacttcattccttctgcatccaactcgcaatctgcaagcaccagtcgcacttggtttctcaacggcaccctagtttcccaattcctttctgccacaggcatcttgttacaggcttccctgtaaccaatcgttttggggcaagctctatttacaccccaattccctgtaattctggcagcgtacattcatctcgaccatcccaccatttgggacaacccaccag

SEQ ID NO: 630348 - DNA, 202 bp, Homo sapiens
accctctgtgtgacactttacgcgcacacggacaaaatgcccaaactggagcccttgcaaaaacactggcttgtggcattggcatactatgcccttacaggctggagtatctatcgaacacacatactaaactgagacaatcatgtgacaacatcgtctattgaaataggtgctcatggatttacccattccattattatca

SEQ ID NO: 630349 - DNA, 411 bp, Homo sapiens
ttatgttctgaccacctccatatcttacaatatatacttaaatactatgcttgtattagtccacttttgcattgctataaagaaatgcctgagactgggcaatttataaagaaaacgggttttattgtttcacagttctgcaggctgtacaggaagcatgatgctggaatctacttggcttctgggaaggcctcatgaaacttacaatcatggtgaaagcagaagcaaaagagaacttttaaatgaccaggtctcgtgagaattcactctctatcatgaggtgagtgccaagaggactgtactaaactattcatgagaaatatgcccttatgatccaatcacttcccaccaggccccatctccatccacattgctgcaaaggccatgatctcgtcttcttttttttttttt

SEQ ID NO: 630350 - DNA, 467 bp, Homo sapiens
  misc_feature (20)..(20): n is a, c, g, or t
tcagcaccatggaggatganttctcaagggccatctggcctccaaccctggctgaagagaaaaaagatcccctacagccctatgagagagaggtcctctgtctttctgtgcttggctcatttcagttaacataatgtcccccaggcttatccacatggttgcaaatgacaggatttccttctaaaaaaggctgaatagtattccatggtgtatatatatcacattttttatccattcatctgttgatgggcaccaaggtggtttccacatctgggctatggtgagtagtgttgcagtgaacatggcagtgcagatctccttctgacatatggattttggttcctttgggtatgtacgcagcagtgagattgctgaatcatatagtagtgatgttttcagttttttggaggaatctccataccgtgttttataatagctgtactaatttacatcctccatggtgctga

SEQ ID NO: 630351 - DNA, 1468 bp, Homo sapiens
  misc_feature (208)..(208): n is a, c, g, or t
tggtctaaattttatgtttccgggttctccgaattgtgtggtaggggggggtggcatccatatagtcactccaggttatatggagggtttcttctaatctatattaaggaatcttttccgctcttccaaagccgaaaggtcttctccaatatccatgaaaatatttattaatatattaacgggcgtgttagaagaaatatgcatatgnagccctaacagaatgaataggatattgttccagtgtggggatattgccctctcggggtatagctccgagagtataagcgtctcggggccattctccggaaataggcccgaaaaaagtgtgtttggtgggaacaacaagagttatagaatttatacgcccgaagtgaacattattgaataggtgcaaagtggatttgtaggcgcggtataagagtgtggggctcataaagggtgtgttacgcctgtagaagaatatagggggagaaacatctcaaggtagatactttagacacgccctctcctatatgtagagtgtgggcacacatctaccaggctctccctatatatgtagatataagagcaacatataagggtgagcaacaagtgtgcggaggacataaaacaagacgcggtcataagcaatacgcgagatgtgctccgcggggtgatatgacaacgccgaaatgaggtctccataaggcgttgcaagtgaacgtctttggggccactaaatcctaccccagaagggccccccgaggtctccaagggggccccaacccaaattagcggcggtgggcaacacacccagaaacacgtagaaatgtgacaaatccccccatagaagggggggccctcctggaagagatccagtgtcggagcgagacaaaaaactccattttctacaacataatatggtggcatacccccggtgtgggcaagtgtgtgtggcgccaccagcatttccaagctcctaaacaactaactttttgtgagaatcacccccgggaatggggagagaaatttagagccgaaaaggacaatacacgtgggtaaaacccggggaatgggcattgaacaataagcgccccgcggggagaggacccacacggggcaaaatccccaaccggggaacaattaatgtgggggggtgacccacaacggagataaaaccccaatagaacagccaaatgagataaatcaaataggctacaaaacacgaaaccctaagggataccccacaagggcgtaccttaatatccgcgggaggaagaccagtctaccacatgtggcgacaaatcatccgaacccggtggagggataaaagcaataacaaccaacgaggggaggcgagaaaaacacaacacagggcgaggaaatacaaagggggcgccagccgcccgcggcgggacaaacaaagagtgtataagcgttagcgatcgataaaaacatgacgcgtgcacagagacgcagaaatacacgc

SEQ ID NO: 630352 - DNA, 155 bp, Homo sapiens
ccgccatacgcgctctccctgtttaggttatggcaggaggaaccggatgtggacaatgagctctggactatgaggatgatgagggtggagacagcagctggggagatgggctgagccctgcccagaggatgtcagggctcctatgtctccatcca

SEQ ID NO: 630353 - DNA, 376 bp, Homo sapiens
ggtctcacaacgtcctgggtctcaagctattcctcccacataatggcctcccaaagtactgggattacaggtgtgagagccccttgaaatataagaatattggctttatttattttggtgctctggtgttcggtgcatatatatttacagttgttttagccttttgaattgatctctttatcattatataatgattttctttgtctctttttacagttttggatatagtctattttatctaagcatagctattcttgcctggttttggttttgctttgtgtggagtatctttttccatacctacactttcagtccatatgtgtgtttacgggtgaagtgagttttttgcaggcagcatacagttggccttatcgag

SEQ ID NO: 630354 - DNA, 854 bp, Homo sapiens
ccctcgtccacagaagctgccatcaagtatttcctcacgcaagcgaccggtccataatccttctaatagctatcctcttcaacaatatactctccggacaatgaacctataaccaatactaccaatcaatactcatcattactaatcataatggtatagcagtaaaactaggaatagcccccttgcacttctgatgtccagaggttacccaaggcacccctcttgatatccggcctgcttcttctcacatgacaagagaattagcccccatctcaatcatataccaaatctcgtccctcactaaaggtaagccttctcctcactctctcaatcttatccatcatagcaggcagttgaggtggattagaccaaagccagttacgcaaaatcttagcatactcctcaattacccacataggatgactacatagcagttctaccgtacaagctttaacataaccattcttaatttacctatttatatgatcctaattattaccgtattcctatactcaattaaactgccagcaccacgaagcctactatatctcgcacctgaaaacaagctaacattgatagcaccttaattccattcaccctctctcctaggaggctgccccgtgtaccggttgtttgccaatggcgcttttcgaggattgccaaaaaaatagggtattatccaacatatagcgacattaccgtcttaccttaatttactagagaattatcactaataaatatcccatttaagtaataatgcgtggtaaaacacccatttcccaaatgcgtgaagcatacaatccttttatttttaaaaaaaaaaaagggggggcgataaaattgggcaaaaaata

SEQ ID NO: 630355 - DNA, 255 bp, Homo sapiens
aaaatgaagagcattcagacagtctaagaaagtcatgctgagtgactcacacctgtaatttcaggactttaggaggccaaggcaagaggattgcttgaggccaagagtcaagacccgcctgggcaaaacagcaagaccctgtctctacaaaaatagaaaattaaaaaaagggtggctggcaagatgaccaaataggaacagctcgggtctgcagctcccagcaagatcaacacagaaggcgggtgattttttgca

SEQ ID NO: 630356 - DNA, 696 bp, Homo sapiens
cgaggctcagtctgtcaccatttagttaggtagtgccgtggtgggcttgaggctcactgcactgcagacctccacctccctggagtcaagtgattctctcacctcagcctcacaagtagctgggactacgggcatgtgccacaatgcctggctaattttttaattttttaatattttttattttattttattttgagacagagtcttgctctgtcacccaggaccggagtgcaatggatgtgatcatcggcttcactgcaacccatctgctcaagcaatatctccactgccttagacctcctgagatagactgggattacaggcgcctgccaccacgcccggctaactattttatttttattatttagatagagacaggatttggccattgttggccaaggatggtcatcaacctcacatgaccatcaggagtgatccagcccaccttcaggacatcccaaagtgcctcggattacagaagtgtgagccaacaacagaccgcagaccatataattatatagattgtgatgaataagattttatagttataaataaatttataataatgtagaaagtggaagatataaaaatcattgataagaaccaaggcgttgaagatgaaaaatggggggcgaatcttgaggataaaatgaaaaattcaaagcccacaagggtttccgaaacaaatgtagtcca

SEQ ID NO: 630357 - DNA, 385 bp, Homo sapiens
  misc_feature (14)..(14): n is a, c, g, or t
  misc_feature (70)..(70): n is a, c, g, or t
  misc_feature (256)..(256): n is a, c, g, or t
aacttaaaaaattncccccattttaagcccatttttaaagtgcacgggttcctgtggcaattagggtaanattcgcattgtgcaggccacgggcgaccctccgccttcagaactttctcatcttccccaaaccgaagctctgtgctcattaaaggctagcccccccgttgctctcccccagccccggcaaccccatgtccactttgtgtctcgactgtaagtgtggctgctctgggaccagtgccagtgggcgcanactgggtttgcctatgtctggcttacttcactcagcagagtgtcttcggttttatcagttttgtcacaagtgtcaggatttttctcatttttaaggctgaataaaatattgtgtggataaaaacaaaaa

SEQ ID NO: 630358 - DNA, 245 bp, Homo sapiens
  misc_feature (24)..(24): n is a, c, g, or t
  misc_feature (26)..(26): n is a, c, g, or t
  misc_feature (32)..(32): n is a, c, g, or t
  misc_feature (72)..(72): n is a, c, g, or t
  misc_feature (81)..(81): n is a, c, g, or t
  misc_feature (233)..(233): n is a, c, g, or t
  misc_feature (240)..(240): n is a, c, g, or t
gcgcatcaaagtggagcgcacgcntngcgganaccggctggcggccaccaagtgccggaagcggaactggangcgcatccncatgcgaaggacaaggtgaagacgctcaaggccgagaacgcggggctgtcgagtaccgccggcctcctccgggagcaggtggccagctcaaacagaaggtcatgaccacgtcagcaacggctgtcagctgctgcttggggtcaagggacacnccttctnaaagt

SEQ ID NO: 630359 - DNA, 298 bp, Homo sapiens
cctgcctcagcctcccaagtagctgggactacaggcgtgtgccacctcgcccggctaattttttgtatttttggtagagacaggggtttcaccgtgttagccaggatggtctcgatttcctgacctcgtgatcacccgcctcggcctcccaaagtgctggattacagcaccgcgcccggcaccttacatgtctttaataatactctataaagcaatttgggattgacaaaatctgtataaaatttgaagtgatctaggcaaagtaccagatggatcatatggttggagatggcattca

SEQ ID NO: 630360 - DNA, 348 bp, Homo sapiens
agtagtggctcatgcctgtaatcccagcactttgggaggcccaggcaggcagatcacttgagctcaggggttccagaccaacctgggaaacataacaaaactccgtctctaccaaaaatacagaaaattagccaggcgtggtggcatgcatctgtagtcccaactactcagaaagctgaggtgagagaatcgcttgagcctggggggttgcagtgagctgagatcatgtcactgcactccagcctgggtgaagagtgagtccctgtctcattaccaaaatttagttaatattttataagcataaatttacatttagcttaatttgcgggggggaaggcaggtgtggtg

SEQ ID NO: 630361 - DNA, 117 bp, Homo sapiens
tgccagggcctgttatgaagcaggagaaaggagaaaggggacagacgttaacgtgttcaactaccatccttaccaccagaagctattcacaacttcgcagagtgtttcagaaataca

SEQ ID NO: 630362 - DNA, 354 bp, Homo sapiens
  misc_feature (29)..(29): n is a, c, g, or t
  misc_feature (79)..(79): n is a, c, g, or t
  misc_feature (145)..(145): n is a, c, g, or t
  misc_feature (221)..(221): n is a, c, g, or t
gatgggagtttcactcttgtctcccaggntgcagtgcaatggcgtgatctcggctccctgcaatctccacctcccaggntcaagccattctcctccatcagcctcccaagtagctgggattgcaggcatggccaccatgcctggntaaatttttttgtatttcagtagagacagggtttcgccatgttggtcaggctggtctcaaactcctgacctcaggngatccacccgcctcagcttcccaaagtgctgggattacaggcgtgacatacgttgcccggccggtgattcaggttcttactttgagcagattccatctattcaggtcactggtttataacatattaaagtatt

SEQ ID NO: 630363 - DNA, 693 bp, Homo sapiens
  misc_feature (16)..(16): n is a, c, g, or t
  misc_feature (116)..(116): n is a, c, g, or t
  misc_feature (168)..(168): n is a, c, g, or t
  misc_feature (180)..(182): n is a, c, g, or t
  misc_feature (185)..(185): n is a, c, g, or t
  misc_feature (193)..(193): n is a, c, g, or t
  misc_feature (202)..(202): n is a, c, g, or t
  misc_feature (207)..(207): n is a, c, g, or t
  misc_feature (214)..(214): n is a, c, g, or t
  misc_feature (217)..(217): n is a, c, g, or t
  misc_feature (222)..(223): n is a, c, g, or t
  misc_feature (230)..(231): n is a, c, g, or t
  misc_feature (249)..(249): n is a, c, g, or t
  misc_feature (264)..(264): n is a, c, g, or t
  misc_feature (270)..(270): n is a, c, g, or t
  misc_feature (277)..(277): n is a, c, g, or t
  misc_feature (280)..(283): n is a, c, g, or t
  misc_feature (286)..(286): n is a, c, g, or t
  misc_feature (289)..(289): n is a, c, g, or t
  misc_feature (329)..(329): n is a, c, g, or t
  misc_feature (340)..(340): n is a, c, g, or t
  misc_feature (343)..(343): n is a, c, g, or t
  misc_feature (361)..(362): n is a, c, g, or t
  misc_feature (368)..(368): n is a, c, g, or t
  misc_feature (386)..(386): n is a, c, g, or t
  misc_feature (398)..(398): n is a, c, g, or t
  misc_feature (451)..(451): n is a, c, g, or t
  misc_feature (466)..(466): n is a, c, g, or t
  misc_feature (486)..(486): n is a, c, g, or t
  misc_feature (503)..(503): n is a, c, g, or t
  misc_feature (536)..(536): n is a, c, g, or t
  misc_feature (545)..(545): n is a, c, g, or t
  misc_feature (692)..(692): n is a, c, g, or t
aacaaaacagaagaanaaacttattagaataaggccacctaggaatgttcttaacttttccattcagcttttggctgatatatgaaaatacaaataaatacatcctttccccaggngcaagggtaaaccagcagctccaagggcttggtctacagtgctcagaaaganacactgccttannngtnagggtagngggctaggnccggnggcctcngcnaatgnngccttgnnagtggtcagtggacaganacatagtatccagcnccaggncttgggnctnnnngcntcncagagtttcacaggtagggggcatgtgagggggggggtgngtacttctgtnggnggatggcggtagtacttnncagggnacagcctggacgaatgangccaaactttcngggcacagacaaatcaaccacagttgagccaaggcgacactcggggctctggncatccccaatttgtngccccatcaataaccaaggncaactgaggccagagantccttggaactcctcgacattcagagaactggnctgggagcngagggtgggactagtgagagcaagcggaccctcaaacatctgagccaagtcttgcataaaagcatgatcaggaatccgaatgcctacaagaggcgtaaaagggtttaggtccttgttgagctcctccgagcgttccatcaccagggng

SEQ ID NO: 630364 - DNA, 2129 bp, Homo sapiens
ggcacgagggcatcccctgcgcgaagctgggtgccccggagagtctgaccaccatgccacctcctcgcctcctcttcttcctcctcttcctcacccccatggaagtcaggcccgaggaacctctagtggtgaaggtggaagagggagataacgctgtgctgcagtgcctcaaggggacctcagatggccccactcagcagctgacctggtctcgggagtccccgcttaaacccttcttaaaactcagcctggggctgccaggcctgggaatccacatgaggcccctggccatctggcttttcatcttcaacgtctctcaacagatggggggcttctacctgtgccagccggggcccccctctgagaaggcctggcagcctggctggacagtcaatgtggagggcagcggggagctgttccggtggaatgtttcggacctaggtggcctgggctgtggcctgaagaacaggtcctcagagggccccagctccccttccgggaagctcatgagccccaagctgtatgtgtgggccaaagaccgccctgagatctgggagggagagcctccgtgtgtcccaccgagggacagcctgaaccagagcctcagccaggacctcaccatggcccctggctccacactctggctgtcctgtggggtaccccctgactctgtgtccaggggccccctctcctggacccatgtgcaccccaaggggcctaagtcattgctgagcctagagctgaaggacgatcgcccggccagagatatgtgggtaatggagacgggtctgttgttgccccgggccacagctcaagacgctggaaagtattattgtcaccgtggcaacctgaccatgtcattccacctggagatcactgctcggccagtactatggcactggctgctgaggactggtggctggaaggtctcagctgtgactttggcttatctgatcttctgcctgtgttcccttgtgggcattcttcatcttcaaagagccctggtcctgaggaggaaaagaaagcgaatgactgaccccaccaggagattcttcaaagtgacgcctcccccaggaagcgggccccagaaccagtacgggaacgtgctgtctctccccacacccacctcaggcctcggacgcgcccagcgttgggccgcaggcctggggggcactgccccgtcttatggaaacccgagcagcgacgtccaggcggatggagccttggggtcccggagcccgccgggagtgggcccagaagaagaggaaggggagggctatgaggaacctgacagtgaggaggactccgagttctatgagaacgactccaaccttgggcaggaccagctctcccaggatggcagcggctacgagaaccctgaggatgagcccctgggtcctgaggatgaagactccttctccaacgctgagtcttatgagaacgaggatgaagagctgacccagccggtcgccaggacaatggacttcctgagccctcatgggtcagcctgggaccccagccgggaagcaacctccctggggtcccagtcctatgaggatatgagaggaatcctgtatgcagccccccagctccgctccattcggggccagcctggacccaatcatgaggaagatgcagactcttatgagaacatggataatcccgatgggccagacccagcctggggaggagggggccgcatgggcacctggagcaccaggtgatcctcaggtggccagcctggatctcctcaagtccccaagattcacacctgactctgaaatctgaagacctcgagcagatgatgccaacctctggagcaatgttgcttaggatgtgtgcatgtgtgtaagtgtgtgtgtgtgtgtgtgtgtgtgtgtgtgtgtatacatgccagtgacacttccagtcccctttgtattccttaaataaactcaatgagctcttccaatcctaaaaaaaaattagccaggcatagttgtgtgtgcctacagtgctacaggaggctgaggcaagaggattgcttgagttaaggaaggaagtcaaggctgcagtgagctatggtcatgccactgcactccagcctgggcaacagcaagaccctgtgtccaaaaaaaaaaaaggaattc

SEQ ID NO: 630365 - DNA, 1949 bp, Homo sapiens
ggcacgagggcatcccctgcgcgaagctgggtgccccggagagtctgaccaccatgccacctcctcgcctcctcttcttcctcctcttcctcacccccatggaagtcaggcccgaggaacctctagtggtgaaggtggaagagggagataacgctgtgctgcagtgcctcaaggggacctcagatggccccactcagcagctgacctggtctcgggagtccccgcttaaacccttcttaaaactcagcctggggctgccaggcctgggaatccacatgaggcccctggccatctggcttttcatcttcaacgtctctcaacagatggggggcttctacctgtgccagccggggcccccctctgagaaggcctggcagcctggctggacagtcaatgtggagggcagcggggagctgttccggtggaatgtttcggacctaggtggcctgggctgtggcctgaagaacaggtcctcagagggccccagctccccttccgggaagctcatgagccccaagctgtatgtgtgggccaaagaccgccctgagatctgggagggagagcctccgtgtgtcccaccgagggacagcctgaaccagagcctcagccaggacctcaccatggcccctggctccacactctggctgtcctgtggggtaccccctgactctgtgtccaggggccccctctcctggacccatgtgcaccccaaggggcctaagtcattgctgagcctagagctgaaggacgatcgcccggccagagatatgtgggtaatggagacgggtctgttgttgccccgggccacagctcaagacgctggaaagtattattgtcaccgtggcaacctgaccatgtcattccacctggagatcactgctcggccagtactatggcactggctgctgaggactggtggctggaaggtctcagctgtgactttggcttatctgatcttctgcctgtgttcccttgtgggcattcttcatcttcaaagagccctggtcctgaggaggaaaagaaagcgaatgactgaccccaccaggagattcttcaaagtgacgcctcccccaggaagcgggccccagaaccagtacgggaacgtgctgtctctccccacacccacctcaggcctcggacgcgcccagcgttgggccgcaggcctggggggcactgccccgtcttatggaaacccgagcagcgacgtccaggcggatggagccttggggtcccggagcccgccgggagtgggcccagaagaagaggaaggggagggctatgaggaacctgacagtgaggaggactccgagttctatgagaacgactccaaccttgggcaggaccagctctcccaggatggcagcggctacgagaaccctgaggatgagcccctgggtcctgaggatgaagactccttctccaacgctgagtcttatgagaacgaggatgaagagctgacccagccggtcgccaggacaatggacttcctgagccctcatgggtcagcctgggaccccagccgggaagcaacctccctggggtcccagtcctatgaggatatgagaggaatcctgtatgcagccccccagctccgctccattcggggccagcctggacccaatcatgaggaagatgcagactcttatgagaacatggataatcccgatgggccagacccagcctggggaggagggggccgcatgggcacctggagcaccaggtgatcctcaggtggccagcctggatctcctcaagtccccaagattcacacctgactctgaaatctgaagacctcgagcagatgatgccaacctctggagcaatgttgcttaggatgtgtgcatgtgtgtaagtgtgtgtgtgtgtgtgtgtgtgtgtgtgtgtgtatacatgccagtgacacttccagtcccctttgtattccttaaataaactcaatgagctcttcc

SEQ ID NO: 630366 - DNA, 347 bp, Homo sapiens
tcagagaacactataaacatctctacgcaaataaaccagaaaatctagaagaaatggacaaattcctggacacaaacaccctcccaaaactaaaccaggaagaagtcgaatccctgaacagaccaataacgagttccgaaattgagtcactaattaataacacaccagccaggaaagaaaaaaaaaaaaccggcccccacccggtttcactcccggttttttccaaccaaacaaacaaaagcgggtgccaacctttcttaaggaatccttaaaaaaaaaggaggggggggggttccttacttaatttattgaaccaagcatgttctttcttcaaacaaaattctggc

SEQ ID NO: 630367 - DNA, 393 bp, Homo sapiens
ggcacgagggcatcccctgcgcgaagctgggtgccccggagagtctgaccaccatgccacctcctcgcctcctcttcttcctcctcttcctcacccccatggaagtcaggcccgaggaacctctagtggtgaaggtggaagagggagataacgctgtgctgcagtgcctcaaggggacctcagatggccccactcagcagctgacctggtctcgggagtccccgcttaaacccttcttaaaactcagcctggctggacagtcaatgtggagggcagcggggagggccggcctggggcaggggcaggaggagagaagggaggccaccatggacagaagaggcccgcggccacaatggagctggagagaggggctgtaggcactggggcccaccc

SEQ ID NO: 630368 - DNA, 431 bp, Homo sapiens
cgtccgggcgctaggggttgggtggaggggactggccaagcttactggtgggttcgtaagaagaaatgaaatccagatgactcattcactccagattccaaagtccaacttggccaaggctggaaaaaaacatctcaggggcttcagcaaggggcaaataaattttaaaaaatgaagaaagcagcagttggcaatgaacccccagagaagagtcggagaactatattcattgggcagtgtttactagaactggaggaagggacaggctgagaagaggaggctgagttgcagggagtggtgggagtgatggaggctcatgtctgctagagagaaccttgcacatcccagggggaacatcctactacttgccctgagcacaacaggctcagctataaggcagcacatcaaaaccaagcagctgctcagggctc

SEQ ID NO: 630369 - DNA, 330 bp, Homo sapiens
gccgtccgccgcacggagagcccagccaccgccgcagagaccttcaaggtaaggacctttataattgaggtttggaggagattttgaccagcattcctcctccccgtcctccagcaattaccaattaagcctggaccttctcgccttatgatacctcatattgtaacccagaccttaaaatcctattctggggagaaaattctgggacctttccatacgcgcttttcctgattatcgggccacatggcagtggcaaatccattgttatggacttctatgctttgggtgttgggctatggagcacaaaattgaggtctaaacactttgagt

SEQ ID NO: 630370 - DNA, 1999 bp, Homo sapiens
ggcacgagggcatcccctgcgcgaagctgggtgccccggagagtctgaccaccatgccacctcctcgcctcctcttcttcctcctcttcctcacccccatggaagtcaggcccgaggaacctctagtggtgaaggtggaagagggagataacgctgtgctgcagtgcctcaaggggacctcagatggccccactcagcagctgacctggtctcgggagtccccgcttaaacccttcttaaaactcagcctggctggacagtcaatgtggagggcagcggggagctgttccggtggaatgtttcggacctaggtggcctgggctgtggcctgaagaacaggtcctcagagggccccagctccccttccgggaagctcatgagccccaagctgtatgtgtgggccaaagaccgccctgagatctgggagggagagcctccgtgtgtcccaccgagggacagcctgaaccagagcctcagccaggacctcaccatggcccctggctccacactctggctgtcctgtggggtaccccctgactctgtgtccaggggccccctctcctggacccatgtgcaccccaaggggcctaagtcattgctgagcctagagctgaaggacgatcgcccggccagagatatgtgggtaatggagacgggtctgttgttgccccgggccacagctcaagacgctggaaagtattattgtcaccgtggcaacctgaccatgtcattccacctggagatcactgctcggccagtactatggcactggctgctgaggactggtggctggaaggtctcagctgtgactttggcttatctgatcttctgcctgtgttcccttgtgggcattcttcatcttcaaagagccctggtcctgaggaggaaaagaaagcgaatgactgaccccaccaggagattcttcaaagtgacgcctcccccaggaagcgggccccagaaccagtacgggaacgtgctgtctctccccacacccacctcaggcctcggacgcgcccagcgttgggccgcaggcctggggggcactgccccgtcttatggaaacccgagcagcgacgtccaggcggatggagccttggggtcccggagcccgccgggagtgggcccagaagaagaggaaggggagggctatgaggaacctgacagtgaggaggactccgagttctatgagaacgactccaaccttgggcaggaccagctctcccaggatggcagcggctacgagaaccctgaggatgagcccctgggtcctgaggatgaagactccttctccaacgctgagtcttatgagaacgaggatgaagagctgacccagccggtcgccaggacaatggacttcctgagccctcatgggtcagcctgggaccccagccgggaagcaacctccctggggtcccagtcctatgaggatatgagaggaatcctgtatgcagccccccagctccgctccattcggggccagcctggacccaatcatgaggaagatgcagactcttatgagaacatggataatcccgatgggccagacccagcctggggaggagggggccgcatgggcacctggagcaccaggtgatcctcaggtggccagcctggatctcctcaagtccccaagattcacacctgactctgaaatctgaagacctcgagcagatgatgccaacctctggagcaatgttgcttaggatgtgtgcatgtgtgtaagtgtgtgtgtgtgtgtgtgtgtgtgtgtgtgtgtatacatgccagtgacacttccagtcccctttgtattccttaaataaactcaatgagctcttccaatcctaaaaaaaaattagccaggcatagttgtgtgtgcctacagtgctacaggaggctgaggcaagaggattgcttgagttaaggaaggaagtcaaggctgcagtgagctatggtcatgccactgcactccagcctgggcaacagcaagaccctgtgtccaaaaaaaaaaaaggaattc

SEQ ID NO: 630371 - DNA, 2291 bp, Homo sapiens
ggcacgagggcatcccctgcgcgaagctgggtgccccggagagtctgaccaccatgccacctcctcgcctcctcttcttcctcctcttcctcacccccatggaagtcaggcccgaggaacctctagtggtgaaggtggaagagggagataacgctgtgctgcagtgcctcaaggggacctcagatggccccactcagcagctgacctggtctcgggagtccccgcttaaacccttcttaaaactcagcctggggctgccaggcctgggaatccacatgaggcccctggccatctggcttttcatcttcaacgtctctcaacagatggggggcttctacctgtgccagccggggcccccctctgagaaggcctggcagcctggctggacagtcaatgtggagggcagcggggagctgttccggtggaatgtttcggacctaggtggcctgggctgtggcctgaagaacaggtcctcagagggccccagctccccttccgggaagctcatgagccccaagctgtatgtgtgggccaaagaccgccctgagatctgggagggagagcctccgtgtgtcccaccgagggacagcctgaaccagagcctcagccaggacctcaccatggcccctggctccacactctggctgtcctgtggggtaccccctgactctgtgtccaggggccccctctcctggacccatgtgcaccccaaggggcctaagtcattgctgagcctagagctgaaggacgatcgcccggccagagatatgtgggtaatggagacgggtctgttgttgccccgggccacagctcaagacgctggaaagtattattgtcaccgtggcaacctgaccatgtcattccacctggagatcactgctcggccagtactatggcactggctgctgaggactggtggctggaaggtctcagctgtgactttggcttatctgatcttctgcctgtgttcccttgtgggcattcttcatcttcaaagagccctggtcctgaggaggaaaagaaagcgaatgactgaccccaccaggagattcttcaaagtgacgcctcccccaggaagcgggccccagaaccagtacgggaacgtgctgtctctccccacacccacctcaggcctcggacgcgcccagcgttgggccgcaggcctggggggcactgccccgtcttatggaaacccgagcagcgacgtccaggcggatggagccttggggtcccggagcccgccgggagtgggcccagaagaagaggaaggggagggctatgaggaacctgacagtgaggaggactccgagttctatgagaacgactccaaccttgggcaggaccagctctcccaggatggcagcggctacgagaaccctgaggatgagcccctgggtcctgaggatgaagactccttctccaacgctgagtcttatgagaacgaggatgaagagctgacccagccggtcgccaggacaatggacttcctgagccctcatgggtcagcctgggaccccagccgggaagcaacctccctggggtcccagtcctatgaggatatgagaggaatcctgtatgcagccccccagctccgctccattcggggccagcctggacccaatcatgaggaagatgcagactcttatgagaacatggataatcccgatgggccagacccagcctggggaggagggggccgcatgggcacctggagcaccaggtgatcctcaggtggccaggtgagctgggactgcccctagggaaagcggggagggagggagataggcacggatggcagtggctgctggctttcagggagggagagggaacagggttcctagggcctggtgggcagggggaggactgctggacccctccccatcaccgtttcttctgcatagcctggatctcctcaagtccccaagattcacacctgactctgaaatctgaagacctcgagcagatgatgccaacctctggagcaatgttgcttaggatgtgtgcatgtgtgtaagtgtgtgtgtgtgtgtgtgtgtgtgtgtgtgtgtatacatgccagtgacacttccagtcccctttgtattccttaaataaactcaatgagctcttccaatcctaaaaaaaaattagccaggcatagttgtgtgtgcctacagtgctacaggaggctgaggcaagaggattgcttgagttaaggaaggaagtcaaggctgcagtgagctatggtcatgccactgcactccagcctgggcaacagcaagaccctgtgtccaaaaaaaaaaaaggaattc

SEQ ID NO: 630372 - DNA, 1214 bp, Homo sapiens
  misc_feature (63)..(63): n is a, c, g, or t
  misc_feature (155)..(155): n is a, c, g, or t
  misc_feature (177)..(177): n is a, c, g, or t
aggacccagagcctgaagtcgtaatcaagagcagaacttcgccccagaactgaaggcctcggncctagatttagattccgccccaggttcaaggccgggttcctagacccagagtccattcgcagagcccaaaacatcctcttcccgtgccccgncgcgcggacccttagccttgancgccccatctcttctgaccccgtcttacaatgcccctctcaccaggacgcgcccagcgttgggccgcaggcctggggggcactgccccgtcttatggaaacccgagcagcgacgtccaggcggatggagccttggggtcccggagcccgccgggagtgggcccagaagaagaggaaggggagggctatgaggaacctgacagtgaggaggactccgagttctatgagaacgactccaaccttgggcaggaccagctctcccaggatggcagcggctacgagaaccctgaggatgagcccctgggtcctgaggatgaagactccttctccaacgctgagtcttatgagaacgaggatgaagagctgacccagccggtcgccaggacaatggacttcctgagccctcatgggtcagcctgggaccccagccgggaagcaacctccctggggtcccagtcctatgaggatatgagaggaatcctgtatgcagccccccagctccgctccattcggggccagcctggacccaatcatgaggaagatgcagactcttatgagaacatggataatcccgatgggccagacccagcctggggaggagggggccgcatgggcacctggagcaccaggtgatcctcaggtggccagcctggatctcctcaagtccccaagattcacacctgactctgaaatctgaagacctcgagcagatgatgccaacctctggagcaatgttgcttaggatgtgtgcatgtgtgtaagtgtgtgtgtgtgtgtgtgtgtgtgtgtgtgtgtatacatgccagtgacacttccagtcccctttgtattccttaaataaactcaatgagctcttccaatcctaaaaaaaaattagccaggcatagttgtgtgtgcctacagtgctacaggaggctgaggcaagaggattgcttgagttaaggaaggaagtcaaggctgcagtgagctatggtcatgccactgcactccagcctgggcaacagcaagaccctgtgtccaaaaaaaaaaaaggaattc

SEQ ID NO: 630373 - DNA, 374 bp, Homo sapiens
  misc_feature (31)..(31): n is a, c, g, or t
  misc_feature (275)..(275): n is a, c, g, or t
  misc_feature (329)..(329): n is a, c, g, or t
gatcgagaccatcctggctaacacacggtgnaaaccttgtctctactaaaaaaatacaaaaacttagccgggtgtggtggcgtgtgcctctagtcccagctactgggcaggctgatgcaggagaatcacttgaatccaggaagcagaggctgcagtcaaccaagatagtgccactgcgctccagcctgggcaacagagcaagaccctgtctcaaatacaaaacaaaacaaaaaacagttggtagagagcttaggattttatttttcgtttacacnttggaatccaagaaaggagacagacaaagtgggtctcaaggatgagagcagggnaaaagctcgagataagagctgtgcagccgggtcagggaagcgatc

SEQ ID NO: 630374 - DNA, 194 bp, Homo sapiens
gcattcttggccggctcccgggctgcccgtttcccaggggcaactttttactggttgaaaatgggaagcaataattttcctttgccccgttttctcttaaagccctttccctgatgatgatgatggggccccattgttttttttttttccgtccctcctgataaataacaaatttggagaaataaaaatattta

SEQ ID NO: 630375 - DNA, 822 bp, Homo sapiens
  misc_feature (790)..(790): n is a, c, g, or t
ccaaagccccctaggttttttacccccacaggccacgttttgtcccgtgtgctgtatggcaccgggggttcccccagaccaattggagaattggggttttcccccaacgcccagcgcgttctcatcccccagagctgtcttctaactaggggggagatttaacattttctcgggggcgttctcacaacacaccggttatggaacacatccttttggtgccccccaacaccaggcgccagatgtttatacgcccacacaccccaacttggacccagagccccctaggtgggccaccccgggtgccatacccgtcgtgcaataaccaaaagcctgggatccaatagctgcgtcctgtgccaaccctcccacagatgtcccaccagacccaggaaccatattcccatagggcgcgtccataggccacatgcccacacatggcccctttgcccgtattttctggtccaagtgtttttaaaagtgttgtaagagactctctgaggaagacaccaccaggttatttgtaaagtagcgtctgtgagagcccacccatgccctcttgccctttgcctcttgggactgacccggaactgctctatgtgcgtgagagtgggagaccctttccttgcggccatggcttccgcgtgccccgtgtgctggtgcggttcccctcacgcagaccggaagggtgttgtgcgccctctgatccactggaacctctgtatcatgcggctgaattcccttttttccctttactccattaaagctacatccagactgataaacaagtaantactccgagcattagctcgggcgaaaagtata

SEQ ID NO: 630376 - DNA, 1157 bp, Homo sapiens
  misc_feature (63)..(63): n is a, c, g, or t
  misc_feature (155)..(155): n is a, c, g, or t
  misc_feature (177)..(177): n is a, c, g, or t
aggacccagagcctgaagtcgtaatcaagagcagaacttcgccccagaactgaaggcctcggncctagatttagattccgccccaggttcaaggccgggttcctagacccagagtccattcgcagagcccaaaacatcctcttcccgtgccccgncgcgcggacccttagccttgancgccccatctcttctgaccccgtcttacaatgcccctctcaccaggacgcgcccagcgttgggccgcaggcctggggggcactgccccgtcttatggaaacccgagcagcgacgtccaggcggatggagccttggggtcccggagcccgccgggagtgggcccagaagaagaggaaggggagggctatgaggaacctgacagtgaggaggactccgagttctatgagaacgactccaaccttgggcaggaccagctctcccaggatggcagcggctacgagaaccctgaggatgagcccctgggtcctgaggatgaagactccttctccaacgctgagtcttatgagaacgaggatgaagagctgacccagccggtcgccaggacaatggggtcccagtcctatgaggatatgagaggaatcctgtatgcagccccccagctccgctccattcggggccagcctggacccaatcatgaggaagatgcagactcttatgagaacatggataatcccgatgggccagacccagcctggggaggagggggccgcatgggcacctggagcaccaggtgatcctcaggtggccagcctggatctcctcaagtccccaagattcacacctgactctgaaatctgaagacctcgagcagatgatgccaacctctggagcaatgttgcttaggatgtgtgcatgtgtgtaagtgtgtgtgtgtgtgtgtgtgtgtgtgtgtgtgtatacatgccagtgacacttccagtcccctttgtattccttaaataaactcaatgagctcttccaatcctaaaaaaaaattagccaggcatagttgtgtgtgcctacagtgctacaggaggctgaggcaagaggattgcttgagttaaggaaggaagtcaaggctgcagtgagctatggtcatgccactgcactccagcctgggcaacagcaagaccctgtgtccaaaaaaaaaaaaggaattc

SEQ ID NO: 630377 - DNA, 1576 bp, Homo sapiens
  misc_feature (233)..(233): n is a, c, g, or t
taaccaaatcccaaggggtgaaacccaagtcatttaatccaaataaggcccttcacaaggttatgtgtttgggggtagtgtagtatagtgtgtgtgtgtgcccctgtggggaacacagtgtgacagggtgggtgcaggaactaataaattacgtggtgacagggttagaaggaaacactctcccccaaaggctgtggcaggacacttatgtgtgcgcagccaactgtctcacnacgaacctcctcggcgaagttagaagtctaccagaggaacaggggcagggtgtggttcatcaaggctgtgcgcctgtgagacgcgcacaaggggtgtgctcccctccttatgagcctcaagaaacgccacaacaaaattgtgggtgagcaccagcgtggtgcggttgtggccacataacgagcatgtggcgcacatcaagggcaacaagacgcgagggagagaacatcctgagcagagtgcacacaaggagaggacacaagaaactcacaagggatcaccacgcgacacacactgacggaccacgtggaacagggaaaaaaacagaaaagaagactgacacaggaacaaacccacacgaaacaacatgagccaacaaaccccagcagcgcaccaagccaacatacatcagaaaccacagtgcgaactaacaaatatgtagcgcccacatctcacacaaaagagacgaccccaccaaccgacacacaaaaactatataacacacacaaaacctacgaacaaaaaatcaagagcatctacaggacaaccacgaaaggtaatcaccaacgcgaatatctaccagggggcaccacgagggagaacaaagcaaaccgtatgaaccaactgagaagacacaccacacacagagaggcgcgacgaaaaaaagaaacccacattacaaacatacatccccaccagagagagaagcaaacccacacgagaaaaaatcacacccccacatagaaaggaatcggcgagcccaccacccacacgcgcaaaggctacagagggaagatggaacaaagaaccgcgacgaaaaaagccccccaaacacaaacgagacacacacggaggataggccacaaacaatcataccgccaggaacatctccacaacacaaaactcaaaaggagtcaacaaaaaatcaccctcaacaagcatgaaaaaggaaacaaacacacacacaaaagcaggggctcaccacaacgcggtcaaacaaaacgacgaagaaccacccaacagaccgtggacgcacaaaccacacagactcgcgaacacaacaacggagaaaaacaaccagcataataagagtactcacaccaacataaatgaggacacaacccccaaacacgcgagccatcagcaacatacagaggagcgggcaccaaagcctacacgcaacgcatagcaagacagcacagcagtgccaaatcagcagcgcgccaacaagcacagaaaggacgaacgaaaaccacaacactaaaaaagctcagaccaacagaatacagcgccaaacacacagacaaaacaacagaacacggatattctccacttccacatccgt

SEQ ID NO: 630378 - DNA, 287 bp, Homo sapiens
cagtttcctaacagttccatttaggtgatagctgccagtctgtgctatcaaatcattaataatgagaagcaaagtcttaatttggagaaagaatgcttagtcaagggaataaatccgacaggaaataaagactttaaaatgaacaaagaaaatgaactagtgagaagcgggatcattaaagtgaaaattgcctgccctcagaataaatgagacaaaaattgacatgttatatcttttcctataatctattctttgttactgaaataaatccattccagctttgaaag

SEQ ID NO: 630379 - DNA, 278 bp, Homo sapiens
tagagaagaggagggatcagtttcagcttctacatatggctagccagtattcccagcaccatttattaaacagggaatcctttccccatttctgttcagattcttaattaatacttgaccttgggagtttggctatcttgaggtagtcttatgtgggttaaatctatttgatgttcagtaaccttcctgtacttgaatactgatatcgttctctagtttggggaagttctctgatattatctctttggagatttaatctgtccttccttctttctctt

SEQ ID NO: 630380 - DNA, 197 bp, Homo sapiens
  misc_feature (92)..(92): n is a, c, g, or t
  misc_feature (158)..(158): n is a, c, g, or t
gatcctaatggtgctgccctatttatacctgggtctgcattaaaagggaaagccccccctgttgtagatttcatctgcttcctccttagggnaggctgggatatgatgagagattccagcccaagcccggccccccaccgccaggccatagggcatantttgcatctcaaatctgaggaataaactgatgacctgtg

SEQ ID NO: 630381 - DNA, 360 bp, Homo sapiens
tcatggccggcattttcggtgcggcgaaagcggctgccgggtcatggcgcagcaggctgatcatgtacggctgcacgctggggcggaagatcacttgcagatccttgggcaccttgtcgtcggtcttgccggcttccaggctgctgatcagctcaaaactgcgcttgagcagggcaggcggcaggtgattgcgttgcagttgctcgcgcaacagcacgcccaccgggcgccctgtaccggcaatcgaaaccacgccggcagcaccgatttgtggggctgccaggctggcgatcattgcgccttcactgtgcccgagcacaaacaccttgccaaagcgcgggtcgcttttgagtttctcgc

SEQ ID NO: 630382 - DNA, 188 bp, Homo sapiens
gtttttttacccaggctggtcttgaactactggcttaagggatctcccacctggaactcccaaatggctggaattacaggcgtgagacaccgtaacaggcttttgtcaaaacctagactgattttctggggccaaattgtatgcataagcattctgaaatccctttttgggcctggggctctttgggt

SEQ ID NO: 630383 - DNA, 189 bp, Homo sapiens
aaggcaaccaaagtgcaggacattcaaaaacaacctgaaagagggcgatttgaacccatttgttggccgccattgaggcaaccctggttgccccccttggagcttggccaacccccgaggaacccagtttcagagttggattacaatcctgagtttgatgaacggtgcctcattttggactttccttcc

SEQ ID NO: 630384 - DNA, 496 bp, Homo sapiens
agatccctttccatcctttagaaaggcttgtctccttatttaaataaaatagtgtttgtctagtagttcagtgtgggggcaatcttggatggggattcttctactaatctttcagaaactttgtctgcgaacactctttaatggatcagatcatgatttgatcggaataacgaatgtatgtttaaggcaaggacacacaattttgattcttctataatgtgatgagcatataataattccgaggcacatggcaattgaggccctctaaattaggaataaattcacctcttatacaggtgggagattatgatcagagtaaaaggtaattttacattttattgcctgaaagttaggagtctatacattgacagtgattagagtaatactttatcacatttccactagtttgcatgttgactttaaatgtcttacaatcttagagtgataggcaatgttttacactattgaccttatttgcggatggccccggggatct

SEQ ID NO: 630385 - DNA, 176 bp, Homo sapiens
cgggccttgttaggtcgagtatgagacagttcaggtcctggagagaaggctgggaggcaggagctgagtctaaagaggccattgtaacgatagagctagtagcctgtaggagcgctgttgatagagagcagtagacctcaatctgcggagagctgccgtagacgtaaaggtatagg

SEQ ID NO: 630386 - DNA, 193 bp, Homo sapiens
cccaaaagggttttccccccccccgggcctttaaataaattgggttttccccaccaaggggccttttttttttttccccttggaaacaaaaacctccaattttaagttgggtggggccccccccaactttttcccccttttttatttttttttttttttccccccccccctttaaaaaaaatttttttttcca

SEQ ID NO: 630387 - DNA, 850 bp, Homo sapiens
  misc_feature (21)..(21): n is a, c, g, or t
  misc_feature (61)..(61): n is a, c, g, or t
  misc_feature (70)..(71): n is a, c, g, or t
  misc_feature (80)..(80): n is a, c, g, or t
  misc_feature (88)..(89): n is a, c, g, or t
  misc_feature (91)..(91): n is a, c, g, or t
  misc_feature (93)..(93): n is a, c, g, or t
  misc_feature (144)..(144): n is a, c, g, or t
  misc_feature (160)..(160): n is a, c, g, or t
  misc_feature (185)..(185): n is a, c, g, or t
  misc_feature (199)..(199): n is a, c, g, or t
  misc_feature (213)..(213): n is a, c, g, or t
  misc_feature (217)..(217): n is a, c, g, or t
  misc_feature (232)..(232): n is a, c, g, or t
  misc_feature (239)..(239): n is a, c, g, or t
  misc_feature (254)..(254): n is a, c, g, or t
  misc_feature (293)..(293): n is a, c, g, or t
  misc_feature (300)..(300): n is a, c, g, or t
  misc_feature (362)..(362): n is a, c, g, or t
  misc_feature (392)..(392): n is a, c, g, or t
  misc_feature (459)..(459): n is a, c, g, or t
  misc_feature (551)..(551): n is a, c, g, or t
  misc_feature (783)..(783): n is a, c, g, or t
ggggcaagaatcaagtcgggncggcaggggcacaggcagcaggcaagaaagaaggggggcnggggccagnncccacaganccctcagnncncngccccagggcagcatggcagagggaccagccgacgggcctgagccggaccngcgcggagggggggangcccggcctcccggccgggcaccgngggggaaggggggngggaaggcatgggnaggnccggcaataggagcngaaaganccctgggcccaaggnggaggcggggcaggggcagggctggggctcaggcgtccncaagagnccacagagaaaagacgcaagaaaaagtcagacgaggcctatagcaaacccactcggtccgcnacaaagaacatgagaggagggcggcttagnggcaaaggggctttaggcgcaggcccggggccgaggaccaggagaaggggccgccggaggaggcggnggatgcggctggggctgtctggcacggggaccttcgtggccagccacgtggccttgggacgcccgcgtccagccagggctgaggacccaggncagagcccctcccgcccagcacccgcgacgccagcctggatgctggggtcactaagtgaggtactcgttggttccctggatgggccaccctttctgccctgggaggaggctctggggtgtgcaggagggagccagctaacaggtcagtgttctgggcagaagtggggcacgaataacacaggccctgaggacacagggacacaggtgacacgggccttaaaagtggcttgtnacatgagctacccagggccctgaaaaggggtgacctgaagacagaggttcccaggtggggtgaggga

SEQ ID NO: 630388 - DNA, 500 bp, Homo sapiens
  misc_feature (30)..(30): n is a, c, g, or t
  misc_feature (68)..(68): n is a, c, g, or t
  misc_feature (165)..(165): n is a, c, g, or t
  misc_feature (188)..(188): n is a, c, g, or t
  misc_feature (190)..(190): n is a, c, g, or t
  misc_feature (199)..(199): n is a, c, g, or t
  misc_feature (221)..(221): n is a, c, g, or t
gcccaaccggctgaagcggtagcggtaccntgaagctggattggctcagttcgtgaggttgctgcttncccattcggttctgacctcgatgctgccctcaacacgagtcgtggctgcgtctaactgagttgctgagcaggacgtattctccctggctattgagancaagtggctgttatctatgcggnantaggggatntcttgataaatggagcccgcanacaagtttgagatgctttcttgtctctgtcgtcagccgcaccagccttgttgggcactatcagggctgatggaaagatctcagaacaatcagatgcaaagctgaaagagattgtaacaaatttcttggctggatttgaagcttaaactcctgtggattcacatcaaataccagttcagttttgtcattgttctagtaaattagttccatttgtaaaagggttactctcatactccttatgtacagaaatcacatgaaaaataaaggttccataatgcat

SEQ ID NO: 630389 - DNA, 1651 bp, Homo sapiens
  misc_feature (721)..(721): n is a, c, g, or t
  misc_feature (942)..(942): n is a, c, g, or t
gcctgcttctctaccgtctccaagctcagtaccttcgagcctatggctatgctcacccgtgtgtatcagggccgaattgagaccttctctcgctggtactatcttctcaacacaagtagcgtcccggcacggtgcaggggtgaccaccatgacatgagcctcatgtagcaacgcaatgtgaggcctttgacaggcgagtcatgaatctccatacaaggagacatcagcccactcttgagacatacgcacaggcctagccatgcgaaatcgccattgcaaacactcttgcctaaacgagtctagcactgggcacacgaacctcttgtgaagccctgcgtacaacacaagtgcagccctacgtgtacgtgatcggtaaatcgtataccccacgcgcacgttcactcgctactaaccctctacactcggcgcgggtgcgcttcttgagcctttctagaactccttaagcgaactttgcacatgactctcttactatacgggagccctcgaacacatactttaaagattcatggagggcacaggtatttgagcatgcaaacaaatcccccttccttggagtgcgagctgccccctgcaatgccctgtaatgcatacaaacattctacccacggctgcggcgctgcgcgccctgaaaaccttcgcgttaacgccacaacaataatgacacgctatggttcatggttttgtaggggccctaccaaanaacattattttaataaccataccaccataacatgttaacacgaaatacaaaacaccacatcacgttcccgcgaagggtgcaccaattattccttaaagttgtatatacttggcggaagaagtcggactcgtgacccgtgaacaacttgaacgaagggcgttcgtcacaaactttggccacccattattgtgggaggagccaccccctaaatcgtttgggcngctaatcccaacattcaagttgttccattgtgcgtaatcaaacaacccgtgagaggaaagcaccgccaaaagaccaattttccttccttttgtggagagttattccaacacattcacggctgtgggggccctcacaagaaaacattaacttggggagccgccggcgggtttggcttgtcccccccaattttaattaaatggacgtgtgagacaggtttcgcggaaattaacccttttcacacaaatttctaatcccctagaaaattccaaggggaacccaccacaaggcgagattttcaccgggcaccatggggcgcccacatcttatactgaacctgtttcttgggggcggggcacgacaagaacagaggcgcggggcggaaaaggtttacgccggaaaaaacctattaaaggggttacctttccaaatgggggcctttttccaaaaaagccaaattttccgggaagaatttaaacctggcgccccggggcagtggggggcgctcgccccgcaatttattgcccggggccccccctttagaattatatcccttctttcccacagttaaacagcgagcgcgcgagagaaaagttttacacaccaatgccgcgagagagacgaaccgccagtcgttcaaactctttttaactttcacacttttacaaaagatgtccgaaacaccacgcgttttcctatagtcgccaaagg

SEQ ID NO: 630390 - DNA, 252 bp, Homo sapiens
ggatggcgaggaccattttcaggacactgagcttgtggggaccatttcagcaggagatagaaccttccagaagtgggcagctgtggtggtgccttctggagaggagcagagatacacatgccatgtacagcatgaggggctgccgaagcccctcaccctgagatgggagccatcttcccagtccaccgtccccatcgagggcatagttgctggcctggctgtcctagcagttgcggtcatcggagctgtgac

SEQ ID NO: 630391 - DNA, 405 bp, Homo sapiens
  misc_feature (405)..(405): n is a, c, g, or t
cgctctagaggatacaacttatgctctgacccacccatagagtgagactctgtctcaaaaaaggaaagaaaaataggctgggcacagtgactcatgcctgtaatcccaacactttgggaggccgaggcaggtggatcacgaggtcaggagttcaagaccagcctggccaagatggtaaaacctcgtctctactaaaaatacaaaaattagccaggtgtggtggcaggctcctgtaatcccagctactcaggaggctgaggcagagaattgcttgaacccaggaggcagagtttgcagtgagccaagatcacaccactgcactccagcttggacgacagagcgagactctgtctcaaaaataataggccaggcatggtggctcaaggtctgtaatcccagcacttn

SEQ ID NO: 630392 - DNA, 488 bp, Homo sapiens
  misc_feature (92)..(92): n is a, c, g, or t
  misc_feature (147)..(147): n is a, c, g, or t
taagaggtatgtgctgccaacccatgcatgtcttccccatccccataggattataaagtgttcaggtaccaaacacagttctgtgtgaggtnttatgcctacttcctcaacaccaattcagaggcaacacctgtgcatctgtcccancaaaggtgctttaatacctaccttcactatttgagaaaggacactcacagttgcctgtgggttatgaaaattggcctacgtcctgcatgaagatgttacaggaattgggcagatatataagagagtctattgccaagcctgactaacttcggaatgaaataaggacttgcccagcataggctataggagcagccttactagtaaatcttgccacagaatcacttgaagctagacagagaaagaagttcaatttaaatatttgtcccattgtttgtgattaggatgtaagctttgtggaatgtaattaaccctgctttacgaagtcaccatattataatagg

SEQ ID NO: 630393 - DNA, 157 bp, Homo sapiens
tctagaggatctctgtgctcgtacgggataatctatttattaactcagaagttttttcttcgcaggatttttctgagccttttaaccacctccagctagccctacccccaataagaggcactgcccccaaacaggcatcaactcgctagatttcgta

SEQ ID NO: 630394 - DNA, 536 bp, Homo sapiens
tcgagtcggaccctgatgcttggtgtgacctgatcaatgtccaggccttcagagaggctagaacccacagcggggatgaggaggttagcctctctgaagccctggacttgatcgagtcggaccctgatgcttggtgtgacctgagtaaattgactccctgagaaccatctgcggagttgacagtatcaaaacagcctatgcaatgcaagcgtcacgatcagcagcaagtcctgccacccccgtcaagacttccgcgcctgtgtgcccagtgtgaccgagtaccggctggatggcacaccaaactacagaccgtgagccggagcagccggggcgagctagatccccatactccgcccagcactgaagtcgggggctctggacattggcacaccgcacctctgtgctcaagcggcagagtgaagaggcgtgaggctctagacccactgtcactgagaatagcaccagtacgagtccttcccatgggattcctgtaaacatgactacacgccccaagagcacagctgtttaaggaccct

SEQ ID NO: 630395 - DNA, 497 bp, Homo sapiens
gcgcccgcgtttgtgtccccctgcgcagggagggcttcttttccggcccccatcgggttggcccccagtcacgggcctacccccgtttctcgtgtgctccccccgctgctgtgccactttacaagaccctggtgggggatgtgtgttctatcagtgtgtcgcctcctgcagtgcaagtctcggttttctcggcccctcacggggtcctcgcctggttggcaggcgccgacttttgtccgcgggtctccccaaagtgggcgttgtgggccgccgtctgggtgcagaagtatccttcaggcgtgcctgggctctcatagtggagctcccacaggcgtcaagtatgtccttcttgtagacttgctcctccctccgtacggcccgagcccttgtggtccacccccgtcgggcccgacgcgcttgtgagagcctgaggggggggctttcccctccaacgctggcccctctcggcccaccggggcacccccttcccaaaaaac

SEQ ID NO: 630396 - DNA, 109 bp, Homo sapiens
gggacactaagctttggttgatcttctcatggagtgtgtagtgatgtctctgtattcctgaatttgatattggcctgcttgcaaggttggggaagtctcctgccagaaa

SEQ ID NO: 630397 - DNA, 241 bp, Homo sapiens
  misc_feature (180)..(180): n is a, c, g, or t
ggaattccaaaaaaacccgatcagccacaagtgctgatgagctaaataacaacgtggaagctgtttcccagacctactctaattgatttagtacatgcatttgctgacagccttgtgccaaaagaggcagacgcaagtaaaagataatgcaaacgcagtccatgagtgctcctaagcatngagaaggtgtcgatcacacgcagatcagattgtgattcttactccaacaccaggccgcaaa

SEQ ID NO: 630398 - DNA, 99 bp, Homo sapiens
taggtggtggttcttcaggagtgcgtggcttcaagtcccctaaaggaaagaaaaaaccaggtccggacccctatttgtcagtggccttcctctggatat

SEQ ID NO: 630399 - DNA, 147 bp, Homo sapiens
cttctggttgacttagaggatccgtctagcctcgccacgtgtggtgacccatctctactaaaaatacaaaaatcagccaggcgtggtggcacacctgtagtcccagccactggcgcggctgggacacactggcgaggctaggacagc

SEQ ID NO: 630400 - DNA, 360 bp, Homo sapiens
ggccttgggcccttttggtcccgttcccccgtagggtgggcaggctataatttgcctccttttggcccctgtgaatccagatgttttgccggtttttccctttgcggccgggcttttggctgtttcccaatggaacctggagggggtttttttttgggtttttagccggtttggcggccccccggggggatgtcttccttttgctcctggttcccagggtccgcctgggtgccttgggggcttggtcccctttgtttggttttttttttttgcttgcccaaagtggctttttttcccaaggattttaaatgtttgaatcccaatccttgaaattaaatgggttaacttccaacctttcca

SEQ ID NO: 630401 - DNA, 285 bp, Homo sapiens
tagtctattagctacccctagaagaaagaatgaccccttacacacaacaacacagcatacatgtactaggtgggggaagtggaggacagatagtagttcatacaatacccgcacccaataccttaaatctaacaccaacagctgcacccctaggtatacccccatgagcagcttagggtagagccagccctgcatactcgcacacagtaggaaacccaggccagggcgcacagctgcgcctgcaaactcccagccacctaatggggcaggccgcacgccagcgcc

SEQ ID NO: 630402 - DNA, 500 bp, Homo sapiens
caggtcgacaacagaagacaggacaggaaggcgaggtgatcctgggaggctggagagcttgtcaaggacacagacccacggtgtattgccgccccctagggtccaaactctttcctggacatctgcatgcaatgtcgacacgccctccattgtctgtggcgggcaaaggatttttattcacccccagacctttcgatcctgtgctgaaagtgtccctcagcctgtttccttgaaaaacccaagggctttgagcttattactcttgctgtctcttggggcccacgcggtcaagcttcaactaccgtatccctcattgaagggcgacctcttgttcttttcttcctggcccgtggcgctcaggcggggggcttccggcccccttctttgtctagtgagaggcttatagcctccctgatgctccgcgggggtgcggttttcttctttggccgtagcgcgtaccacctctacaacagtgggggagaagagatgttcttcacata

SEQ ID NO: 630403 - DNA, 365 bp, Homo sapiens
tcgtgcccactctcatattcatatattaaaatagtaaaccccaggttgatgatataggaggtaggggacctccatgaagtgattatgacagaaggttatagccctcagctaactggattagtgcccttacagaaggagggttagcttgctccttccaccatgtaaggatcacagcagaaggcaccatccgtgaggacagcatgtccctccagacaccaaatcttgcttgtgctgccttatcttggacttagctgccttccagaacagtgagaaattaaactttctgttgtttattaatgccacccatcccaactaagacattcgggaccaggctggtaaaagagactgtgtggcaagagtataga

SEQ ID NO: 630404 - DNA, 388 bp, Homo sapiens
atcttgctaccatccctctggaactgattatccaagacatacatgtgcagatttctgttcacctaagaattaaaaatagctaatagagtatggcacttgccaaaaaaaattcagttgatcctcacaacttgctgggtaggtattagcattatgattgagtcacattgtacgtgaaaacttgttttgaaagtcaaaagaaaagggggagaacctcatccctcaaagtacccataatgacctatatctaccgagagtgtataccacccagtagaagaactcctacacacctgaaagttgcagtacactaaggtagcgtcatggaagaaacaagaagaaaatgtatatatggatgtctgagatattcaaacaattctgggtagaaattgga

SEQ ID NO: 630405 - DNA, 203 bp, Homo sapiens
ctcgacgggctgctggctcccacggacatcccaccccacggacccaacatcctcgtacctgacctgaatgttgacccctttacctagacctcgttggaccacagttatcacgtggactgagaccaataacgccgttcagaccggcacgatgctcccacacgggtgcacctcttcgtccatcacatgagcatggagaaggttcc

SEQ ID NO: 630406 - DNA, 530 bp, Homo sapiens
ccctatgtctcgatcgctactgctatactacaaaatgcttcagttctcaatccattaatagctcacttttgatttcaatttattatttgtatttcaacaatcttttttttttttggggaaggaagtttggctctggtggcccaggtggaagtgcaagggcgcaatttgggttcatggcaatttcggcctccggggtcacaagcagattctccggcctcagcctctggagtagcgggaataacgggtgcccactcccaggctcagtgggtgcagtcggaagctagagtgaaaatgccgggggcctcagtagaaagtctctggcagggcctcgggtcacacccttaggggtaacggttccagtggggtgcagacaggccctgggacagggcgctggatgggttggggatgggatcaccgatcacagggggaccacaacttatgcacagagttcccagggcagattcaccatgaccaaagacacttccagggacacggtctacagggagctgaaaggctaggatctaccggat

SEQ ID NO: 630407 - DNA, 483 bp, Homo sapiens
acctcgcgccagccactcgaggacatttgaagggaaaacggtgaaagcttcgttgtcctatttgcaagttatcactcgcccatccttttccctggtccaccaggttacattgtcttaactctgcccttgacagcctcaggtctaaacacactaaccctctagactatgttgcctaactcaactaacacttattagactagaactgatcttatcaaatgcatgttacaccattcatctagtctctcattcacttttataatttccctccctcccccaaataattctttttttttttggagaacttatttttactcttgtggcccaagcctggagttgcaatgtggcgcattctcctcagctctcaccgcaaccctcgtgcctcccgggtttcaagcgatttctcctgccttcagccctccttaattagctggaatttacgggcattccccacacacccccgggttatttttgaggtttttacag

SEQ ID NO: 630408 - DNA, 295 bp, Homo sapiens
tctcatcctcttatggggcctgtcaacggtacgcagtgtctagcgagctcagagacagaaactcccgtgagcagaggcaagtcgctgtcttgatttcagtacgatacgacgtgaagcgggctcacgatcttctgagcttttggtttagcaggagtgtcgaaaagtacacaggatactggttggtgcggcaagcggtcatacgacgtccttttgatccttcatgtcggtcttcctatatgtgaagcaaattcacaagcgttgattgttcaccactaataggaggatgagcatggta

SEQ ID NO: 630409 - DNA, 499 bp, Homo sapiens
ccggagacggtagtctcaatctatgagggattttggcaatcctgagtcagggttctttcatatgccaataagtaagggttccatagggcccggggggtgggctcacacacgtgtaatcctagcacttgggaggccaaggcaggatgacggttggagcccaggagttggagaacaagtccgggcaaaatagtgagacctggtctctacaaaaaataaccagccaggggtggtggtacatgccggtggtcccagctactcgggaggcagagggggagggatcactggaggcgggaaagctcagggttatagtgagcagagatggtaccaccatactccagcccggtgacagagcgagacacggtctcaaacaaccaaaaaagtaacggtccattagcttcagacaagattatatgttgccggccagggggcaaggtttaccccatttagctcttagctcacggccaaacccaaatgacacatgaattcatcctcggaaata

SEQ ID NO: 630410 - DNA, 518 bp, Homo sapiens
  misc_feature (355)..(355): n is a, c, g, or t
gacagtgaatctgatgacagcaaatcaaagaagaaaacgagatgctgcctgacaaactcaagaggatttggccaggaggggtctgtgaatcctgacaagaactaattgggtggccacatgacatgcagtggacgacattgactggtttctcaatgaaaactggaacagattcaagcattgggagcgtcagaaaacttgtgggtggtcctgggggcggaaataggcaagggggccaaaaattatttgaaacaggtgggttcctttcgaaaaaatttgggttaacactgtgggcgcttattttttacattgggcaaaagggcagggaaggaaacatttaaaaacactttggggggtncaattttcttttttgggtgtccccaagtggaaaaagggaattagaacaagcggccttccaaaattaaaaactttgggtttttccaaaaaaattttggggtttaccctattttttatataaatttaagtttaattaaattttttctaaaattaactttacttaa

SEQ ID NO: 630411 - DNA, 416 bp, Homo sapiens
gtcatgcataccatttagtggctagtatggtatgtacgcaaggcatgagtcaggcttctgtactaccctctgatcccaggagacagggcaggcaagaaggagagcgcaggtggaagctacctcataatgggaaaattgtgggagctggaagaggtagggggagacccagccatcctgtactgacttctagcaatttcttctgccctcagtcatgaggggctccctatcctcccatcctatggtcccaggtgcagcaatgagagaggggaagagaagagagaaaggaagacaagtgggtgccaggtgaaggcatctctgctctgcatagctatttggccctggccatgactacaagcaaaagtgggtgcagatggctgggccaagggctgtggtatggagtggatactcagtaggca

SEQ ID NO: 630412 - DNA, 413 bp, Homo sapiens
gaaaattcttaagcagtaaaaatccatgagcatgtccacccattactgaacagttctgtttctgcaggtcatctggggtctaaatcatcttctcctggatcatctgtttctctcttcctctttacaccttccccaccttcttcctcctcttaatcctcatcctcatcttcatcttcttcatcaagttccaaatttcttcttcctcctcatgtgacttcagtcgtcgtcctcatccctttctacattttcatcttcatcatcttcttcatcaaactccttctttttcaccatcctcatcgtccttcgttcttcctcatcttctcctttcttcgtccttcctcctctttatccacaccatccacctcggcattctgagtcaggtgctccctggtcctctcggtcatagccatacg

SEQ ID NO: 630413 - DNA, 83 bp, Homo sapiens
ggagggcccttgggccccccccggggttttttcctttttttggggtgttattaatcccttccccaggggccctcttgggttta

SEQ ID NO: 630414 - DNA, 140 bp, Homo sapiens
tacgaggagtttctctaagccatccagtgccatcctcgtcgctgtagcgacacatgctctcgctgccgccatgattgagcagatgacccttcgttgtatcctcaagggccataacggctgggtaacccagatcgctatta

SEQ ID NO: 630415 - DNA, 210 bp, Homo sapiens
atgatgtatgccttcagatgatcaagaagaaaaagagtgcaactaggtaactaaatatatatgacctgaataaaaacagtctactcactgacttataccataatatataagaagctggagcttcacacatgtgaccatttcaagttgaatactacaagtctgtataactgaaggctaggggtaaggagtcagggagacggaagcccttgt

SEQ ID NO: 630416 - DNA, 202 bp, Homo sapiens
  misc_feature (157)..(157): n is a, c, g, or t
gtgctggtcgtccaggttagtatggtggcatgttcgtaatagtgtaatcagactatagcagaaaatgtcggttctttatctaaggcttgaattgtaaagtgaggctaagttacaacattagtaactcttaaaatggacacaggttttaaagctattntttttccttcctaactctctgaatttttcacatggccactcaata

SEQ ID NO: 630417 - DNA, 202 bp, Homo sapiens
aataccgcgtgtccaaaccaaactcagtatctttgccataaaacctcaatcctcctcacactactttcttctcacgcttcccacgtaatttccctactgacatgtcgacttcttccttctccaacgcctcctatatttgatgacggatcaaattatgttaccttattttttaaggtatctcttaaattcccctttcttcttt

SEQ ID NO: 630418 - DNA, 209 bp, Homo sapiens
gttgttgtatttaagactcctcagcacatggaagatcaatcgcgtaaagatatggaagaggaagatgtcatattacagccagagaaaaatgattctatttcaaaatatgcagccacgatgagcccaaggttcttaatgaagtgtctaacggtaacgcatcatgttggttagatcatatagagtctttggagtattagtaaaagagattt

SEQ ID NO: 630419 - DNA, 619 bp, Homo sapiens
  misc_feature (468)..(468): n is a, c, g, or t
  misc_feature (565)..(565): n is a, c, g, or t
tggccggggaagcaattcgttaataatatatctaatctattgggagactgaggcgggtgggtcacctgagatcaggagttcgagaccagcctggccaacatggcaaaactccgtctctactaaaaatacaaaaattcgccgggcatggtggtgcattcctgtattcccaggtactcggaaggctgaggcaggagaatcacctgaactccagaggtggaggttgcagtgagtcaggatcgcagcactacactccagcctgggtgacagagtgagactccatctcaaaaaaaaaaaaaaattaaaaaattaaattaaaagcgggccgggcgcattggttcagggccgggcacggtggctcaagcctgtaatcccagcactttgggaggccgaggcaggcggatcacgaggtcaggagatcaagaccatcctggctaatgtggtgaaacccggtctctactaacaatacanttagctggatgtggtggcaggtgcctgtggtcccagctattccagaggctgaggcaggagaatcacttgaacctgcgaggcagaggtttcagtgagntcagatcatgccactgcacttcagcctgggtgacagagcgagattctatctcac

SEQ ID NO: 630420 - DNA, 212 bp, Homo sapiens
  misc_feature (38)..(38): n is a, c, g, or t
  misc_feature (50)..(50): n is a, c, g, or t
ggacgctgatgctgcggtcgtctctgaggatccccagntccacaccttgncgtatacttgtccgggccttctgcagcatctcaaatcagacacataaagtcatcttttttttttttttttttttttttttttttttttttttttttttttttttttttttttttcccaaatacccgggggggggggtttttcccccaaaggaaggggggaaa

SEQ ID NO: 630421 - DNA, 1733 bp, Homo sapiens
ccgtgtgtgtggcgtcgtgtgcgtcgtcgcgcttctctctgctttgttagcgtcgtgagttgactcttgtttctcgtggtggcgtgtggctccgtggggcgctggttgggtgcggctcattgtgcgcgccgttgtgtctaccggtagcgcgcgggttggtcgacgctcgcgcgagttgttcccgcgtgcgttttggtcttggacatcccgcgtgcgtggcacaattggccggtggtgtgactgacctccccggggatagtgggggtttggcgccgcttactatggctggtggcagacccatcagtgggcgttttttctcgggcggctctgcacctccgtgggggccgcgtctgctccacttgttgtggaagtagaacgcctgtgttttttactgggggcgggttgttgacgtatcgggcctgattcttgttggggcgcgctcttgggggggtgtatgatccgccgctagtaagggtggtgtcctcctctagtagcccgcggggggggaagcgtagtaactatccaaacgttgatgcacccacattggttgttgtgggtgtaaacccaccgtggtgtgtccaagatatgtgtgtcgttgcgtataatttcttctctcttttttggcgcctgagcaagatttggccacaacatgttctgtggggggcgcccaacattcgttcctgaaccgcccttgcgttccgtttttggggatcccccgccccattttgttggtgaaaacagtttgggaaaccccgcacttctcttggggggtaattatttctcgcagaaaggttatgctccaccttttggggcccccctcttggagaggaagagaggaaagaagccactcgggcgcttgtctgagcacacagctggggctaacaacagtgtctctttagagaggggtttcacctcgagagagattagagaggagagatcgggcgctcttcttaagagatggggcgcaaaagtttcacgccgtcgcccgcacagccgcacgcgggccaacactctgtgttgcctctgagaactcttgcgcactcgttttgtgtgggccccaactgctatggctgtggcccgctcttatagaaacgcgtgttatacgacacgcgcacacacatctgtggaggagagggccgctcttatatttgtcgtagcccacaaatggcacagcgcgcttgtgtgttttccgcgcgttgctgccctctgttctgtgtgccgcagcacatcgtgtttgggtgtagaaatatatacggcgtgtgcgctccccacatatagacccgtcgagaaacctcgtgtgtgcgcggagcactttccaccgcacacattacacgcagcattatatgctagactctctcttctcggagagagatatagagaagaagtgtcctcgtgtttctctctctcgagagagagagatataccgctgtatactctctctctcccctctgggagaatatctcgctggagatattgtagaagagatgggctctcctcggcctcttctccaccgctgggaaatcacgtgaaagtgtttatgaaaactgctgccccacgagccaacccacgagctccacgcttggggtgggtcacgtaaggaggaggcacacctttcacagaagggagaagaagccacttctccaccacgagattcgcaccccacactatactttcaggatgaaattcttctttctgcccctcttttggggataaatattttccttccctttcca

SEQ ID NO: 630422 - DNA, 815 bp, Homo sapiens
agcgagatcgcaccattgcactccagtctggcaacagagtgagattccgtctcaaaaaaaaaaggaaagggaaaaaaatatagatatacctcttccttgtctcaaccggccatgaaattctgaacatctccaaattcagtggaattaagtccaagaacaaattttataggtataaacatagtttaccttcttatagtaatagtatacttaaaaaagcctcagggtatatatcttctaaacggctacaatccagggcagtacatttaacccaattatgtctctagttggagaacaacttagggcctattttcaactggtgtgtgtaagcctcaggtggcctaacattggtgccaaaataaaatatccgtaggaattaccctggaatttgtaaaaacccattcgttttgtgttatacactttggccaaaaattctcaaagagggctctggtattatatggtaattctttggaaaattataatttaattgagattctcagtaattgacgtggctggggtgtgaactatagtaacattaagtaccttcattatttataagaaacgttcaaaataatgtgactttggatttttacaccagaaatccttcctctttttcttacacagtgcattttttttaacaaaatccattgtgggtaatctcctaaataggttaatatttaaagtggttctagaaaccaatgtttcaaatatttgtgtgcttatcggaataattggtataatatttccaaacaatttcataatttccaagacaattttgacggagattttgcagggagtgaacttcaattggggtttaa

SEQ ID NO: 630423 - DNA, 219 bp, Homo sapiens
gcctactactactaaattaacggccggtcgacggagttcaaaactgcagtgggctatgattgcaccactgtactccagcctaggtgacacagtgagaccctgtttctaaaaataataaatttattggcggggtgtggtggctcatacccataattccagccctttgggaggccaaggcaggaggatctcttgaggctgagagttcgaaaccaacctatt

SEQ ID NO: 630424 - DNA, 144 bp, Homo sapiens
ggatttgctggtgcagtacaactaggcttaatagggactcgaattcgagcctcgaattcgaggctcgaattcgaggtgcaaaacacccccttagggtgcctcctgcgcaacctcccaactttacaactcgaccaagatttaaaa

SEQ ID NO: 630425 - DNA, 396 bp, Homo sapiens
cggcagttccaagttaccagcgcaggcaagttgtcacacaaccgttcccgtgggccccgtggtggttttcccgggggccggggttttttccttgggggccaaggaaggggccgtgggttttttaaaggaggaggggccccaggttttggggggacccggttttattccaggagtggggggtcggggggttccaaagatttttataccacccggggtcaaagtggtggttccagtgcccggggttggggggggtcctacaaaaacagtttcgccggtttcgtttcccccaaggggtaaaaccccttcctgtttaagtttgtccttccaaggggtgggtgtttaaaatttttgggggttttgttgaaggtttttttgtggtaaatgcccccccttgta

SEQ ID NO: 630426 - DNA, 437 bp, Homo sapiens
  misc_feature (2)..(2): n is a, c, g, or t
  misc_feature (18)..(18): n is a, c, g, or t
  misc_feature (26)..(26): n is a, c, g, or t
  misc_feature (82)..(82): n is a, c, g, or t
  misc_feature (87)..(89): n is a, c, g, or t
  misc_feature (138)..(138): n is a, c, g, or t
  misc_feature (236)..(236): n is a, c, g, or t
  misc_feature (239)..(239): n is a, c, g, or t
  misc_feature (265)..(265): n is a, c, g, or t
  misc_feature (267)..(267): n is a, c, g, or t
  misc_feature (286)..(287): n is a, c, g, or t
  misc_feature (313)..(313): n is a, c, g, or t
  misc_feature (323)..(323): n is a, c, g, or t
  misc_feature (329)..(329): n is a, c, g, or t
  misc_feature (417)..(417): n is a, c, g, or t
gntaaaaacgcaccagcngacactgntgccggagaagctgtcacacaagctgctggaggctttccataaccagggccccgtnatcannnggaagcatgacttgcacaagatggcagagcgccaaccgtgcgcctgtgncccactcaccgctggtgcgtagagctctccaggaggagcccagggccctctgccgcaagaaacagtgtgattcactgccacgctgtaaaactacctgngcngttaaggatgtagttcctttgtaagngntgggcaggcctcgtaagannatgtagcagcatattcactatccgtnaatccttctntctttnaggctggaacttgctctctctgcccctatttccttgtaagagggagcacattgacttgggaatttcctccaggaaactcagggctgtntctcttcccttaggttgggg

SEQ ID NO: 630427 - DNA, 235 bp, Homo sapiens
ttatactgtggtgtaccgtacagcaatgcagatctgagcgcatctgcaacttacaacacagctcatagcaatgcagatccttaacccactgagcaaggccagggattgaacccacatcctcacggatacgagtccagttcattagccactgagccaggacgggaactcctgccttctcatgttttatggtattttatatattccccctttatatctaacctctactcctattccc

SEQ ID NO: 630428 - DNA, 315 bp, Homo sapiens
  misc_feature (4)..(4): n is a, c, g, or t
  misc_feature (84)..(84): n is a, c, g, or t
  misc_feature (115)..(115): n is a, c, g, or t
  misc_feature (130)..(130): n is a, c, g, or t
  misc_feature (149)..(149): n is a, c, g, or t
  misc_feature (158)..(158): n is a, c, g, or t
  misc_feature (250)..(250): n is a, c, g, or t
  misc_feature (252)..(252): n is a, c, g, or t
  misc_feature (279)..(279): n is a, c, g, or t
tttntatttaataaaaaaaaaaaaaataaaattaaaagaggagaaaaaatagaaaaatagaaagaaaaattaaagtataaaaanaggggatgaaaatataattaatttaaaaaanaaataaaaaaaatanataaagtaaaaaaatatanatatatttnaagtaaaaaaaaaaatattgaaacaaaaaaaattaaatattgaaagtaaaatatgtatgtaaaaaaagaattgaaattttaaaattaaggtntnggaaagtaaaagtaatagtaaggattnaaaaaagggggggtgaaaaaaacgaaaaaaaaaata

SEQ ID NO: 630429 - DNA, 328 bp, Homo sapiens
accttaaaaacaccttgggttagtagacttctcaagattttagaacatagcaggctaaaagaggaagcatttttgcatttattcaggataagtcatatattctgctgtaactcaactcttttaccagcctaataggggagtatattaaagcttagattgtaattattgatttaaaaaatttatttttgaatgctttgttttttactgattaacttagacattttcaagtttctggactacattcagatttgcatgcctaatagcatttgtgtatttcagtataactttcatctttaaaatatatctcatccccttctgtcgtcttctc

SEQ ID NO: 630430 - DNA, 678 bp, Homo sapiens
  misc_feature (130)..(130): n is a, c, g, or t
cgggcgggaagccccgagcaacatttttcacccgggcaccgccgagcaggccgagagggaccccaagaccgtgcaggaccccaccccccgagacgctatatttttccggcaagagatgcaagaaaaaacnggaaaccactggctgaccagatcaacgggagaaacgaagagccgagccgccgaaacgacgacccggaagagaatatcggggacctcatgacagaggcgggagaggaagaaccgggaagcgcaaacaagatacctgccacccaaaacagtaggaggccgctcataagtgacactggaaggtgagatttatccaaggcagcagaagaccgaaagggctctgagcagccaacgaccgtgaaaaaacaggccaatacaaaaaagaatgcaccctcagaacccagcaaacaaccacgggcgaagagacaggcagccccaagcaggatcaacacggtgggccacacaggaaagaacccttgccaaggggggcaatatcattaaccaaacattgaaaaggcttggcgggggggtgcccaacacaagcaaaagcgctcccaagcgcaacccacgcatcctccctgaacgcgatcaggcaccaacacggaagtttgcaacccaactctccccgcaagagcgagtctcggacccacactggcgagacggctgcgggcg

SEQ ID NO: 630431 - DNA, 247 bp, Homo sapiens
gttctcccctcccggatagggcctccttccagaaagaggatgtggtcagcctgtgccaacaggctgatgtgctgggtgatgagaagcactgagcgggagtaccgctcaagctttcgtacaggagctgctccacctgttactggctgtttgcatccagggcactggtggcatcattcaggctaagtacacacggtttccggatcaatgctcggggcaatgcgactgtctggtgatgacaccctgacag

SEQ ID NO: 630432 - DNA, 419 bp, Homo sapiens
  misc_feature (141)..(141): n is a, c, g, or t
  misc_feature (226)..(226): n is a, c, g, or t
  misc_feature (274)..(274): n is a, c, g, or t
gagtgatggctggctggctggctgtttatttatttatttatttatttgttgtttgttgtttgagatggagtctagctctgttgcccagactggagtgcagcgccgggatctcagagtcaatgtgaacactctgcctcctgngttcaagtgattctcctgcctcagcctccaaatccatgcctggctaatttttgtatttttagtagagacggggtttcaccatgtnggccgggatggtctcgatctcttgacctcatgatccacctgcctcggnctcccaaaatgctgggattacaggcatgagccactgcgcccgggcaatttttttttatgttttgtagagacggggtttcgccatgttacccagactggtcttgaactcctgacctcaagcaatctgctcgtcttagcctcccaaa

SEQ ID NO: 630433 - DNA, 111 bp, Homo sapiens
taatccttgttggcttccctggctcaggagtctagattactcttccatggatgtgccatgcccaaaacgtatcatccaccctgctgttcggaccttcccagcccggcccgg

SEQ ID NO: 630434 - DNA, 174 bp, Homo sapiens
cgatgtggtacggtagtgaatatggtaataagcgccttggcgcgcacgccgcttcaaatgccggcggagtcaggtgcagtggttgcgtcatggcggttccctatagtaaagatattcatgccgtcccagctcacttcaatgccggcggcggtcaggctttgccgctctaccgag

SEQ ID NO: 630435 - DNA, 159 bp, Homo sapiens
aagatcatgtcatcgcactccagccgggggtacagagcaagacaccgtctcaaaataagtaaataaataattaaataaataaatttttaaaaattaaacagtaaaaactcaagtaaggtcacggggaactgacaatcaaaggttgggatcagtggaaga

SEQ ID NO: 630436 - DNA, 240 bp, Homo sapiens
gggggccccccattccccccgggcccatgtgggggttggggggggcccccgtttttttccccccccaggggccccccttttttccgggggggttttttttttttggcgggggaccccaaaaggggctttttttgtttttaataagaaaattgggggggggttttcccccccccttttcccggtttcccccgggggggtttttttttttttttggggctttaaaaagccgggccttttcca

SEQ ID NO: 630437 - DNA, 657 bp, Homo sapiens
tgagcggggagttcagccagcgggccctggtgcgggaggagtgggagtgggccggggccagcgcccgtggagtggtgggccatccccgcgcgaccgcagcgccgacagcgagggggagggcgcctgcggggaggacagggtcggggagagcgcccttccgcaggctcctttcattcttccacttaggggtctccaggcaatgaacaactggccccagccaaggccagagcgcgcgaactgaaagtgcggcactgggaccaatgagaggaacgcttcgtcccctgccatggaggctttgctgtgaaaactttgtgctggggctgccgaacgtggtgtcgtgccaacactgctgcagtggcagctccagataatgcgggttccaaacacggtgtgacagagcccgtcggacccaccttcggaaggccagaggccttgcttttcacacagacaaaggctttcagcttttcaaccacacatgtgacagtgagtaaccgtacaggtcgaacgtcaccacgggggtttgacgagacaccctgaaccacagagactcattaggggcactcggggaagtactcacagattacccagttggttagccgatcctgtcacctcatcttattccctttgcttgagggcccatatgggtattagccgcaa

SEQ ID NO: 630438 - DNA, 918 bp, Homo sapiens
accttgaccttggcatttgtgtagtcattgtagcgccagttagtccctgacactaacggttaggtatcagcctggtgcgcccatgggtttacgttcggtgttcccttcacccttgcgggtatcctcggttcttatggcacgtcttccgcttattagtgtgtccacttgtactcctttggtttgtaacgcctccccatgtggcttgtttaaacaactcttcccaaccgggtggtttgtaatacttgccccacgcacaagctgtgttgtgagaacaaccttctgggtggggaagtgttcttgacacgcttaatgctcgtggggacgagtgccctcctctgcctgtgtgtcggtccacgggcctttgttcgccccggagaatctcttcctcgctgtttgtggtgacaaaaggggtagacttgctcccgggttttagaatgcgcccactgcttgtgtgtggcccgcttcgagggtgtccttgccccgcccctggaaactgctcccttgtggaccgccgtggcgcccccaactacttgatactgttcctctaaggctgcggggtttgccaaaaaatttggccggttgccccccgagttatatcaacagttgtgtccgacaccggtcggtgtgatattataagaaggggcccccccaccctgtgtgatgataacaaggtagatctctatctcccccggttgaaacaccgtaagtcataactcccttatcgtgggtcgtggacccgctgcctccctattttgtgtatcctgcgaaggtttaatagagagagaactataggttgaactcgccctacaataatgaggatccccgtgacgtcattccaaaagtttcccccccgtttttccaaaaaatttacccttttttaccaaacccaacaaaacaaaaacaaaaaaccaataaaaa

SEQ ID NO: 630439 - DNA, 1164 bp, Homo sapiens
agcggatctctgggaacatctggtgcggtacgtacaggccctattccaggactcctatggccatgtgaaacctcaccacgggagtgtggagggctggatgcatgacggacacatcaacactgtggctgtcagccctccatggtatgagcacagagatggaataacgaccacgtacattccccaacggtcttgagtgacctgaacgcgtgcttggtgcttgatcatgctgcgtgcaggaatcctgagcctcacctttggaggctatgcaatatatatagttgactgcacatctgtcgtacactacggtgtcggcgtcaggcgtatgcaacaagatcctgcgcgtaccactctttgcgttgaagccacattgaatgacactgtaagaacacaagaggccggtgggtcgcagaactatagaggacgtcgtggcacggtgccgtactatgcatgtcctttgatgacgtgttgataggcagaccacatggtgattataggcccggtccatacgagcaagaccaaccaatgagtgcttggccttttgcgtaacatggcggtaactcgctactcgcgtaacaagcaagacgattgtgtacctcacgtacacaggatggcacttacattcttccttggatcagataccatttatagcgcaagatctcagaaatggggccaaggcatacgcgtgtttcttggtctaacgtttcccgactggttaaccattcgtacatgcttttacactaaatagattgtgggaaaccgcctctggggtacacaaaggctaccgttctccaaatggtcacaatccgagttggattgcgcctcgttaactattgtgccgcacatttctcaaggcagatttttgtctacattgtccccagagagggtccttagaaggctcgcatcttaatcggtcgaccgtctagttccgtcgtgtgttagaggatcggctacgcataagttaacacttgtcgcattggtaagggaactatttgtagagagctttgacccctgattgggcaaatttgacacagatcgcattgggaatagcttacccaggcccatagggaaacggacccctttcttaacagataaatccaacatttcttttgataccgccaattgagttataaaccttggtgcaatgttacttaccccgagaaacca

SEQ ID NO: 630440 - DNA, 556 bp, Homo sapiens
  misc_feature (487)..(487): n is a, c, g, or t
  misc_feature (540)..(540): n is a, c, g, or t
cattgcataataataaagagttcaattcaatgagaagacctaactattgtaaatatatacccacccaatgtaggagtacccagatgcataaagcaagttctgaaacacctacaaaaagatgtagataaccacacaataatagtgggatactacaacatgacactgacagtattaggcagatcattgagacatacaactaacaaaaacattcaggacttgaactcaacacttgactaaatgggcctaatagatatctacagaactctgcatccaaaaataacagaatataaattattctcatctgcacatagcacatactctaaagtcaaccacatgattgggccacaaaacaaccctcagcaaatcaaaaaaaactgaaatcataccaaacatactcttagactacgtgcaataaacatcaacactaagttgcttacaactatgcattacttgggaattaaacaacctgctcctgatgactttgggngaaccatgaaattaagggcaaacatcaggtaattctttgaactctctagtatncccgagatccgtctct

SEQ ID NO: 630441 - DNA, 671 bp, Homo sapiens
  misc_feature (568)..(568): n is a, c, g, or t
ggaagggaaggtttgtgggtctgtaaagaaagagtgcgcggtgcttgctcactcactctgcctgtctttgttctagctctgagtccaaccctgaaccttgccttccagtgtttccagctcttcagcctctttaccccccagaccatgtgagtctcaagggctagctcattctaacctttgattattctctttcctttggcttcccatttacctcttctttccacaggtaaatcagtggcacagtatactgcctccttgtgcctctggatcctggcacttcacatctactctttcatgggcccatttcttcattttgtggaccaagccatcctgagggcatggacattgtctctgaggaaattgcggccacccttaagataccaagaaaagcttctgctcatggtcccactggaaatggactctgctgagcacagccaccaggtgaagagaacagaatccacacctgcattgaatacctgtgtcttcatgtggataggctctgagaatacccttttgccctttccacacctctaggacttcttaattcttccccaatgggaggccctanggcttaactgaggaactgaatctcttctttttctggaccttaacccttaatctgtcagggacccttaggactctgagaagactgggtttgggggtggccttgg

SEQ ID NO: 630442 - DNA, 815 bp, Homo sapiens
  misc_feature (162)..(162): n is a, c, g, or t
cttgtactggtagaaaatgtttcagtaaaatgttagagattcattgtatcattttgaactctagttcattactataatatgttttcccctgtttccccccctccacaaactccagctgctggatcaacaacaatgcagtattctacattacggtggtggganatttctgtgtgatatttttgctgaacgtcagcatgttcattgtggtcctggttcagctctgtcgaattaaaaagaagaagcaactgggagcccagcgaaaaaccagtattcaagacctcaggagtatcgctggccttacatttttactgggaataacttggggctttgccttctttgcctggggaccagttaacgtgaccttcatgtatctgtttgccatctttaataccttacaaggtaagctttacagcatcaaatacaaactgaatgatcccagttgaatataaaaatgtagctactaaaagagtacaggcatgcctcagaagatgttggggggtttgggttctagaccactacaataaagcaaatattgcaataaagtgagtcacacaaattgttgtttcccagtgcatataaaagttgtgtttacactagactatagtctattaagtgtgcaattgcatgatgtctaaacaaatgtacatactttaacttaaaaatattttattgctaaaaactgctgatacagagacacaaggtgagtacatgctgttggaaaaatggccttgagagacttgctggacgcagggctgccacaaccttcaatttgtaaaaaacactaaacaacataaaaaattgggcccctgtgccga

SEQ ID NO: 630443 - DNA, 101 bp, Homo sapiens
acgcgcacggtatgtcctaggctatatacacctagcctacacggtatataccctgttgctcctaggctacaaaatacctgtacagcatgttactgtactga

SEQ ID NO: 630444 - DNA, 1259 bp, Homo sapiens
  misc_feature (606)..(606): n is a, c, g, or t
caaagacaggagatttgaatgaaaccatctgtacctgtagccatctaacaagcttcggcgttctgctggacctacctagtacatctgtgctgcctgctcaaatgatggctctgacgttcattacatatattgtttgtgggctttcatcaatttttctgtcagtgactcttgtaacctacatagcttttgaaaagatccggagggattacccttccaaaatcctcatccagctgtgtgctgctctgcttctgctgaacctggtcttcctcctggactcgtggattgctctgtataagatgcaaggcctctgcatctcagtggctgtatttcttcattattttctcttggtctcattcacatggatgggcctagaagcattccatatgtacctggcccttgtcaaagtatttaatacttacatccgaaaatacatccttaaattctgcattgtcggttggggggtaccagctgtggttgtgaccatcatcctgactatatccccagataactatgggcttggatcctatgggaaattccccaatggttcaccggatgacttctgctggatcaacaacaatgcagtattctacattacggtggtggganatttctgtgtgatatttttgctgaacgtcagcatgttcattgtggtcctggttcagctctgtcgaattaaaaagaagaagcaactgggagcccagcgaaaaaccagtattcaagacctcaggagtatcgctggccttacatttttactgggaataacttggggctttgccttctttgcctggggaccagttaacgtgaccttcatgtatctgtttgccatctttaataccttacaaggtaagctttacagcatcaaatacaaactgaatgatcccagttgaatataaaaatgtagctactaaaagagtacaggcatgcctcagaagatgttggggggtttgggttctagaccactacaataaagcaaatattgcaataaagtgagtcacacaaattgttgtttcccagtgcatataaaagttgtgtttacactagactatagtctattaagtgtgcaattgcatgatgtctaaacaaatgtacatactttaacttaaaaatattttattgctaaaaactgctgatacagagacacaaggtgagtacatgctgttggaaaaatggccttgagagacttgctggacgcagggctgccacaaccttcaatttgtaaaaaacactaaacaacataaaaaattgggcccctgtgccga

SEQ ID NO: 630445 - DNA, 298 bp, Homo sapiens
  misc_feature (131)..(131): n is a, c, g, or t
  misc_feature (170)..(170): n is a, c, g, or t
  misc_feature (248)..(248): n is a, c, g, or t
cataatatatcaagcatcccctgctttgtttcaggatcttaacacagcagagggtggttttcaggaaataaagctacttctagatactttaatagatatttcaagctgtaataatattttataactaaacnggaaagttaaaaataacgcttttacaactaatcctcacntacttcaacggcacagttccaaaggttacctaattccaaagaatattcctgtgctttcgtgtaggccagaagtatccnttatctggctcctcgtgtttagctccctcgcctctttttcttttgttttt

SEQ ID NO: 630446 - DNA, 353 bp, Homo sapiens
ccggtactgcagagggtctcagggcagggaccataacgtcacccatcttcatatccgtcaagtacatgtgcggaacgtgcaggtttgtagcatggtatgcatgtgccatcgtggttagctgcacctatcaacctgtcatctaggttttaagccctgcatgactaaaacaccaaaagcaattgcaacaaaagccagaattgacgaatgggatctaatgaaactaaagagcttctgcacagcaaaagacactagcatcagagtgaacccgcaaccaacagaatgggagaaaatttttacaatctacccatctgacaaaggtctaatatccagaattgccccgaagtccagaattg

SEQ ID NO: 630447 - DNA, 190 bp, Homo sapiens
aagtaaagctgattgaatggattttttaaaaactgaatccttagggtgttttacttcaaataaaaaaatgcatattgtttaagcaaatgttttacccccttttttttccagaaatgttacttttttattgaatggcataggatgggccctggaaagcttagcatcggggatcccctcccttattccgcca

SEQ ID NO: 630448 - DNA, 366 bp, Homo sapiens
  misc_feature (346)..(346): n is a, c, g, or t
  misc_feature (348)..(348): n is a, c, g, or t
  misc_feature (366)..(366): n is a, c, g, or t
ggccgaggcaggttgatcatgaggtcaggagatcgagaccatcctggctaacatggtgaaaccctgtctctactaaaaatacaaaaaattagccgggcgtggtggcgggtgactgtagtcccagctactcgggaggctgaggcaggagaatggcgtgaacctgggaggtggagcttgcagtgagccgaggtcacaccactgcactccagcctgggagacagagcaagactccatctcaaactgactagatatgctcatgatatgtaccatgtcatatgacttttgtgttcttttctgcattttatctacttatcatacttttatctgattatttcttctggtttgnantccagttcatttttcttn

SEQ ID NO: 630449 - DNA, 182 bp, Homo sapiens
ggggaggagggggggttgggccgcaggactccaccgctgaggccgacgaggccgatgtttttattttgtaaaccacatttttctatttattgcggtgtggcggttttaacattaaaaattattctttaggaattaaagtgtgaatatgcagcattgtggctataaaatcaaaaagtgcaatg

SEQ ID NO: 630450 - DNA, 313 bp, Homo sapiens
gtcgaccctagcctttctattagctcttagtgagattacacatgcaagcatccccgttccagtgagttcaacctctaaatcaccacgatcaaaagggacaagcatcaagcacgcagcaatgcagctcagaacgcatagcctagccacacccccacggaaacagcagtgattaacctttagcattaaacgaaagtataacataggcgataagaatccccagggtttggacaatttcgagctagcaaccgggatcaaagattagcccaatggttagaagccggcgtaaagagtgttttagatcacccccgtcgac

SEQ ID NO: 630451 - DNA, 663 bp, Homo sapiens
cggacagaggcatgcggggaagtactccagaggcagcagcccaggatggtgcagtgggtgagcattagcagattccgatatagtgcccccagccagtacctgggtgttccccacctatgggcatcatgcaccacaacaaacaggccacatgagaatgcaaaggaggaagtgaggcgaatatctggaggctgctggatgcttacttgaagacgaggactttatctggtgggcgaacgagtgacattggctgacatcacagattgtctgcacccgtgtagtggctctataagcaggttctagagccttctttaccgccaggccattacccaataccaaccgatggatacctcaccatgcatataaccagaccccagtaaccgggctgtctatgggggaagatgaaactgatgtgagaagatggaccagaaatgatgctaaaaagtatgcagagacccaagactaaaaaggacacacacaacgtgaaagagacacggcgatcacagggaagacagacagcagaacgacccacaagggctgagcgggaacggcaggaacaaaaaggagggcttgcccaaatgctcactgaggcacgacacaatgggacacactggtgaacaaagagacgcagagaagaataaaccacaagtacccagagaaccaaac

SEQ ID NO: 630452 - DNA, 598 bp, Homo sapiens
tgagcaactccgtgtaccataggtttatctcctatggaatattttctttatataggcgtttgtttccttttttttgggagacagagtcttggccctgttgcccaggctggagtggcatgggcgactggagctcactgcaacctccatttcccgggttcaagtgattggtcccacctcagcctcctgaatagctgggattataggtgcatgctaccatgcctggctacttttggtatttttagcagagacagggtttcaccatgttggccaggtgtggtctcgaactcctgacctcaagtgatccgtctggctcagcctcccaaagtgctgggattacaggtgtgagccattgcacctggctatataggctgtgtttactataaacctattagctaatgtttcccaagtatcattttagcatttaggatttttcccccaaggttatttctcatatttttttccactggaaaaagtggggtaacttagcagttcacatattgaagactgaagttataaaaacctctaaacttcaaggtacttttaacaatccagttacgaaaagctcaggctttaaaaaattataaagacgagacgttcc

SEQ ID NO: 630453 - DNA, 429 bp, Homo sapiens
gcacgagcggaaggcaggaagggctacggcccggtggggccatatggagggtttgctggtagggatgccttcagaggactgggcacatgttggctagagaaagatgcgcttagagatgaatatgatgatctcttagatttgagtgcagtacacatggagagtgtacgagaatgggaaaggctgcttaaagaaaaatgtggttatgtaggcagactcctaataccaggagaagaaccatgagaatctacacgatgaagaagataccatggatcacagtgaacaggattgaactttgttatgagccaaaggcaggggccttgagaactgcagtccttacgctctttcacagactgtacggagtcttagggttttgattgacctgctgcgaagtacattcatcaaatttgagtagcagataaatttatctca

SEQ ID NO: 630454 - DNA, 336 bp, Homo sapiens
tcaagattcaaagggggactcttatttaaccggcattaacagtcctgacggacaccttggatctcagctgggttttactctataatctcagctgtcgtcccaccccacttcttccaccccacttcttccttcaccaacatgcaagttctttccttccctgccagccagatagatggacagatgggaaaggcaggcgcggccttcgttgtcgagtagctctataatgtgaaaggggcagcacagtcgtttaaacttgatccaccctctttgcatcttacaaagttgaacagctaaaagaagtaaaataagacggcaatgcttgtgtaatgtacagtg

SEQ ID NO: 630455 - DNA, 138 bp, Homo sapiens
ccgtcagtcgctctagggattcacaggtgaggtgagacatccttattctcccgggggtttaagttatggatggtgatgtagggcttgggcagcttcgggaggagattcagggttgactgacaggccaagagcgactga

SEQ ID NO: 630456 - DNA, 301 bp, Homo sapiens
ggggcccccccccagtccccttttttttctttttggcccaaagggaaaaaaaataaaaaaggactccgggggtggtttgggttgttaaaagccgaagaatacccagaaccccgaaactttatttttggggacctttgggggttgaaaattttagcccttcctttttaaggaaaaaaccgacccccaggtttttccccccccaggtttttgggacccaaaaaaaccgccagaattttttttttttataaaaattaacaaaattcccccccccctttgaaaaaaaggggggttgggggcttta

SEQ ID NO: 630457 - DNA, 108 bp, Homo sapiens
tgtttttaaacaaaaggtaagaaaggtcttcaggagatgttgatttttattttgtcttgtctggatagaggtttagatttgctctcgaatgttccagtgtggagagag

SEQ ID NO: 630458 - DNA, 165 bp, Homo sapiens
cacagcagccggcccgggaggaaattatataggtggaagcaaaagtatcttcattttctcatgtattccccatcgactgagtcaactgcagaggggagaaagctccatctcaggaaaaaagaatctactacataatagaaagtctgctagacactgcctattaga

SEQ ID NO: 630459 - DNA, 402 bp, Homo sapiens
ttctgataatcagtcttgttaatgtgggtctcttataccattgtctctcaactccctcaagactacctacgtctctgagagtcataaagctttggtctctacattaggggctacacccaatctgagatatatctcctttgagaatggccaataggctcatacctgactgtttgctttcggtatgtaggcctgcctgtattgctgcagctatagtctcgcttgctacgaagacacatggtcatgactgtcttttagctcttgcctatttactgaatcgatgattgaaaggatttgctttttctctttagtacttacgtattgggattcctgtgtcttacagctctccctctccaaataatacacagaatcctgcaactttttgcacagctggtatctgtctgg

SEQ ID NO: 630460 - DNA, 304 bp, Homo sapiens
tgtgaaagcacacctttggtgatgtcgcgacacatctaaaacggacattttcgagcggacgcagcaaggcaggcagaagtgatcccggccccttcgtccctccggttgcattgcaaatagacggtccgcatggcccacacctgttggcactgggtcgaagaaaatggcgcagccaggtcggttacccgacgctcacacatggtggcttgtcgctgttggaagttctgtcgcctttcatagaactatcgaagtaggcatatagccttcgtagagaacatgcgcgaacagtcgtgcacgcaagaaa

SEQ ID NO: 630461 - DNA, 415 bp, Homo sapiens
  misc_feature (172)..(172): n is a, c, g, or t
  misc_feature (233)..(233): n is a, c, g, or t
acacttattttatgaagcatctagttgcttttaggggaagggacatcctccgcatagtatcttaggccagctccactttcttctccttactgttgatttactctcatgccattgaatcttctgtgccaatgttggattaatgtttccgggcccgtactttcatcatgctccntctgtattatcacctgttttggtttacagcaatgatttttaaggtaaggcatggtgtgtcncatcatagtcacatgggaactttttcaagccgatattaaaaatgtcccccattcatcattctgcccctggaacagtgtgtgcagttgggaccttcatgtaaatctactttgttgaaacccactgatcagcatggtgtatttcataactctttgacttacattcaagaaattccttaacctga

SEQ ID NO: 630462 - DNA, 930 bp, Homo sapiens
  misc_feature (217)..(217): n is a, c, g, or t
cttatttatcccgcgccgcggggtattctttcagaactcctgtgcccatgctgtcctggtggtcgcccccccccgctggggggactgcccccccctgggtgtgttccacaaccgccgtcggttgtgtccgcccggcctttggatatttccgcgggaccccttctggcccagggggtttccctctgtcccccccggttggaccccgctgcgcttcccntgtgagtccgctgggttatcccccggcaataacttgcccggtcgttagaacgagaccgcccccatgttagagggatactgtcctctactgcgtcgtaaaacagtgtggccggcggtaacaactgattatgagcactccttcttgggaaatcatcataccaaacacgttacccccactggcttatcaaattgacccagaagttttcccagggtaatttgggtgtaaaaaaaaaatcctcgcacgcctcttccctatgaaatatctgttgttctataggcaccgcagtaatttgttacaccacccgtgataaataacttggtcttcttcatttgtaaccccacttgctttatgagcttttttctaaaagttcatcattttattttatgaggtataatgactccccctgtgttgacttcccacatcacagccctctctttctaaaaatcttttcgtgaacatcccacccccctcctcgacttagcctcccctcaacaagacaacacatcataacagtatgcacccaccactgtgttttctacaagaagaatatactgatttttatgatatcagagggccaattcacaaccactccactttggagccccctaaatcaatatactggaaacaacaaaagccaacttttcatgagcccaacaagattaaaaggcaaagaaataggggggaaataaacaaaaaaggcaaaccacataaca

SEQ ID NO: 630463 - DNA, 1057 bp, Homo sapiens
accagcaggtgcaagaaaaatatgcagactcaccgggagcctcatcaccagaacagcctaagaggaaaaaaaaaaaaaaaaaaaaaaaaaaaactttttgggccccccgggtttaaaattggccctggaaaatttttaaacccctggtggggggcggggcccccaagtcagggaaagtggtaacggggctaaaacaggcggttcccatagagagaactccgtggcaataagaaacgctgcttgggactttcctccccaaataaaaaaaacgccgggggcaaccacgagcgtgtgtgtgaacaaacccccaaatgggaaggttccgcgaagggccacattacggggacaactaatccaagcgggagtccaacggcgagagcccggataatcaaaattacgcccccgtacggggataaacgaaacaaagagcgaggggacgaacagagaatagaaacagcgagaagcgaagacgagataaggagaaatgcaagacacaggcaaagaaagaggtagggagaagaaaagcggagcccgacacacgaagaaagagaagaggagagaacagagaaacaaaacgaagccgaacagcgaccacaacgaaagggagcacaggagacggacctggacacagggagacgaaacaagagacccaggagcgaccaacgcgaggagaggaacgagagagaaagcaaacgacacaacacagaacaaacaacgaaacacaagaaaaagacaagcaccatgcgcaacacaaaaggacccgggcaaagcacaaagacgacccgacgagcacgacactagagccgaactcagaggacaaaggaaccgaaggacagaagctgacgaagcaccaagctgagacgaagcgaatcacaagaagagcaacgagtcgagcacacgcgaacgagagaacacaagacaactaacgagaaggaacaagacaggacgaaaagcaaagaacaagagcacaaacactctccacatacacacacaccacaccaccaaagcaacacatagcaaagtcagcagcacgacaacacacaaccacacgaccaca

SEQ ID NO: 630464 - DNA, 300 bp, Homo sapiens
  misc_feature (196)..(196): n is a, c, g, or t
  misc_feature (212)..(212): n is a, c, g, or t
  misc_feature (250)..(250): n is a, c, g, or t
caacgctgtcgaggagagaagcataggcgggtttcaacttatgaacgggaagtacatctgaaagcatatgccaagtagaaacaaatttcttcccttccttacccttcagaatatatactgtcatacagctttacaagttccatgttcttttctatattagtttcatattttgattacccattctttaggaactctngctctatgaagcatcntgttccaacaacagtataaactgctgagcgtttacacncgaatttccagaatttgtgagctcgaaatttacaacggtatattcgtctg

SEQ ID NO: 630465 - DNA, 83 bp, Homo sapiens
acatctgtatatttctgcgccagcgcccgggacagaattcccacgagcagtacttcgggccgggcaccaggctcacggtcaca

SEQ ID NO: 630466 - DNA, 330 bp, Homo sapiens
catgatacgaaccgagctagtaccgaaaatacggtccttcgtacgggaggaattgaaggtaatagataatgcgaggcggatactccggtgtgaactcggatcacatatagactttaactcagtgaacaaacgaagctcttaatagcgcgctgaccatcgggatgtcctgatccaacatcgaggtcgtaagacctattgttgatatggactctagaaaaggattgcgctgttatccctagggtaacttgttccgttggtcaagttattggatcaactgagtatagtagttcgctttgactggtgaagtcttagcatggacacgaatgttca

SEQ ID NO: 630467 - DNA, 377 bp, Homo sapiens
  misc_feature (288)..(288): n is a, c, g, or t
  misc_feature (294)..(294): n is a, c, g, or t
  misc_feature (345)..(345): n is a, c, g, or t
  misc_feature (355)..(355): n is a, c, g, or t
gatggacttttaggttgattccatgtctttgctattgtgaatagtgctgcaatgaacatatacatgtgtgtctttataacagaacaagttatattcctttgggtatctacccagtaatggggctgctgggtcagaaggtatttgtttttcggtctttgaggaagaaccacaccgttttccacaacggttgaactaatttccactttcaccaacagtgtgtaagcattcctttttctctgcaacctcgccagcatctgttttttgtttgttttttgagacggagttttncttttnttgcctgggctggagtgcaatggcacgatcttggctcatcgcagcctctgnctcccggggntcgggtgattctcctgactcag

SEQ ID NO: 630468 - DNA, 882 bp, Homo sapiens
  misc_feature (87)..(87): n is a, c, g, or t
  misc_feature (122)..(122): n is a, c, g, or t
  misc_feature (148)..(148): n is a, c, g, or t
  misc_feature (882)..(882): n is a, c, g, or t
gatataggacgttataggaggacgggtagagtgaggacgagagcgttgtcgattccggttctaacatgtgtaaggtccttatccccnaacagacacaaaatcagggatcttcctttactcgnacaacctagctcccctaccagatcanaaatttctatctggagaacctctgcggacaaaccgagtgcttcctgcatttccaagttaacgaagacacagcacagcagcacaagagagtgaacattctgccaaccccaccagtgatgaaaattaactgtgggccactcgctgcacaaatgtagatgaatatgtattctcacctctcagaggacaggatcactccagtttgtaagaacgaagaccactttaataagctgcgttctataggccctcatttttataactcgaagttctgctattccaaacagcgagactccctaagtgagcccttacaactctcgggcgtgcatattaagtctgagtatttctgcggacttccactcgccgcaattaaagaaccgattatggtttagggtccgaaaacctggagctctcggttggatcaggccgcggcacacgtgcccggttctctttgtattgagtttttggttgtatttcttgctgaatcgttctttttgatcgggcaatagaggctgcgttaggtgactgtccgctttactcgacacctgtctcatatctctatcgcctcacacacgtcgcagaattctgtctgcgacagactaagcttgaccaattaaaaccttcactaactagagaagatgtgaactgttgtggtcgagatggttagacgcaggggcgccctgtcagagccacaatgtttgacacttggccccgcgcgaccttatgatgaggatcaatctn

SEQ ID NO: 630469 - DNA, 106 bp, Homo sapiens
gagagctgttccactgtgggtcatgtctggccaggcttagcctctgaacttccaacttctctggtttaatctgatcctaacccatcttggagtctgatctctcgaa

SEQ ID NO: 630470 - DNA, 316 bp, Homo sapiens
  misc_feature (41)..(41): n is a, c, g, or t
  misc_feature (77)..(77): n is a, c, g, or t
gagaaaatggtcattcccttgactacctgatacgggtttgnctgtgtccccacccaagtcttattttgaattgtaanccccataattcccacatgttgaaggagggacttggtggtaggtgactggatcatgggggtggtatcccccatgctgttctcatgattgtgagttctcacgagatccaatggttttatacatggtagtctctcctgctgccatgtaaaacatgcctgcttccccttctgccaggattgtaagtttcctgaggcctgcccagccatgtggagctatgagtcaattaaacctctttccttta

SEQ ID NO: 630471 - DNA, 140 bp, Homo sapiens
  misc_feature (33)..(33): n is a, c, g, or t
  misc_feature (50)..(50): n is a, c, g, or t
  misc_feature (70)..(71): n is a, c, g, or t
caatggggagttgaataaaaactatatattgangaacttaaaggtaatanaagttttaaaaaattaatgnnagctaactcaagctaatacaagctaaaaattcattaaaattactttgattcatttctcaaatcaggaat

SEQ ID NO: 630472 - DNA, 320 bp, Homo sapiens
tgaagcaggaggaagagagagaagggggaggtgctacacacttttaaacaaccagatctcatgagaactcaccatcacaagaacagcaagggggaagtttgcccccacgatccaatcacttcccaccaggcctgtcctccaacattgggggttataattcaacatgagattggggcaagaacacaaatccaaaccatatcaggctgggcacagggactcatgcctgtaatcctggcactttgggaggccaaagcggaggattgtttgagtccaggagtttgagaccagcttggtcaacatagcgagaacgactcagtaaa

SEQ ID NO: 630473 - DNA, 497 bp, Homo sapiens
ccctaagggtatcacgagatggataaagagtagtacatggaatagtatatactacacatgtatacttagagtttaagtacatctccgtatataatacatacatttagataaaatataaaatgagtatttcaaatcatacagttaactagtgcacttctaggaatatatggcgaataaggatgagtaaatctactgatggaattaatactagccaaaatagatagctaataagataatcatgcaaactaataaataagtagtcatctgagataactgcttagaagaaaagagagatgatacttagagagcaccacaacaaagtcagccttacttagacagtagagttgcattgaatagggacacggataatgctgagcgcacagaaccagcaactcgtaatgtgagcataatgtaatatttgactaacagtctaccagagacaagcacagtaactagcaagtaacatcaaatatttatatcccctaactttatatgac

SEQ ID NO: 630474 - DNA, 110 bp, Homo sapiens
acgacagaagggaaagctcttccagctataccccaggaacttcctgcgctagctgggccggggaggggcggcctgccctcatctcatttctattaaacgcccttgccagc

SEQ ID NO: 630475 - DNA, 230 bp, Homo sapiens
cgttgcaacaaactacccctattctagccggctgcaccatccggcgatgtctgcatccaacatcgacggtcggtaaaccctattgttgatattgactctgacaatatgattgcgctgtttatccctacggtaacctgttccgtcggtctatttattggatcaattgagtttattcattcgctttgactggtgaagtcttagcatgtactgctcgcgacgttgggttctgc

SEQ ID NO: 630476 - DNA, 245 bp, Homo sapiens
gcggccgcctactactactaaattcgcggccggtcgactgcgctcccagtcgggttgcttggctatcgtgtgagtccttacagcagcgtcatgatgatgctgccctttgtcatgttttcctcggcccagataggacggagattggagaggtcgttcgcagcaactcgctcactggcgcgggaaaggtcaaatgaggcgagcgggatgatatggtcaacatgccattccgatctgttctcccaaga

SEQ ID NO: 630477 - DNA, 960 bp, Homo sapiens
  misc_feature (28)..(28): n is a, c, g, or t
  misc_feature (36)..(36): n is a, c, g, or t
  misc_feature (41)..(41): n is a, c, g, or t
  misc_feature (64)..(64): n is a, c, g, or t
  misc_feature (69)..(69): n is a, c, g, or t
  misc_feature (287)..(287): n is a, c, g, or t
  misc_feature (304)..(304): n is a, c, g, or t
  misc_feature (308)..(308): n is a, c, g, or t
  misc_feature (312)..(312): n is a, c, g, or t
  misc_feature (359)..(359): n is a, c, g, or t
  misc_feature (369)..(369): n is a, c, g, or t
  misc_feature (375)..(375): n is a, c, g, or t
ggcgccacttggcctgcctccgtcccgncgcgccanttggnctgcctccgtcccgccgcgccanttggnctgcctccgtcccgccgcgccacttcgcctgcctccgtcccgccgcgccacttggcctgcctccgtcccgcctgcgccacttggcctgcctccgtcccgccgcgccacttggcctgcctccgtcccgccgcgccacttcgcctgcctccgtcccccgacccgccgcgccatgcctgtggccggctcggagcatgccgcagccggcccttgccccccgncgcacaggagcgggacngccngagnccgcgtccgccgcacggggagctgcagtacctggggcagatccaacnacatcctccngctgcnggcgtcaggacaggacgactcgcacgggcaccggaccctgtcggtattcgtgcatgcaggcgcgctacagcctgagagatgaattccctctgctgacaaccaaacgtgtgttctggaagggtgtcttcggaggagttgctgtggtttatcaagggatccacaaatgctaacagagctgtcttccaagggacgtgaaaatctggtgatgccaatggatcccgagactttctggacagcctgggattctccaccagagaacaaccgggacttgggcccagtttatggcttccagtggaggcattttggggcagaataccagagatatggaatcacgattattcaggacaggcagtcgacaactgccaacgagtgattgacaccatcaaaaccaaccctgacgaccgaagaatcatcatgtgcgcttggaaatccacagagatcttcctctgatggcgctgcttccatgccatgtcctctgccagttcctattgtggttgaaccagtgagcttgtactgccagctgtaccagagatcgggacgacatgggccctcggtgatgctttcaacgtcgccaggctacgcccg

SEQ ID NO: 630478 - DNA, 118 bp, Homo sapiens
tcgtctgtaggaggcaagagtgtaacagcaggacttggcggctgtgaggatgtggggaatggaggaagacaggggccctaggggtccctgagctggaccagggggtgaacatgttgtg

SEQ ID NO: 630479 - DNA, 276 bp, Homo sapiens
  misc_feature (217)..(217): n is a, c, g, or t
cagggatcttttcccctcaaagaaaaagaaaaagaaaaaaagactgtcattttcttgagcagctttcttgagctcggtgttgtgtatgcctatgtctggggcatacactaggactctggcaggcccactaaactctaccacgtatttgccagatatgctgtacactgtcacctggaagtcgggatttactcttttatttttctgtttattttgcatnagtactgtatgtattaaaaagtagccccatatcgattgtccaagggtttcctagaaata

SEQ ID NO: 630480 - DNA, 124 bp, Homo sapiens
gtcacacagacgtaaacacacacacacacacacacacacacaagagggtcataaacccctctagtggcgccctatgagctactagacaagtgtctcctaaatcatgcggtagggtggattagta

SEQ ID NO: 630481 - DNA, 169 bp, Homo sapiens
ccaacgcaggggcctgggggctcccaaagcctttggcttcccggttccctcccggccctgcctggagcttcatgtgcctccccttttgcttaatgaaaacccctgtttaaaagttaagggttttttgggtgacgtttaaccataataaagggggctgcttttttaagga

SEQ ID NO: 630482 - DNA, 1086 bp, Homo sapiens
aggggttttgtctgcggctcgtcctgctacatttcttggttccctgaccaggaaacgaggtaactgatggacagccgaggcagccccttaggcggcttaggctcccctgtggagcatccctgaggcggactccggccagcccgagtgacgcgatccaaagagcactcccgggtaggaaattgccccggtggaatgcctcaccagagcagcgtgtagcagttccctgtggaggattaacacagtggctgaacaccgggaaggaactggcacttggagtccggacatctgaaacttgatctccagcaccctgccggtggcactactgagagacgaggtgccagggtggttcctgaaagtgcctgagccccaacttatcagcaaggagctcatcatgctgacagaagtcatggaggtctggcatggcttagtgatcgcggtggtgtccctcttcctgcaggcctgcttcctcaccgccatcaactacctgctcagcaggcacatggccacaagagtgaacagatactgaaagcggccagtctccaggttcccaggcccagccctggccaccatcatccacctgctgtcaaagagatgaaggagactcagacagagagagacatcccaatgtctgattccctttacaggcatgacagcgacacaccctcagatagcttggatagctcctgcagttcgcctcctgcctgccaggccacagaggatgtggattacacacaagtcgtcttttctgaccctggagaactaaaaaatgactccccgctggactatgagaacataaaggaaatcacagattatgtcaaatgtcaatccagaaaagacacaagcccagttttctggtaattttgtcaaccctggtctgtctgagccaggcggaatatgaacaagggggcatgtgaattccaaattttttaagggggccagttctctatggatcctacatttaattggggggaaatgcctttttccccctaaacaagggtggggctcacaagctatggaaacaggccaaaagaatgggggaaagaagactggtaaatacccagagggcctcaggaaccatggactctg

SEQ ID NO: 630483 - DNA, 943 bp, Homo sapiens
aggggttttgtctgcggctcgtcctgctacatttcttggttccctgaccaggaaacgaggtaactgatggacagccgaggcagccccttaggcggcttaggctcccctgtggagcatccctgaggcggactccggccagcccgagtgacgcgatccaaagagcactcccgggtaggaaattgccccggtggaatgcctcaccagagcagcgtgtagcagttccctgtggaggattaacacagtggctgaacaccgggaaggaactggcacttggagtccggacatctgaaacttgatctccagcaccctgccggtggcactactgagagacgaggtgccagggtggttcctgaaagtgcctgagccccaacttatcagcaaggagctcatcatgctgacagaagtcatggaggtctggcatggcttagtgatcgcggtggtgtccctcttcctgcaggcctgcttcctcaccgccatcaactacctgctcagcaggcacatggatgacagcgacacaccctcagatagcttggatagctcctgcagttcgcctcctgcctgccaggccacagaggatgtggattacacacaagtcgtcttttctgaccctggagaactaaaaaatgactccccgctggactatgagaacataaaggaaatcacagattatgtcaaatgtcaatccagaaaagacacaagcccagttttctggtaattttgtcaaccctggtctgtctgagccaggcggaatatgaacaagggggcatgtgaattccaaattttttaagggggccagttctctatggatcctacatttaattggggggaaatgcctttttccccctaaacaagggtggggctcacaagctatggaaacaggccaaaagaatgggggaaagaagactggtaaatacccagagggcctcaggaaccatggactctg

SEQ ID NO: 630484 - DNA, 349 bp, Homo sapiens
cccccctgggaattgtaagaaaataaggctgggcacagtgactcacatctgcaattccagcactctgggaggcccaggtgggcgggtcacctgaggtcaggtgttcgagaccagcctgggcaacatggtgaaaccccatctcaaaaaaaaaaaaaaaaaacggtgaggaaattaaaacgccttattagtttgaagccaccccacttcaactttttgttagggcagcagagcttgacaaattctgttgacgctgggaaagtgttggcattacagggcccttgggggtctcttggccggtcaaattccagcattctttcatttgacccacagggttgagattgacttttga

SEQ ID NO: 630485 - DNA, 870 bp, Homo sapiens
  misc_feature (255)..(255): n is a, c, g, or t
agcggggggccgcaccgtaaatgggtgtcgactttcctccagtccactctgcacccaagctcagcgggcgcacttttctgatcttgcgcataccctctcaatttattaacacggttgcacgacggaaacagttacgtagttttgcggaagtgtagaatactgctcggtgccgcgccatggacggctaagtgcttaccgcgaaacatgtggaatccctgagtctcccgcatgcttggagcgcaggttggaggtagncgtagataagaatacttggtagtttgcttatatagcatttgcatcgcaaagtcacgtagccttggcatattacattcgtgggccaaagagcaaagcgggggaacataattcacgacagtttcattacttcaatatactcgaagttgtcatgaacgagaaatcgtccaatgagaatggtgatataagcaggaaatacataatggtaatacaaagagacgggaaacgtttgcaagtttattatactcaagagcatgagaaatacagtagaataacagcagggactgcaactatactttggataaacggaataagaactatgaaagaagaaagcatgatgggcatggtttcatgaacacgtaatacgaacgctctcaattccattctccgcaacagtaacgagatgtgtctgcaaagtcacatgtgcgttaaacatacaggttgttcatgaatggcatagcatgagccaaacttggtcagctccccagtcacgttccaggcatgtcaaggaacccagatcataatctactttctcagcccaaggagcatagcatgttcagaagcatcagcaggaggcaactaatgcacaaagttggcatgcagttgagacacattggg

SEQ ID NO: 630486 - DNA, 273 bp, Homo sapiens
tcctggatcacgctgcagcagctcctcatggatcaagagtgcacatcagctacaccagatggccttcccactggagctgtataccatggtgattcaaaccggcttgagtggagcacaaaagtttataatgtactagggcattggctaggacaaggtaatcctactcatgtggaacaaaatgcaagagcaagacgtagatcccaaacatcagacagcctacaggaacagctaaaactaggcaacctacctatcaggcaataactaataatccta

SEQ ID NO: 630487 - DNA, 745 bp, Homo sapiens
  misc_feature (14)..(14): n is a, c, g, or t
  misc_feature (63)..(63): n is a, c, g, or t
  misc_feature (75)..(75): n is a, c, g, or t
  misc_feature (132)..(132): n is a, c, g, or t
  misc_feature (150)..(150): n is a, c, g, or t
  misc_feature (281)..(281): n is a, c, g, or t
  misc_feature (634)..(634): n is a, c, g, or t
  misc_feature (665)..(665): n is a, c, g, or t
gcctgaaaaaggcngacgacaggaactgagaagctggcagtaggtcctgctactgctgcaggngcggcgggcgcntgggtgggccacgaggcagggacagccgaggctccgcgctcaccccacccgcaaggnccaagcgcagactcaggngagccagaggggccggaccgctgagcaagggctggggaaggatccacgcttggatacttgggagtgaagatgtgttatttcacccaccgactcgttccacacgaccaaggcctgtgcctgccctgagggcnagttggttgagccttgtacagacaactctcagagcgtgggcctgggccgaacctttccctgtgagcagcagcatcagcgtctagaacgacggccctcccggtccacggtggaaggtgcggagctcccgtggtgtgctggcagcgattcgcagaagggagatggagggccacagggcaggtgctcgcacggagtcatcgaggtccagggacaccttcctcccaggtgagctcacaaaggcaccacacattaatcctgggagacaaccattctgatgtgctaaggccatcgacagggaacatgattgtcaggaaacctcaacttttcgataaatgacagcaaaacctgaatgcangagaaatgtatctcattttaatgcctgactnctaagcatccttattcaacatattatatgtattttttgtttcatgagtaaaatgtacattgagcttcaacaaacaaaaaa

SEQ ID NO: 630488 - DNA, 258 bp, Homo sapiens
tacttttccacaggagatggaggttgcagtgagctgagatcactccagcctgggtgacagagtgagacttcatctcaaaaaaaaaaaaaaaaaaaaaaaaaggaaaaaaaaaaaaaaaattaaaagttgctgattaattattattattctaattgatctggttttcccaattctgcaaacattctgattggctatctgccactcttaccttgaaaaattcttttaagaaataacccttagctttaagatagattgcct

SEQ ID NO: 630489 - DNA, 844 bp, Homo sapiens
  misc_feature (14)..(14): n is a, c, g, or t
  misc_feature (63)..(63): n is a, c, g, or t
  misc_feature (75)..(75): n is a, c, g, or t
  misc_feature (132)..(132): n is a, c, g, or t
  misc_feature (150)..(150): n is a, c, g, or t
  misc_feature (281)..(281): n is a, c, g, or t
gcctgaaaaaggcngacgacaggaactgagaagctggcagtaggtcctgctactgctgcaggngcggcgggcgcntgggtgggccacgaggcagggacagccgaggctccgcgctcaccccacccgcaaggnccaagcgcagactcaggngagccagaggggccggaccgctgagcaagggctggggaaggatccacgcttggatacttgggagtgaagatgtgttatttcacccaccgactcgttccacacgaccaaggcctgtgcctgccctgagggcnagttggttgagccttgtacagacaactctcagagcgtgggcctgggccgaacctttccctgtgagcagcagcatcagcgtctagaacgacggccctcccggtccacggtggaaggtgcggagctcccgtggtgtgctggcagcgattcgcagaagggagatggagggccacagggcaggtgctcgcacggagtcatcgaggtccagggacaccttcctcccaggagtgtgtgtacagtgatcacttgctgccataacacagtcacagatctacgtgtgttctctgactctcagctggggctccatcggggcctgctctgggctcacctgcgtgaccactgggctcagcttcctcgtctgagaagcatcaggactggccttcccacccccgcgttcccagggcttccacactcctttctagccatgagtcagtcctcagtggatgaccagtggcctggggtggccctctgattctctcacctgtactcagggggctgaacctcactcttctctgccaaaaccaaccaatgaataaataaacaaacaagcatggaattcctaaaa

SEQ ID NO: 630490 - DNA, 128 bp, Homo sapiens
ggcaggtgggaagacacttaataccaggagtttgagacagcctgggcatggtggcgggtgctatagttccaactacaggaggctgaggtgggaggaccacctgagtctgagaggtggaggttgcagtg

SEQ ID NO: 630491 - DNA, 242 bp, Homo sapiens
tgttcttgaggtccctttttccgctcactggagtccgagactggtgactcgatgcgggccggaggctgctggcctgggcgcggatgctattgcccccaccgctccgggtgttcatggagtctcgtgaagctggagtgggagcaagacaacatgagggcagccctagatctgtgcgaggaggccctgcggggctattaggacttccccaatggctgtggacttatcaatgcgggcacgatcga

SEQ ID NO: 630492 - DNA, 723 bp, Homo sapiens
ggtagtagccatggcggacatgagtttgttgcggcgggtttcggtttactgcggtggcagctctgtctggaccggcgcccttggcactgcgcctcggacttgggggcttcctcactcgtggctttccgaaggcgtgctgcgttcctgttcgacacagctggagaccatgggaaaagactattggtcatcagaccttcgtagagttctatgacaggcgtctttagaaggttgattgatgattctacattgcatgactgggattccagtagcaatttgcataacatctggtgaatgtattcatggtcaagctgaactagcagaaagttccagaaggctatgtcgccagaagcactgggaatattataagcatcccatatcaagatggattgcccgtaattgtctatgatagtggcgtgaaaagatatatgaacagaactaggggcgtccttcagattgaaggtgaaagaggtgaattacgggtagaggagctggaagatgcgaagaattgagtgcatgtgagaggagatggaccctggtattactatgagacaatgacaggggaacttatggatcatgctccgaaagcaatcctgaaatgacgcattttgttctccaaatacaaagtatattctctttattgggaaataagtttataaatatttgctgtatcttgtctcgtgaagaacagagagcgtctgacattatgttctcaggtggtcaaat

SEQ ID NO: 630493 - DNA, 121 bp, Homo sapiens
gcagagtcctgggaactgagacagggggcttgacgagatcaggaggaagttacatggcacaaaataaggggagcaggagaggggaggcacgctgggggtcttccttgtgtaacctgtccta

SEQ ID NO: 630494 - DNA, 123 bp, Homo sapiens
caggtatattacaccagagccattaactcttgtagctctcatcaacattaactggtttgctttcatgacgctgctgagtgaatcagttctttctgcacaggttcaagtgaaatgcttttctgc

SEQ ID NO: 630495 - DNA, 458 bp, Homo sapiens
  misc_feature (6)..(6): n is a, c, g, or t
  misc_feature (72)..(73): n is a, c, g, or t
  misc_feature (75)..(76): n is a, c, g, or t
  misc_feature (80)..(80): n is a, c, g, or t
  misc_feature (94)..(94): n is a, c, g, or t
  misc_feature (96)..(97): n is a, c, g, or t
  misc_feature (101)..(101): n is a, c, g, or t
  misc_feature (103)..(103): n is a, c, g, or t
  misc_feature (114)..(115): n is a, c, g, or t
  misc_feature (117)..(117): n is a, c, g, or t
  misc_feature (125)..(125): n is a, c, g, or t
  misc_feature (136)..(136): n is a, c, g, or t
  misc_feature (138)..(138): n is a, c, g, or t
  misc_feature (148)..(149): n is a, c, g, or t
  misc_feature (155)..(155): n is a, c, g, or t
  misc_feature (160)..(160): n is a, c, g, or t
  misc_feature (165)..(165): n is a, c, g, or t
  misc_feature (175)..(175): n is a, c, g, or t
  misc_feature (179)..(179): n is a, c, g, or t
  misc_feature (184)..(184): n is a, c, g, or t
  misc_feature (186)..(186): n is a, c, g, or t
  misc_feature (189)..(189): n is a, c, g, or t
  misc_feature (192)..(192): n is a, c, g, or t
  misc_feature (200)..(200): n is a, c, g, or t
  misc_feature (203)..(203): n is a, c, g, or t
  misc_feature (205)..(205): n is a, c, g, or t
  misc_feature (210)..(210): n is a, c, g, or t
  misc_feature (219)..(219): n is a, c, g, or t
  misc_feature (221)..(221): n is a, c, g, or t
  misc_feature (225)..(225): n is a, c, g, or t
  misc_feature (227)..(227): n is a, c, g, or t
  misc_feature (232)..(232): n is a, c, g, or t
  misc_feature (235)..(235): n is a, c, g, or t
  misc_feature (238)..(238): n is a, c, g, or t
  misc_feature (240)..(242): n is a, c, g, or t
  misc_feature (246)..(251): n is a, c, g, or t
  misc_feature (254)..(255): n is a, c, g, or t
  misc_feature (257)..(257): n is a, c, g, or t
  misc_feature (260)..(261): n is a, c, g, or t
  misc_feature (266)..(268): n is a, c, g, or t
  misc_feature (272)..(274): n is a, c, g, or t
  misc_feature (276)..(278): n is a, c, g, or t
  misc_feature (284)..(284): n is a, c, g, or t
  misc_feature (289)..(289): n is a, c, g, or t
  misc_feature (291)..(291): n is a, c, g, or t
  misc_feature (297)..(297): n is a, c, g, or t
  misc_feature (305)..(310): n is a, c, g, or t
  misc_feature (313)..(315): n is a, c, g, or t
  misc_feature (318)..(320): n is a, c, g, or t
  misc_feature (324)..(328): n is a, c, g, or t
  misc_feature (337)..(337): n is a, c, g, or t
  misc_feature (341)..(341): n is a, c, g, or t
  misc_feature (346)..(346): n is a, c, g, or t
  misc_feature (350)..(352): n is a, c, g, or t
  misc_feature (367)..(367): n is a, c, g, or t
  misc_feature (382)..(382): n is a, c, g, or t
  misc_feature (454)..(454): n is a, c, g, or t
gccgcntttgcaacttcaatgccaagctcacgtctggctgcgaccgtggcaggctgtggcatccccgacagnnannggtngaggaagtatgganannggtngnaccgctcactnnanattcacanaacatggcaantncgccttactnntcatgncagtnattcntcctgtacancttnatttnanganaanattgacangananggaancgaactccntncccngnggggnganagncnnncaannnnnncgnncnggnngccgnnncccnnncnnncggcgnggagncnggattngtttattnnnnnnggnnncannngcgnnnnnagcccgcanacanaacgnaaannnccccccacccaaacncccgaatagctcgancaaaagacctaaggggaacgaaaaaccgcaaaagcaaaaagcagcccaaagcccaaggaacaaaaaagccanacgc

SEQ ID NO: 630496 - DNA, 843 bp, Homo sapiens
cggaagaagtggcgaagttacttttgagggtatttgattagctggcggtgtgtcaggggctaaataggaggacgaagaaaagcagagcaattgggaacccagggcaactgggagtagttcgctccgcgagagggcgtccactatacccccgcgcgcagacatgagccccgcccccacgcatgttgcttggacggaggggcagggactctgtgctgagaggctgcatccgatagcaactccaacctatgtctctctcgcgtaccacagagttccccgtggataccacacccttgaccgtggtaaatggtcaggaacatcaggcgctggagcaccgttccttctatcgacccaatctgtaaagtgagtgacggcgtcctggatccagtggaccggggagtccgggaacctggattgttccccaggcagtgatgaggccaggtcaggcctgcaggcaacaagactggtgtcggtctccaagatcgccgaagataaggaaccaggaagcgcgaaggcgaccatgaagtggcccagcagaccgaaaaaattgcttggggactaacgcacgctttttggcgtgctctgtggggacaacggacctccgaggtatacactaataacgcaggtgctcagcttgtgaaagggcctgacaggacgtttttgcccgtccgccagatgttgagaccgtggtgggaggccaggcgctatggcttgacgggggtggtagcacactggctcatggacgcttacatgcgggcaaaaagtaggcaggcagtgccggcatgtgcaatgatgcagggggccagatcacggacagtctctttctgaaaacgagcccgaaagaga

SEQ ID NO: 630497 - DNA, 764 bp, Homo sapiens
agcggatctacaaaaaccttactttatggtcaaacattaaaattgagtaaatatatctataaggatttattaagaattgggtttaacattaatagcatactaactgtaaaggtgaaattctggcttattctggtataaacaatcgctacagaaagcattgtcaaatatgagatggtgtccggtctcttcctttaggctactatttgtactaacatatgttattggtactgtgtcccaacaatcatgtgaaactcctatcattctgatatgtcttagctgtatgttatcagctaataactatacattgttcatgttaacattcattcgtgtgctacagaggtaacagatttccctgtcaactcgctcgctctcgtctctggtcctctcttagcaacggtgctccttgaatgcaggtccctacactacgcttgtggagattgtgacatcacgaatacgacggaaaaacattcaggtactcttgaaggaactaaacatacttcacttaatactcaacgcaggattgggaacttacactgcactgaagctgaactgataggacgattgaacgtgactcttttcgactttctcgctctaaaagtgttcctgatcctatgttcgctcttctgcagagtcaagggacgcttttcttcttgtgctattaaacacgattttaacaacttaagtaaagtatactcctatgagcagaatttggagcatataggttgctctctgccttgtccctctaagaatctggaaactcatct

SEQ ID NO: 630498 - DNA, 180 bp, Homo sapiens
tagaggatcccctcgacgcctcacggcgaggcggatgggctggatgtgctgctggccagcccttccgcgctcgatacccggtggctttccgactggtacccggacaagggcgtcacgctcgccgccacactgggctacgcgggcgggccgaaggtggccagcggtgagatgggggtaccg

SEQ ID NO: 630499 - DNA, 496 bp, Homo sapiens
aatgaatatttcaatgaagatgcgttctgctgctaatagcaggaaatcccatctagtggctttatttttctttaacccgttatctcacatagccgatagatccaaggctgggcatctccagagttgctcaactcagcaggccagtggcatcaccagcgaccctggaacttcatagctcatctctttatcacacacagtatgtcagctttcctgagatggtagggtgacccctgcagcagctttaggtttgttattttttcccaacaactcccaaaggcaggaaaaggatactcctttttcctgtgtgcctttataaggagcaactaaactgtttccagagtgttcccagtaccccctttttcacacattggaatgaccgtgggatcacatgggctcagacaagccaggattcaacctttgcaaagtgggcctgaggcacatgggaaaaaaaggagcaaaatcatgtattttaaaaaataaaaaaatggtggatgga

SEQ ID NO: 630500 - DNA, 252 bp, Homo sapiens
tcctctgtatcacggctatagctttatagtaagatactctttacggactccacccccttagtgagtcttaaagccatgtcgaagcccccatcgctgggtcaatagtacttggccggcagtactcctttaaaaaaactaaggcggctatggtataatacgcctcaactcatctatcccctgaaaaaacatagctacccttctgtatatcctatgaggataatatataagctcatctgcctacgacaaacagac

SEQ ID NO: 630501 - DNA, 152 bp, Homo sapiens
  misc_feature (31)..(32): n is a, c, g, or t
  misc_feature (71)..(72): n is a, c, g, or t
cacagtcgtcatcaacattaccacagtatannatggtagtcctaagccactgatgacctgcttgaatatannacacccagaggagagtggctgaaggcacacaagcaagtttctgacttgaagacacatcctgtggactataggctaccaca

SEQ ID NO: 630502 - DNA, 430 bp, Homo sapiens
  misc_feature (198)..(198): n is a, c, g, or t
  misc_feature (203)..(203): n is a, c, g, or t
tgggcggcgctggtctttggccctctttgccctcttcaggatatggaactaacactcctagctccactgtctcatcatcatgctcctcacaggaaaagctgcatcagttgcctttccagcctacagctgatgagctgcactttttgacgaagcatttcagcacagagagcgtaccagatgaggaaggacggcagtccnccagncatgcggcctcgctcccggagcctcaggtgagggtgctctctgcccactgttccagtgcatgtggatttcagcttgtttgcataacacagaggtgggcacactatgctataaagggccaagatagtaaatatttttaggctttataggccatatatctctgtcacattcctcaactctgctgttgtagtatgaaagtatccacaaataatatataaactttatttac

SEQ ID NO: 630503 - DNA, 106 bp, Homo sapiens
tggcttccttcctgctgttctcaacctccaggtctcgttttggggtgagtcaggcttagcccatcacctgttacgctcgctctccgagaacatgcttcccgtcctg

SEQ ID NO: 630504 - DNA, 171 bp, Homo sapiens
atgtctgacccaccaaggggttggtgtacagatagtttgtcacacaggtaataagcttaatacctgctgagtagttttttgatctgcaccttcctcccaccctccaccctcaagtaggccccagtgtctgttgttcccttcttgatgcccttgggtgggtcagaacataag

SEQ ID NO: 630505 - DNA, 203 bp, Homo sapiens
tactctacacggatcccccgttatagcaccgtggtaaatatgtatgagcggacgctatagcggctgtgactagctatgttgacgtccctgttcatgctatggatcagctgatatttcgatcagtgagtaactgtggtttacctagccacagcagagcttctccacagctaggcttcaactacgtgagggggctatacggtcga

SEQ ID NO: 630506 - DNA, 545 bp, Homo sapiens
  misc_feature (30)..(30): n is a, c, g, or t
  misc_feature (191)..(191): n is a, c, g, or t
  misc_feature (214)..(214): n is a, c, g, or t
  misc_feature (223)..(223): n is a, c, g, or t
  misc_feature (278)..(278): n is a, c, g, or t
  misc_feature (290)..(290): n is a, c, g, or t
  misc_feature (292)..(292): n is a, c, g, or t
  misc_feature (302)..(302): n is a, c, g, or t
  misc_feature (317)..(317): n is a, c, g, or t
  misc_feature (336)..(336): n is a, c, g, or t
  misc_feature (375)..(375): n is a, c, g, or t
  misc_feature (383)..(383): n is a, c, g, or t
  misc_feature (395)..(395): n is a, c, g, or t
  misc_feature (406)..(406): n is a, c, g, or t
  misc_feature (417)..(417): n is a, c, g, or t
  misc_feature (460)..(460): n is a, c, g, or t
  misc_feature (475)..(475): n is a, c, g, or t
  misc_feature (484)..(484): n is a, c, g, or t
  misc_feature (505)..(505): n is a, c, g, or t
  misc_feature (530)..(530): n is a, c, g, or t
  misc_feature (535)..(535): n is a, c, g, or t
catcatcggcgcagtggggcatcggcattnccgtggtcatgatatttggcatgatctcacgtatgatcttgtggctgtgctatccgcaggaacccgaggatggtctagagtcagcttacatcctgagcaggaaagtttacccatgaagattggtgggattttttgtttgtttgttttgttttgtttggtgnttggtggttggttttttgccccnaattttagnattccttttgccttgctagataaaagctgaaggtactttatgtttgtcttttaangcttccttcaanantgacctttgnagttgagcggggggnttggtttgctttgggttanattttttcaggtggttggttttgcctgttatattaagcngaaatccngcaatgaaaggngctatatttgntagactctagncaagatattggacataaaagaatttttttgtctttaaataganacaaatgtctatccnctttaatcnagttggaacttatattgaagnccatttgatacataataaaaaattntggcnatgtcctgga

SEQ ID NO: 630507 - DNA, 83 bp, Homo sapiens
tcggaggtgaattcgtggcggatgtgcaccacggtttcggcgttcttgcgtgatgcctggatcagccgggcggcgttgtccgc

SEQ ID NO: 630508 - DNA, 273 bp, Homo sapiens
  misc_feature (145)..(145): n is a, c, g, or t
aggatccctttgggtgctttcagttatgcactacctcctgtgcattggtaacggtagaggaataaaaccctgtgtcttcttgccaatcaggtctcttactgggggcatggctcactgagccacactgacattagagctcgaaaancacttgtgagcactcattatatgaatcagtaaactcccctcctcccccagtcttatcaggggcaagcccttctttggaatttctggagtgaagcgactcttgccagtgagctggcaccaggggctgtg

SEQ ID NO: 630509 - DNA, 284 bp, Homo sapiens
gtgtcgggagggtttctaacaattttacctttgggtacactggggtggcagttgcgcaggacggggcaggtttgctcccctccagtccaagacaagtgctgactgcagaaaggatttatctgctggtatttgaaaagctttccctgatgcaacggccccagacacttcctgggagttctgctcgctgccatggcgaaaagctgaagtgaggaagtgactgatcccatctctggcatcatggtcctaagaaattgctggaaatgctttcctcattaacagcgact

SEQ ID NO: 630510 - DNA, 326 bp, Homo sapiens
  misc_feature (39)..(39): n is a, c, g, or t
  misc_feature (73)..(73): n is a, c, g, or t
  misc_feature (113)..(113): n is a, c, g, or t
  misc_feature (133)..(133): n is a, c, g, or t
  misc_feature (152)..(152): n is a, c, g, or t
  misc_feature (210)..(210): n is a, c, g, or t
  misc_feature (229)..(229): n is a, c, g, or t
ccaataaatagttccggcgccggtgttgagagcggtgtncgtaggtgttgtagccgccctggtgaagttcgcnttgccgcggccccggctagagacctggcctgttccctgcntccgtgacccggagagcttncggggtgcgtcaagccccncgcctgaggcaggcggtgacccgtaactggtttgtggcctgtttgattcctgtcagangtttgctgacccaagacantatcgaaaatgcatattaagtcaattattctagagggattcaagtcctatgctcagaggaccgaagtcaatggttttgaccccctcttcaatgctat

SEQ ID NO: 630511 - DNA, 205 bp, Homo sapiens
  misc_feature (204)..(204): n is a, c, g, or t
tacacatggcggaaactggattctggcaaccaggagaccccgacgctggtttgaaagtaccttttctgggagggggcctttcagcatgtgggcaaaaccttcaatcagggcaagattttcaagtggacattttttgccctaacctaattgcctgcccctgcccttcagggaaatgggggtccttaaaagaaactggccctttgna

SEQ ID NO: 630512 - DNA, 374 bp, Homo sapiens
tttccttctctccttcttcttaagatatcatgacatcttacccctgacaggttcaggattcgctaccccaaaatatggtgacctgttgtattaatattttgggcttttattttgttttgttctgttttgagacagtgtctcaccctgtcacccatgctagagtacagttttgttttgttttgagacaggttctcactctgtcacccatgctagagtacagtggccttgatagcagctcactgcagccttgaacttctgggctcaagtggtcctcctccctcagccttctgagtagttgggagtataggcaggtgtcaccatgctcagctaattttttttttttaaagtagatgtggggtctccctatgttgcca

SEQ ID NO: 630513 - DNA, 269 bp, Homo sapiens
gcaggtttgtccacgtgaggagccttgtgtgctggccggtgatgaaagcgaagcagaggggacctgcctctcagccggtttatgactggctctggaccaaccaaggtaggagggtcgaagcacgagatgtaaaaccacccaggcccagtggttcatgcctgtaatctcagcacttagggagactgaagtgggagaatcgcttaagcccaggagtatgagactagccttggcaacatagctgagacccccacgtgcacgcccagccgtgg

SEQ ID NO: 630514 - DNA, 1118 bp, Homo sapiens
  misc_feature (369)..(369): n is a, c, g, or t
  misc_feature (864)..(864): n is a, c, g, or t
caaactcacagccctctccaatattggctggggctgtgggatactcccccggacctcgtcaggaatggcattgagacagtgagacgggacctctacttagggagaccagtgtgggcctgggccttgggggggctggatgtggcccgaaggctgagtcccgaccatggggtctggggctcgagcctttagagcccctctgaaggtagccgtgcactaagctattccaccaactgggggttatgctctacatagagcacaaggacggaacaaggcgcctgacaatttcttcgtgacgcatactgagaaggactagagggttactagagcaaggaattgggcttgcctaagcatgaatcagaggaacgttcnccttggtgcgcactacgaaggtcaccgaagaaatgacgacaagtatgcgcttagacatgacgaggactatgaatagagagagatccttggagaagcgtcatcccgtcatcgcatatcataagccattgctctaacagaatcaactgagttgtcacgagaggcacccgagttgcaaacttagaggctttggcaatccgaagcgaatgattgggaggcgcacaattgtgcctaaccagtgtgggtgggccagaacccctaagtccaggtcagggggcaaaaggcgcctaaactgtgaacgggttgtgaacacatctaaccggctggctggtcaactaatccacaatttatatgtacatcaaagtcccttccaaatgtaataaaattgaaaacgccaaaacccgattaggattacaattgatggcgcacagccccccgtatatgagaggaactggccgggtgggaacaactttgaagagaaggaatggcgttaaagangcgaatacatgagaagggcaattccatataggccgataccattttaatgttgtggcaatcgcacctcggcgatttttgttgacgacacattaccgttaaggcaaagacatattccattaccaattatgataaaaccgggggtaaaggcaatggtggagcccctgtaatctaggggaggttgacaattcgggaggagaggtatagcggataaagcgaaaggaacttaacggtgtaggatttagaacttttcggga

SEQ ID NO: 630515 - DNA, 164 bp, Homo sapiens
ccccccgggaaaaaaaaaaatgggggggggggggggggttttttttgggggttaattttaaaaaatttgggggttttggattttcccaaaaaggtttttggttggggggtttttttggggccccttttttgggtttttgttaaaaaagggcgggtttcccccca

SEQ ID NO: 630516 - DNA, 194 bp, Homo sapiens
tcaaaaaatatagatgatcctgctcacatataaatttatcatataggtaccacacagctatgtatctgactctcatacacatattcctacagctagcatattttagcatacatatcctatatcttatatagccaattatatactatgcattaatcatactatacacctactgctctcgaataatagcatagtat

SEQ ID NO: 630517 - DNA, 567 bp, Homo sapiens
ggggcgcggggtctgagggctgcccccagccagcccggcctgcgctcggcctccaccctggaggtgtgtctgccccgatggctctgtcttccccgcgggcgacgccagcccctgcgcccggggggcacctatcgcctgcggcgcggttttggcagctcggcgctgtggtggacgaggagctgccgagcccgagcattgccatgttggcccggaagcgactctgcccagtctcccacgccggcgtcccatcgtggccaagcacccgacctgcgacccgcccgagctcacgcccgggttgccccaagccagggaccagcgagacgtaagcccccaatgtcggagcccgttctccgcgaggataatcgcacgcaccgcgacagcccagccggacagaatattacacatggatggcaaaccacacccagcgacaataaagcagagcactacgcgcgaccaacgcaggaacacggagcaacagggataacacacggagagcaacaggaacaccgccgagacacacaatcccgataccagatcatcaacaaaacacgcgaaacatctcggagc

SEQ ID NO: 630518 - DNA, 448 bp, Homo sapiens
attaacttattactgaagaaacctcacagcatatatttttaaaataaatttagtggccaggcatagtgctcatgcctgtaatctcagtactttgggaggctcaggtgggctgatcacttgaagccaggagttcaagatcagcctggccaacatggctaaaccggtctttactaaaaatacaaaaaaaattagctgagcatggtggtgcgtgtctgtgattccagctactcgggagactgagacatgcgaattgcttgaacctgggaggcggaggttgcagtgagccgagatcatgccactgcactccagcctggttaacagagtgagactctgtctcaacataaataaataaatgtagtgtagcctaagggtacagtgtttctaaagtctatagtcgtgtacagtcataccctacgccttcacattcactcaccactcactcactgac

SEQ ID NO: 630519 - DNA, 150 bp, Homo sapiens
gagcgagctggcagcagcaacctctaggaacgacacaattacacgtatcgcacagccatgcattggatatcttctcatagtataccatcataatcgaggctttgcactgactagtccctaataatcgggcccgaatgcgtttccccataa

SEQ ID NO: 630520 - DNA, 588 bp, Homo sapiens
ctgcatctgcgccaggcgaacggggtactgcgcctcctgcagtcccacctctccaccgccgcgtgcgcctgcagacgctccgctcgttgccttctctcctggcaggcgctgccttttctccccgttacaagggcacttggggctgaaggatcgcttgtgacgatctggaggaagccgcagcagctattgtagggacctgaagcttgtgtttcttcgtttatcctttgggttcagtgagaacgggcaggtatcggactcccttggtctttcagacatggattatttggctcatgatgtttctctctgctagtcttgtggcttggccgaaggaggctccaggaaacaggcagatcttaggcgctagagtctcagcgcggtgggtgaaaacggcggggagaaacatcatatcccagtgcatcctgggagggtcctgccggtttccgaagcgcttgctcctggtcgtcccttgactgaataaatgagtgtgtcgtaccttcgtgtccaccttggtacattcattgtgggtcaagcaggtcccgatgctacggtgtgtgtcctgtgatggacattgcgaagctccatagggtc

SEQ ID NO: 630521 - DNA, 318 bp, Homo sapiens
ggtcagagagctgtacctgcctggacagcctgcccctgtacctcatctacaatgtcagctggaaccacaatggcagcctgtttatgctcagcatgcaaggacaaaaagcgtgctgcatcatcgaccccacgtagaggcacccgtggtggccagagcagtgatagaagtgctcatgagtgggtccctggcaccatgcggacccatcattcctggccgcatggcaagggtgtacaccacatggcttcagccggactgacacgagctggcagattgagcacgctctggcgcaacccatgaactccctcgtaggaacccatt

SEQ ID NO: 630522 - DNA, 913 bp, Homo sapiens
gggtttgaagacgcgtcgtagaggttatggatggccgtgaaacagccgtttgagtttgtgctgtcgggttggagaacgtattgtcagggtgcccggacctaggaatggatgtccgacatgattacagatggcttgtccaatgatgtttcaactcggaaaccgcagatgatcggcttctacagtcatccggtgtctgacggctgtgtgccatgttccgacaaccggtgacgattcatcctggaggacctggtactatggtagatataagcctatttgatggcaacttttgctgactgtggaagtgacatcatccgcaaaactaccatgctcatggcatgtacaaactatatcatgtatgatagtcagtcgtgtaatttacgtattcagactgagagaatggttgataagatggcatgatgtctacattatttaggacagtactcctgttcttattgtggtataattcagttacaatgcatgggtggattggatggcaatttcttatcaatgtgggttggactgattccattctatcatgttaccgacttgttattgacttcgttcctcaggttgcctggttgctgaattagttcgtctcacctatgttgccaatgaatcaaagaatactctggatcaagatagcgctgattttccctacaaagatgacctccttggcctttggactccaaggctgactgcctggtcagagtacttggtgttctttgccttattcatccatttgtaagggttatctaaataactggtgtttggaacctggtatcaaatacattcgaacaagcgaaatgtgccgggagattgctggtgtgccctggccttttgaaagcacttcctcgctacgtatggacaactattgaatggcggtgcacatccctggaaagaaccacaaatacta

SEQ ID NO: 630523 - DNA, 754 bp, Homo sapiens
agcgggctgacctagcgcgtccaggtgggaggtaagtgtggaaccgggcgtctcgctcctcagacggatgtggcagccccgagccagtggctctcgcccgtgccgagatcgtttattgtggcgctagaggctacaagtccaagtatgcttcatcctcaatgaagaagttatgagagatggagttccccggtcagcctggacgatctgcggcgagggaactccgccaggccagccgggttcttggaaggtgatggtagccgggagagttgagttcaccttctaagtaagaaaagggtcgatggctacgtggacacagaaagcaagtttgctgaagttatggtggccgacatcaaagaccgacttggactcatggcataaatgcgccctgaaggcagagtccagggaccttgaatccagccgctctcagtcaagactgcttcatgagtaggacacggactgaagagttgctggtggacaacctggatctgttccctgatgtgctcgtggctgtgattgggggcagagattgatgcccccgggtctttgcctctgagcggggagagtctgtgtgtatgtgtcttccccggaatgcataccggcccgtacgctctcgtcctgtcccgtgcgtgttccttcatatctctttgcatatgcccatgtctgtccccagtatgtgccctggcacgttggggggactgtcccgctcaggccatccctgctcatggggacagccaagagaggcgtctgctgggtg

SEQ ID NO: 630524 - DNA, 312 bp, Homo sapiens
  misc_feature (51)..(51): n is a, c, g, or t
  misc_feature (53)..(53): n is a, c, g, or t
  misc_feature (55)..(55): n is a, c, g, or t
  misc_feature (89)..(89): n is a, c, g, or t
  misc_feature (180)..(180): n is a, c, g, or t
  misc_feature (192)..(192): n is a, c, g, or t
  misc_feature (263)..(263): n is a, c, g, or t
  misc_feature (271)..(271): n is a, c, g, or t
  misc_feature (297)..(297): n is a, c, g, or t
gatgtaggcattttcatactgaatgagagagtaaataatggcatccatttntntncttctattcacaataagttgaaatgctgtctatntcccatattctaggacctaactcctattgctttgaatttctcctaagacagtaatcatagttatgagcaaatgtatagctatatgcatatntccttaaggctnttctgtatttccaaaacacattaacctaagacttgagcgttatggactattccaatcaaaagacaaatgancatagatncctactccccgcataacacaaaactntatccaaagtggatt

SEQ ID NO: 630525 - DNA, 144 bp, Homo sapiens
tgatctatggaatgttctgtacaaagctgtataagggtactggggggctagatactttttttttgtaatctggacttagccaagtatatttcgccatggtaaaatgcagtatctttgttattaaaaattaaattgcataattta

SEQ ID NO: 630526 - DNA, 551 bp, Homo sapiens
atgtagaacgcagccttctgctcagaataaataaaggtccggggtcctctaatggtgcggtacagataggactgtgctaccgttggcactatttgtagtcatgtcagcaacatgatcaagggtgttactctgggcgaccgttacaagatgaggtctgtgtatgctcacttccccatcaacgatgttatccagtagaatgggtctcttgttgaaatcaggaatttctggggtgaataatacatcggcagggttgggataagaccaggtgttgcttgttcagtatgtcaagcccagggagatgaattaatccttgaaggaaatgacatggagcttgtttcaaattcagcggatttgattcagcaagccgcatcagttaaaagcaaggatatcaggaaatttttggatggtatctatgtctgtgaaaaaggaactgttcagcaggctgatgaataagatataagagttacctggttacagaaagaagatgccagatgacacttaagaccaacttgtgattcccccaactccccatcctttttttttagaaaagg

SEQ ID NO: 630527 - DNA, 375 bp, Homo sapiens
ttaatccgaggtaattatagctcaacagacaattagaaaaaagtccacacttgaagcctaaatttgtgctttttaagaatatttttacactatttctttttataggggctttgctgaattctatcattaaatcacagcccaaaatttgatggactaattattattttaaaatagatgaagacaataattctacttgttgggttaacatggagatacactcctatcatcttttattcaaggaagatctaactataatacagctcaggctaatgggttcttctagactgtaaagttatgtttttaaagacgtatcttgacacccgaaatgtgaaaaaacttaaaaaataatatggtgtatttttccaaatgataaat

SEQ ID NO: 630528 - DNA, 191 bp, Homo sapiens
ccactacacaccgacagacgttgcttgcagaccaaatcgttccactgcactccatcctgcgtggcagagcgagactccatctctctcaaaaaaattgataatccatacatggctgtctgctagatctatatatacttgctatatacttccttaagatcactcacaaacactctctatagagaggtagctga

SEQ ID NO: 630529 - DNA, 180 bp, Homo sapiens
tggctgagagagggtacgtgtaggccagggacacatccacgggccaggacagcatccacaggccaaggactgctgccagggcgcctgccaggctgaacccctggctcagccaaacgaggtgcccagacggtacccgagcatggtaggacctgcaggccggcgagggacaccaatgggacg

SEQ ID NO: 630530 - DNA, 226 bp, Homo sapiens
gaatttatccaaagggaatatgtcaatatgcactctaaaggctctttcatcaagtatatttcttgggcggagtagtatttcacggtatgaatgcactacagtttattttcctatgggcatagaattttaaaaaaatagagtgcacaggtctttctcttgggagggtagcattaatatggacatggtggtatggagatcccgtctccacagggaaccgagctcgaat

SEQ ID NO: 630531 - DNA, 131 bp, Homo sapiens
acgaagtacgggaaggagaagaaaagaatagagaagatagggaaattagaagataaaaacataactttagaagaaaaagataattcaaacatccaagtaggagaagcaggaaaaagacaagctaggaacac

SEQ ID NO: 630532 - DNA, 627 bp, Homo sapiens
agcggactctgatcgatagccggagcgcagagcggactgcagataccactgtgcagacccaccgacggcgtctggttgattaccatcaagtccggctggagccgcagatgaccggcctgggccctggtcgctcatcgcctatatgagcctggaggaacatgaccctagcagtccggtgtacgacaacaaacgtacgtgtgacctaggaaaggctgctaaggatgtcttcaacaaaggatatggaatttctacttctggtcatgcttacacttgatacaggcaaagcatcaggcaaacctagaaaccaaatataaggtctgtaactatggacttaccttcacccagaaatggacccacagacaatactctagggacagaaatctctttgggagaataagttggctgaagggttgaaactgactctgtgataccatatttgtacccgaacacaggaaagaagagtgggaaaattgaaggctcctataaagggattgtaaaggtgtggcagtaatgtgaaatagatttttctggaccaacaatctatggctgggcgtgtgttggcttcgaaagggtggttgttggtatcaagatgagtttgaaacagcaaatccaaatgtcacagaataa

SEQ ID NO: 630533 - DNA, 207 bp, Homo sapiens
tggacacattttccattgtttttataaggttgtttttcctctcaatacgtgtaactgccacatatagcaaccgagggatgataagagaattttcatggcacccaaggtgagaagctgaggattgtcagagaaaggtggaagtgtttatttttctttcttttctctttgattcactgtagttctgtaccgatatcatctttgtcctag

SEQ ID NO: 630534 - DNA, 459 bp, Homo sapiens
tgggttgacggccaaataaaagcggcacattgaatagagaaattgaaggtttataaacaggaagaaggctttgcgccaacgaagcagacaatctgaacattcagcgtgagatctccatgttccctctgtgaacgtaccggaagggtgaaaagctaaagggcatgcatacgtgttgtgagcagaatgggatgtgatttacaaaactagtggactaaatgccaaatgacttgaaacatacctctggcgtgtacaccattgggcacagctagtgcctgaccgcgcataacagtttgggggatatactgtcgggctcagcatggggacacaccagttaacgttgtcataggatgatatgtgctattagtgctcacactgtagacaaagcggttaccgtaacgccacttcttcactgtaagttcaatcaggttactcttcacgttttccaatggataggtcatc

SEQ ID NO: 630535 - DNA, 694 bp, Homo sapiens
tacaaagctacttttattcctggggggtgacccccaagaggattaaagagtagctctgggaagaaaaaaacagaaaaaaaaacaaaaaaaaaaaaaaagacaagaaaaaaaaacaaacaaaagcacagaagaacaaaacaaacaaccacacaacaaaaaaacacaaaaaagccacaacacaagaccgacccacacgatcccagccgaagggcgacccccgcacgcgcgactacacataagagcgccccgcgccccaaccaacccaaacaaccaaaccaccacccaacaacacacaccaccaaaccaacgacaaacaaacacaagacacacacacccccaccacaacacccagacgacggggcacacaacgacccccctcacaccaccaccacagcaggaacacgacacacaccgccacagacaaccaacgaaccgacgagaagcagcccacaaaagcagcacaaaacaaacaaacgccccccctacgcacgaacgccgcacaaccacactcagaacaacacaccacacacacctcacgacaaccccacacactaaatcctctcgaacaccatacaacagcgacaaccaatcccctccccacacaacaaacaccacacacacctcaacaaacacaacacccacctgcacacccacccacaaccccaatacccacccaatacaacaaacgacccaa

SEQ ID NO: 630536 - DNA, 130 bp, Homo sapiens
gaactacaagtcttataaatattatgacacagtaggtgtcaaagtatgtttaacatatgatgtcttcagagatccctccccgtttttgaattccaaagtggaggaactgaaaggtggcgctcgataggag

SEQ ID NO: 630537 - DNA, 125 bp, Homo sapiens
cttgcagcgccactgtgctctggacatgctgatcacctatcacacttttaaacttctagatgaagaatactatgaattatgtactaaacgaatgctgggttttttttggttttggtttttttgag

SEQ ID NO: 630538 - DNA, 320 bp, Homo sapiens
gctcaaaaggctaagccctagatcctccccatcatacagggccttcctgtcttcttggttcactaggccttgtcagctgtcccttcgtgcattccacaatagtgcgataggggtagctagacagggtattacaaggatgacaactggatagccccttaaatgctgcctgaagagctgtggccttgtccacattcaggggtcacctagtagtgataatgctttggaacccattttccaggtggcctgggctgtggtggggactaatggctgggaggcaagcgatgagaaagaagtcttgagcttcttcacggctgcaggtc

SEQ ID NO: 630539 - DNA, 370 bp, Homo sapiens
  misc_feature (12)..(12): n is a, c, g, or t
ggttcccctgtnaatttaaaagtggggggggggggggaaaaaaaaaaacctttggggttaggggatatagaaaaatataaggccctttgttccaaataacgcaggttttaaaaacaaaaaaatcccccccccacccaccccaaattttaatggtcagaattggcggcccaaaaaaaaccccctttcctgacttgttttggggcagtttggacgcccccaaaaaattgggcccaagggtttagaaaaataaaaatccaataaaagtaaacccaaaccccccaaacagccaacttcggggaatttttttggattgccaacaggataaattaaatgttccaccaatttgataaaaaacccctttgggaattga

SEQ ID NO: 630540 - DNA, 1272 bp, Homo sapiens
gtggcggctgagactgccgcctgcctggcacctagtgagcgcagctgtgagccccgacacctgtcgcctgcctgcatggagtcctgagacctgaaccctgagccctgtcactgctcctgtgtgaatgatgccccaaccatgcgccacctgctgacttcggatgcttgatgtggctgactgctggcttggatgtgtaggtgccacactcaatggccgcaacctgatgcctgctgtctagcccgcgatgctgtcctgactgtccacgatgagaccatgatgtgttacatttacttcattgtgtgaatgctagtatgtatggatcaccaattgtctcatgggcacgttgcctttcccaaaatggcagtgcaacacaactggacatcgtccttggcgatcttgggttgttgcaagtggtgaagaggtcctttcacaaacatgccacgcaccatcaccggcccaaggttggcttgagatccaccaggaaggggaggccctgcgtcggatttcgtaacattcggggtggcacacggtactccatcgaagggaattccttccacaggttgacttggcctctcaagtgcaacccgcgtgacacgtcatctctctgcgaaaccctttatcgtacccccctgcggcatggggaaacatagcattctcagataggcccagtgcacgccctgccccaggacaagtgacagttcccagaggggcaccttgagtggtcccatggggtataagtccactggttttagcgacacgccatatctctagttggcatatcatgcctatcggctagggataccaatcacacgagtctcctcgccccggacgatggcccttccagtttcacatattcttccacccacccacctagactagccaccaaaatcgcagccctccattggtctcccaacaaccaccatgatctaaccaccaaagacatccactagttacatccccttgacaacacttagtctaccagacaccctacttttcacacccccactccttccacacgataaaagaccaggcattcccacatacaagcggaggagacctgagaactgggggtcagacccggcaccacatcccgcccggggccacgacacgaccggagtgtgccatctgtttgccacagaccgcctacccaagcacatcatcgccggcactggagcaaccaaccacgcgcgccgcgacgcaaagccaactcccccgacccgcgctcaggagccgcaccaacgacccgcacagatgacagaccacaacatgcga

SEQ ID NO: 630541 - DNA, 289 bp, Homo sapiens
  misc_feature (130)..(130): n is a, c, g, or t
  misc_feature (262)..(262): n is a, c, g, or t
gagtacaagcaactcttcctgtcttcttatccagagtcacaagaggatgggagaggagcagtctgcaagcagccgtaggagcaagaccttgagacgtgtccatcaatgctacacagagtctcgctctgtngccaggctggaatgtaatggcacaatctcggctcacttcaacctctgcctcccgaattcaagcaattctcctgcctcagcttccctgagtatctgagactacagatgcccaccaccatgcctggctaatttngtatttttagaagagacagggtttcat

SEQ ID NO: 630542 - DNA, 122 bp, Homo sapiens
cgtttaattaaggaggtgtttctagccaaatccccctctgccagaaacacccaagaactgatcaactaaaaaaaaaaaatctcagcccaaaatttgaccaggtttcatcacataaattaaat

SEQ ID NO: 630543 - DNA, 440 bp, Homo sapiens
ttttttttttgagatggagtctcgctccgtcccccaggctggagtgcagtggcgtgatctcagctcactgccacctccgcctcccgggttcaagcagttctcctgcctcagcctcctaagtagctgggattacaggcgcgtgcctccgcgcacggctaattcttgtatccttagtggagacggggtttcaccatgttgttcaggctggtctcaaactcctgacctcgtgatctgcccacctcggcctcccaaagtgctgggattataggcgttacgaccatacccggacatttttgatttcttttttttggtcttaagcagttctttgctacttaattgggggctagtagcagataccatttttaaaacagacttgtttagctgtttcttaagctaaaaacttcagtaaaaatagttttagatatttcacaaaaagctat

SEQ ID NO: 630544 - DNA, 175 bp, Homo sapiens
tctagtagaaatgcaaaattagccgggcatggtggtgcacgcctcataaatctcatatactatatagatatagacatatatatctactatatatactagtatatagtagattactattaatactatgagtgccccggtgctgttctggtcggtcaagagtcctttgttcagtcgt

SEQ ID NO: 630545 - DNA, 320 bp, Homo sapiens
aagggcccaaaagcccccccgataaatgagctggtgggctgggtagaaaaaattgtcccaatgttgcccaatattggctttgtaaaggggaaatccagctgctgtttataaatttgaatgttttaaaagccttcttgcctgccctctctgttataaatggggttttagcccgtcctgggttttcccatgaaccccattttaaaatatgggttttttgtatgcccaacgggggtcttgtcccttggatatgggggaatgttggttttatggctcccggaaaaacccctttgctatgattaaagttcataaaatggtttcca

SEQ ID NO: 630546 - DNA, 660 bp, Homo sapiens
ggagcaccccggtaatatctcgctgaaaggcgtcttcaaggctatgaagggcctggggactcgggacaacaccctgatccggatcatggttctcccgataatgaggtggacgtgctcgcacatgcgtggggatcttccggagcaagtatgacaagtccctctacagcatgatcaaggaatgacacctctggctgattgatacaacgaagactctgctgaagcttgtcttggggtggagatgatgactgctgctgcgtcaggtacttcccggaggcggcgcaggtggcctatcacgatgtgggaacgtatagatgcatgtgggccgagttagagctgagagggaactgtgcgcccagcctatgacttcgatcctgacgcagatgcgcaagcgctgcggaaagccatgaaggggacatcgggagttgacgacatgacgacaagtcatcgagtatcatcaggcaccggcagcaatgtccagacggtcagcagaatcgcggcagacgcattactaggtctcactgttggccgggacttgaagtgactgagctgaagtctgaggatctctgtgaggacctgtgcaagggctgagttcatgggtgctcatgaatgccaacctggggcgattacgatgccgaaagcagcctgagagaaggaccatgg

SEQ ID NO: 630547 - DNA, 389 bp, Homo sapiens
gatcccgattaactcatcgaatacaatcgccgcacatatcatttatattgttgagtaggcagagaagcgtcgtatacagcactatcctcaagtgcaatcatgaatgaacagaaatcctccagatgctggcagcaagggtgcctccttgtgaccgaacgtcagattctacaagacaagacttggcagaggacatggggtagaagggcccggtctgccagggaatccttgctgatccagaatgccacacctaggtcttctccattcttggagaaggaaagttctacttcttcagtctcaaaattagcaaagcagccaataacatcattctccccaaaagtctggccaaattcctcaaattgtccattttctgccttgagtcctcgtccatc

SEQ ID NO: 630548 - DNA, 162 bp, Homo sapiens
gaagactggtcccagcggctcttcagtccaatcagtttgtcttagcattattagcattgcttttcagcttgcaagggaaaagagacgaccaccggataattctttttatgttcgacatgtacaaggagttccaaggaaacaaaattggtggtattcattgat

SEQ ID NO: 630549 - DNA, 178 bp, Homo sapiens
gtgctggtgtgtgcgatctatacgtgctggtgtgtggatggatacgtgctggtgtgtgtctggatgacgtgctggtgtgtggattgcatgacgtgctgttgtgtgcgattcctgaggtgctggtgtgtggatggataatatgctgttgtgtggatagagctgctactgttgttatggt

SEQ ID NO: 630550 - DNA, 763 bp, Homo sapiens
tcacttctaggaatactaatatatagctcacacatcatatcctccctactatgcctagcaagagaataatgactatacgcgtagtagcgattgataggactactctcataaccctcaattatccactccctcttagccaatatagtgacctattagcgcaggtactatgtcttggccggcctgcgcaagcaacggctggggcctgagcccatacgtagtctcaatcgtccaagcacatatggtcgctaggacgtacggttagcatagaaccatagatagcgcatacgtccgataatgctaaaaacttgaatcgtcgccaacaaatatatcataactacacatctgacatgactgttccaatcatacacaacgaatagattttctcgtagattccagagcgaggcaacattccagcacaagtcggctgagattctcatttaggcaatccatgcctctacttagctagtgttatatgtaagcgcgagacagtgcaatgatacagatccgtaattgtaggcttgatttccctcaattgcctcttattcgctccgcgacgcccgctaatcaggctcgtccgcatcacataacttacctaaatcttaacgctgtactcctaaaccacctacaacaaaatacatgggcgacaggccagagccaacaattattccaagttgacaggcgacctatcagcgaacggacaagactctcaacctccttcttatgactaaatacttgcgctaccaaattctcctttccattacta

SEQ ID NO: 630551 - DNA, 928 bp, Homo sapiens
  misc_feature (928)..(928): n is a, c, g, or t
tcattggttattttctttcatagcagaattacagaagaaaagaaaagaaaacctcgtggtttccagtgtttctcccgggaaaatattagcatgtgatacccatttatatcctccaacttagtgggggagagggaaagtaaaaggtgaccttaagaaagaacttctttaacgaggcaacaaagtgaagccttttctttagagggaactttgtggcatctcagttcacagctcataagaaaatacttttttctccgagggtataattataggcccaatatagcctctcaccgtgaaacaagtgacgagcttattcacatgtgtgccattatattctataatctctttataatattgtggagaatgtgtgcaagtgtcgtgtataaaactgtctcttttataaaagcaaagtggtacccatattataagagaaacaaatttaacacaatttgaaatgtgtgtgtgaagaagaaactttctacaagaacaacacaaaacaaaagagagagcggggcgaggcgcgcctcctcatagagaagagtatatctccctcgcgagaggggcgccacgacagagtatatagagcggggataatcaccccgagatttttacggctggtctacccaggagaggtgggcccgcctaatatataagagagaaccgtcgccagaataacatacacaaacaccgcgactaatggggcggcgaccctggtggagacgccggacccggagatatacacaccacaccgccgctagccggcagacacgtggtggggagaacaacaaccggtgtgagccatacgaccctgtggggaggaacacacccctgtaggggagacacaagagaagaacccgcccatttcaacacaactccaccagcgggggggcggcgcggtacgcaccccactctacctctttgggggggcaan

SEQ ID NO: 630552 - DNA, 264 bp, Homo sapiens
gtacaaagaatctggtccatgatgtttaggaatgataactatcactactgctggatgaatgacttcacgaatttaaaaaaaaaaaaaatccgtaaacggaccttactcggtgttgtaaaacttttctttttctggtaaaggattttaaattgcctatttacaattgatgaggattaaaaaatttctttacaaaagagaccttacgattttgaaccattatctctacgaggatttaagtgaaattagagctcttctcagatttgg

SEQ ID NO: 630553 - DNA, 125 bp, Homo sapiens
taacttgggacccccaagttgtaaagatttattttttacctgacagttataccccaggtaaactgtcattgaaaaaagtgaatcaataacttgtatttgtttaaaaattaaattaatcccttgat

SEQ ID NO: 630554 - DNA, 136 bp, Homo sapiens
gcgggcgactagaggacccacactgggtcgagtactggcttaagtgatctgctgccttggctctcaaagtgctgggatataggcgtgagcaccgcgcccagcacagttgctccatttttaattgaacttctgttgc

SEQ ID NO: 630555 - DNA, 399 bp, Homo sapiens
  misc_feature (209)..(209): n is a, c, g, or t
tcgaatccgctcggaccccacacgcacttggcgggtgtggtggcgcgtgcctgtaatcccagctacttgggaggctgaggcaggagaatcacttgaacctgggaggcagacgttgcagtgagccgagatcgcgccactgcactgcagcctgggcgacagagtgagactccacgtcaaaaaaaaaaaaaaaaaaaaaaaaaaaaaaaaangggttttttgggggggctggaaaatttggccatttttccccccaaaaaatttcgggcccatttttttttaaaagggaaaaaaccttttcccttttaaaaaaaatttaatttttttttaaaaaggttcccaaaaaaaagggggggggggggggccctttaaaagggccccggggggaaaaaaaattttgaa

SEQ ID NO: 630556 - DNA, 116 bp, Homo sapiens
aagtggtaagggacagggaaggaaaggacagaaaacacaaaacagaacaaaacaaaacaaaacaaaacaaaacaaaatgattacaaaactcatctgcagatgaacacaattaacct

SEQ ID NO: 630557 - DNA, 417 bp, Homo sapiens
acgattggagtaagcactgtcaggctaaaggtctctaaagtactctgtgtgaaacctaagtgaaggaagacaacttggtgtagttgctcttcaacacttccattcccaacattcattttcccaagctcacttccccatggatagaacctgactggcccttaacagcttttggcaaggccagaaggacctatcaaactatataattcactatgggaggattcaaaccgggatatttgcatttttgaaatccatcttgaacaaaaactggtgaaccagcctatgttttactttcctgtgtgagaaatgatgagggtcacattctttataccaaagtgaagacatgagatccaactctgagctcaccctgttgctaaatggataatgccagtactctcttgtggaaagtattaccagaac

SEQ ID NO: 630558 - DNA, 546 bp, Homo sapiens
tgctctgcacatcatcttgctccatgccctccctaagtaccagtgaagaagatggcacgtcggcatacatcaggtcaagcttgtaggtccaggcgagcccaggcgtcagcaatgtgctgtaggtgtggctcagcgatgtacacagttctctgtaccttggtcaggtctccaccaggcaccacagtgtgaggctggtagttgatgccaaccttgaagtctgtggggcaccaatccacaaactggatggtacgcttggtcttgatggtggcaagtggcagcattggcatctttgggaaacaggtcaacacggtacaacaggcagcaagccatgtatttaccatggcgagggtcacatttcaccatctggttggctggctcaaagcaagcattggtgatctctgctacagaaagctgttcatggtaggctttctcagcagagatgacaggggcctatgtggccagagggaagtggctgcggggatagggcaccaggttggtctggaattctgtcaggtcaacattcagggctccatccaatctccagga

SEQ ID NO: 630559 - DNA, 293 bp, Homo sapiens
ccattctgatagccggtattgttcgccgccagtaccgtcagtgggttactcatcacccagcaggtcgcactggacgttaaaatctgccccgacgataggcttaatccctgcgccatgtcccgctccgtagaacttcaccagaccacaaaggttggtgaaatcggtgatcgccagtgctggcatacccaacgccgccgccttttttaccaacggtgcggttttggccaggccatcgatcatcgagtagtcgctgtgcacccgcaggtgtacgaaacgtggttcagacatcttca

SEQ ID NO: 630560 - DNA, 814 bp, Homo sapiens
aaacaaaaaattcggctaggtacgaggccgcgggtttaatcaggcagaggccctgagacgtacctcagaacccacaggtgagaggggagggctcctggggcagagaagttccttaggttaactttcggaatgaaatatcctcccttccccccatctctgagatggagtgaagcccaccaatctcgccctttgcagtgtgcagggtggaacggtaagaggttcggtgtggagctatgagaggctgcccatagtggctcatgcagaccatgacatggaggctaagcgcgtggagtgaaggcatctagtcacataccaggcgcatatgtctaaccccactctctagtctcggggctacacagcaactacgggtggccacgaagatgtccaccctagataggagtatgtactacacaatcgagtgagtgacattctatcacacataatgcaccctaccacacccctacaactttcatcgatataacgactacaccttgaacaggacaaatgcatcagaagggtcccccagagggtctttgaccaaaacattcggacacgcaccaaagacacttcaagacgccaaattgggaggacagagtggaaaaaggaactggatcgcattaataactcccaacagaattccactaggaatccatacgttggcttcaatagtgagtttgtgcattgctagaccacaacctcacatgtggccccttccacatgtacgagttacaatacctcatagcagtaaatacatatagccacacaacatactagtgtgatgttacacacaattaccccaatacgtaacaattcg

SEQ ID NO: 630561 - DNA, 172 bp, Homo sapiens
cgcagtgggaggcgaactttacttttctcatccttaccaaccagtattgaagcaatgatttggcaagccttggactcgatcaaagaaagtgtccttgagagtgaggagataggcacctgttagaaaatcctgaatagcagcaatcagcggttccccactccccgggatacag

SEQ ID NO: 630562 - DNA, 907 bp, Homo sapiens
ctaaccggaaagttaaaatgatgttgatgtcgatgtcctgaggacctattggccgtgccgatgtgcaaagctcagcaaaaagaagctaggtgaacccttcgttctacgccagtacctgttcatcttataatcacatccatatcggtagtgagatgacctatatgacggccatgctatatacaatctgtggagagaaggcggggacaatcttgcttggagctttccaatcggctagaattgggccttgcaggaatcgccgcgaatgctcactctgtcaggcagtcgaatagcgtcgtcgtcgcgtggcctggattggcgtggctgatgaaaacgaaccaaatggaattggtggccacccgggatcgattggcctgtagtggccgcctctcgagaagacaaagcgacaccctcgagggcgtcctagggcactagatagcgggtcgttcctacagttacttcgtgccggtgcgggaccttggtttggcgtgttcagtcgatttcaaacgaaaagggttggtgcagccattccatgaggaaaaatgcaagggaattccaatagttccgactttgcgacgccaaagtttacacgagtttggcacaaaggggtcgttctgtcacgctgcttgacatagcgctggtcgagtcccgtcctcgcactagctggtagacgttcccaccttggtcgaggccatgtcccccacgcacatgaacgtggtgttgcttgctagtgcactagtttaatacgtaagtcgttccatgacatttgttaagggactttttacagggtcatacattcctactatttgggttcatcacaaaaagtgggttaagctaatttaaaaattctcgggtaagcctggggatgtcaggttgattcacttcgaacgggacctagcaaaaaacaggg

SEQ ID NO: 630563 - DNA, 193 bp, Homo sapiens
gttcgtgattggtgaagatcctgagtcgactacttaacacactggaatcaacatgaaccattatatataggtcaggtatatcacgtacagcgagtcatagctaaccattttgtgacgatctccatagaagtgatccgcggatattgtgagttacataaatgcacatcatgcactttgccgagatgtgcagaac

SEQ ID NO: 630564 - DNA, 2963 bp, Homo sapiens
  misc_feature (94)..(94): n is a, c, g, or t
  misc_feature (130)..(130): n is a, c, g, or t
  misc_feature (154)..(154): n is a, c, g, or t
  misc_feature (173)..(174): n is a, c, g, or t
  misc_feature (215)..(215): n is a, c, g, or t
  misc_feature (228)..(228): n is a, c, g, or t
  misc_feature (2815)..(2823): n is a, c, g, or t
gcgcatgcggtcggggttgttcactggctgtccggggctccgcgcgcgtcgccggcccagctgctgtcgctgatcgggaggatctgaagccggncgcaggtcaaagagtaaactgaagtacattctggtnactggtggtgttatatcaggaatnggaaaaggaatcatgccanncagtgtgggcacaatactcaagtcatgtggttacatgtaanttcaatcaaaatngacccctacattaacattgatgcaggaacattctctccttatgagcatggtgaggtttttgtgctggatgatggtggggaagtagaccttgacctgggtaactatgagcggttccttgacatccgcctcaccaaggacaataatctgaccactggaaagatataccagtatgtcattaacaaggaacggaaaggagattacttggggaaaactgtccaagttgtccctcatatcacagatgcaatccaggagtgggtgatgagacaggcgttaatacctgtagatgaagatggcctggaacctcaagtgtgtgttattgagcttggtggaaccgtgggggacatagaaagcatgccctttattgaggccttccgtcagttccaattcaaggtcaaaagagagaacttttgtaacatccacgtcagtctagttccccagccaagttcaacaggggaacagaagactaaacctacccagaatagtgttcgggaacttagaggacttgggctttccccagatctggttgtatgcaggtgctcaaatccacttgacacatcagtgaaggagaaaatatcaatgttctgccatgttgagcctgaacaagtgatctgtgtccacgatgtctcatccatctaccgagtccccttgttgttagaggagcaaggggttgtagattattttcttcgaagacttgaccttcctattgagaggcagccaagaaaaatgctgatgaaatggaaagagatggctgacagatatgatcgcttgctggagacctgctctattgcccttgtgggcaaatacacgaagttctcagactcctatgcctctgtcattaaggctctggagcattctgcactggccatcaaccacaaattggaaatcaagtacatagattctgcggacttggagcccatcacctcgcaagaagagcccgtgcgctaccacgaagcttggcagaagctctgtagtgctcatggagtgctggttccaggaggatttggtgttcgaggaacagaaggaaaaatccaagcaattgcctgggctcggaatcagaaaaagccttatttgggcgtgtgcttagggatgcagttggcagtggttgaattctcaagaaacgtgctgggatggcaagatgccaattctacagagtttgaccctacgaacagtcatcccgtggctcgtagacatgccagaacacacccagggcagatgggcggaaccatgaggctgggcaaagaggagaaccctgttccagaccaagaactcagtcatgaggaaactctatggagacgcagactacttggaagagaggcaccgccaccgatttgaggtgaatccagtctggaaaaagtgtttggaagaacaaggcttgaagtttgttggccaagatgttgaaggagagagaatggaaattgtggagttagaagatcatcccttttttgttggggttcagtaccaccctgagttcctgtccaggcctatcaagccctccccaccatactttggcctcctcctggcctctgtggggcggctctcacattacctccagaaaggctgcaggctctcacccagggacacctatagtgacaggagtggaagcagctcccctgactctgaaatcaccgaactgaagtttccatcaataaatcatgactgatcttgtagcggatgattcttcaagagacccttcaaacttgggtagagtttacagctctgactttacactcggctttggagactttctttaaattatgtttttattaagattattttattatgcggaaaggtatttgggaaacttgtcacttgcatgtcccatcacgtgtactggctcctctgtggtgtctgcctgttgcgtgacactctccttgcagttcttgagttgcggcagaacatcgcgatgggaaccgatggtgggtggggctgcagagtgccccatcggtcaccttgtttctcaactacctcgcatcattgcagatgctagcgcgttgcctgtcgctttcccttggatacctagaccgttataaagtgtgccacatggacttaccgagcatggagagaggattttagctaggatttgaacacttggtgctgggaacctcagggtattgcttgccactaagccatgaaaccagagacaaaatctctatactgccctgagttggggggaattctcagtgccaactgtggctggtcctcattcaaagggacggtcagtttggtgtcaacatgaaacaccaagatgtctgtctctgaagcgtgattttaaaatccccatgcctgtggctgcgcttcctatttctagggctgggaaacactccttgcatcaaggggtcacttacagaacaaagaatcttttgggggaaacttcctctaaaaccctctcatatatagacagctttgactggagggtccatttttcttccaggatggtgttactgcagttgaaagggcaatatgaagttactttcttaatgtgacctagcaataggcatagctacgtggcactatattctggccagactcgatgtgtactctaacttaagaaataaatcagtaaggcagaacaagaaaaaaaaaaaannnnnnnnntaaattatccttgagggccagttttcggtcccgtttttggcaaggggccaaaggggggggttaaaaaaaaggaggcggggttaaacctggtgggaaagccttgggctgggggcccttctggggatggaaccaggatagtg

SEQ ID NO: 630565 - DNA, 552 bp, Homo sapiens
  misc_feature (7)..(7): n is a, c, g, or t
aggtttngtttaaacttcagaaactgaagctttatttcagcctgtcctgccatgaggtctccagtgagaggtctccagtgaaaggtctcatgtaattgtttctcttttatctcccaaatttaatgtgggcaataaaattctcctttcgtaattcactgttttattacaaatacgatattactgaaacatcttattagcagataagtatagaccaggagcctaactgtgttagatattttcagtgcacatttcacagttgtttttcattttaggattattttgagaagaaaaaatgttttgtaattgaaatagttttaatttcctttaaaccataatttggtttttctatctatattatattcagttcagttttcccatataacttttgtgaagattggctagtaccacaaaataactatggcttcacaatactagtgttagattatgtcaagaagaaagtgttttagttacaacatacgccacccactgaggaccttgtagtgggataaacaaaaattaaaatgcaacaatccaaataaattataatgtaac

SEQ ID NO: 630566 - DNA, 694 bp, Homo sapiens
  misc_feature (286)..(286): n is a, c, g, or t
  misc_feature (364)..(364): n is a, c, g, or t
ggaatcaatacttggcagttcaatttcaaatttaaccttacagaggacatgtactcccaggattccatagatctccttgctaactcaggactacagtttcagaagcatgaagaggaagggattgacacactgcactttgcagagctgcttatgacatcaggagtggttctctgtgacaatgtcaaatggctttcatttcatagtggctatgattttggctatatggtaaagttgcttacagattctcgtttgccagaagaggaacatgaattctttcatattctgnaaaccttttcttcccatccatttatgatgtgaaatacctgatgaagagctgcaaaaatcttaagggaggtcttcaggngggaaaaaacgggtttttgggctttgattcagttggatttgcagaggattggaaggcagcaccaggcaggctcagactcacttggctgaaccaaggggaaaatggctttctttaggatgaaagagtgtttttgaggacagcatttgatgaatgccaaagtactggtgggccggggtttcctttaaaatttttgttggcgcggggggggggggggggccttttttttaagggcacaggagtggccagaagcagaatgaggatgtggactctgccaggagaagatgagcatctggcgattatcaacaaatgcagcagtgatggcgcaggctc

SEQ ID NO: 630567 - DNA, 2718 bp, Homo sapiens
  misc_feature (94)..(94): n is a, c, g, or t
  misc_feature (130)..(130): n is a, c, g, or t
  misc_feature (154)..(154): n is a, c, g, or t
  misc_feature (173)..(174): n is a, c, g, or t
  misc_feature (215)..(215): n is a, c, g, or t
  misc_feature (228)..(228): n is a, c, g, or t
  misc_feature (2570)..(2578): n is a, c, g, or t
gcgcatgcggtcggggttgttcactggctgtccggggctccgcgcgcgtcgccggcccagctgctgtcgctgatcgggaggatctgaagccggncgcaggtcaaagagtaaactgaagtacattctggtnactggtggtgttatatcaggaatnggaaaaggaatcatgccanncagtgtgggcacaatactcaagtcatgtggttacatgtaanttcaatcaaaatngacccctacattaacattgatgcaggaacattctctccttatgagcatggtgaggtttttgtgctggatgatggtggggaagtagaccttgacctgggtaactatgagcggttccttgacatccgcctcaccaaggacaataatctgaccactggaaagatataccagtatgtcattaacaaggaacggaaaggagattacttggggaaaactgtccaagttgtccctcatatcacagatgcaatccaggagtgggtgatgagacaggcgttaatacctgtagatgaagatggcctggaacctcaagtgtgtgttattgagcttggtggaaccgtgggggacatagaaagcatgccctttattgaggccttccgtcagttccaattcaaggtcaaaagagagaacttttgtaacatccacgtcagtctagttccccagccaagttcaacaggggaacagaagactaaacctacccagaatagtgttcgggaacttagaggacttgggctttccccagatctggttgtatgcaggtgctcaaatccacttgacacatcagtgaaggagaaaatatcaatgttctgccatgttgagcctgaacaagtgatctgtgtccacgatgtctcatccatctaccgagtccccttgttgttagaggagcaaggggttgtagattattttcttcgaagacttgaccttcctattgagaggcagccaagaaaaatgctgatgaaatggaaagagatggctgacagatatgatcgcttgctggagacctgctctattgcccttgtgggcaaatacacgaagttctcagactcctatgcctctgtcattaaggctctggagcattctgcactggccatcaaccacaaattggaaatcaagtacatagattctgcggacttggagcccatcacctcgcaagaagagcccgtgcgctaccacgaagcttggcagaagctctgtagtgctcatggagtgctggttccaagaggagaaccctgttccagaccaagaactcagtcatgaggaaactctatggagacgcagactacttggaagagaggcaccgccaccgatttgaggtgaatccagtctggaaaaagtgtttggaagaacaaggcttgaagtttgttggccaagatgttgaaggagagagaatggaaattgtggagttagaagatcatcccttttttgttggggttcagtaccaccctgagttcctgtccaggcctatcaagccctccccaccatactttggcctcctcctggcctctgtggggcggctctcacattacctccagaaaggctgcaggctctcacccagggacacctatagtgacaggagtggaagcagctcccctgactctgaaatcaccgaactgaagtttccatcaataaatcatgactgatcttgtagcggatgattcttcaagagacccttcaaacttgggtagagtttacagctctgactttacactcggctttggagactttctttaaattatgtttttattaagattattttattatgcggaaaggtatttgggaaacttgtcacttgcatgtcccatcacgtgtactggctcctctgtggtgtctgcctgttgcgtgacactctccttgcagttcttgagttgcggcagaacatcgcgatgggaaccgatggtgggtggggctgcagagtgccccatcggtcaccttgtttctcaactacctcgcatcattgcagatgctagcgcgttgcctgtcgctttcccttggatacctagaccgttataaagtgtgccacatggacttaccgagcatggagagaggattttagctaggatttgaacacttggtgctgggaacctcagggtattgcttgccactaagccatgaaaccagagacaaaatctctatactgccctgagttggggggaattctcagtgccaactgtggctggtcctcattcaaagggacggtcagtttggtgtcaacatgaaacaccaagatgtctgtctctgaagcgtgattttaaaatccccatgcctgtggctgcgcttcctatttctagggctgggaaacactccttgcatcaaggggtcacttacagaacaaagaatcttttgggggaaacttcctctaaaaccctctcatatatagacagctttgactggagggtccatttttcttccaggatggtgttactgcagttgaaagggcaatatgaagttactttcttaatgtgacctagcaataggcatagctacgtggcactatattctggccagactcgatgtgtactctaacttaagaaataaatcagtaaggcagaacaagaaaaaaaaaaaannnnnnnnntaaattatccttgagggccagttttcggtcccgtttttggcaaggggccaaaggggggggttaaaaaaaaggaggcggggttaaacctggtgggaaagccttgggctgggggcccttctggggatggaaccaggatagtg

SEQ ID NO: 630568 - DNA, 2797 bp, Homo sapiens
  misc_feature (94)..(94): n is a, c, g, or t
  misc_feature (130)..(130): n is a, c, g, or t
  misc_feature (154)..(154): n is a, c, g, or t
  misc_feature (173)..(174): n is a, c, g, or t
  misc_feature (215)..(215): n is a, c, g, or t
  misc_feature (228)..(228): n is a, c, g, or t
gcgcatgcggtcggggttgttcactggctgtccggggctccgcgcgcgtcgccggcccagctgctgtcgctgatcgggaggatctgaagccggncgcaggtcaaagagtaaactgaagtacattctggtnactggtggtgttatatcaggaatnggaaaaggaatcatgccanncagtgtgggcacaatactcaagtcatgtggttacatgtaanttcaatcaaaatngacccctacattaacattgatgcaggaacattctctccttatgagcatggtgaggtttttgtgctggatgatggtggggaagtagaccttgacctgggtaactatgagcggttccttgacatccgcctcaccaaggacaataatctgaccactggaaagatataccagtatgtcattaacaaggaacggaaaggagattacttggggaaaactgtccaagttgtccctcatatcacagatgcaatccaggagtgggtgatgagacaggcgttaatacctgtagatgaagatggcctggaacctcaagtgtgtgttattgagcttggtggaaccgtgggggacatagaaagcatgccctttattgaggccttccgtcagttccaattcaaggtcaaaagagagaacttttgtaacatccacgtcagtctagttccccagccaagttcaacaggggaacagaagactaaacctacccagaatagtgttcgggaacttagaggacttgggctttccccagatctggttgtatgcaggtgctcaaatccacttgacacatcagtgaaggagaaaatatcaatgttctgccatgttgagcctgaacaagtgatctgtgtccacgatgtctcatccatctaccgagtccccttgttgttagaggagcaaggggttgtagattattttcttcgaagacttgaccttcctattgagaggcagccaagaaaaatgctgatgaaatggaaagagatggctgacagatatgatcgcttgctggagacctgctctattgcccttgtgggcaaatacacgaagttctcagactcctatgcctctgtcattaaggctctggagcattctgcactggccatcaaccacaaattggaaatcaagtacatagattctgcggacttggagcccatcacctcgcaagaagagcccgtgcgctaccacgaagcttggcagaagctctgtagtgctcatggagtgctggttccaggaggatttggtgttcgaggaacagaaggaaaaatccaagcaattgcctgggctcggaatcagaaaaagccttatttgggcgtgtgcttagggatgcagttggcagtggttgaattctcaagaaacgtgctgggatggcaagatgccaattctacagagtttgaccctacgaacagtcatcccgtggctcgtagacatgccagaacacacccagggcagatgggcggaaccatgaggctgggcaaagaggagaaccctgttccagaccaagaactcagtcatgaggaaactctatggagacgcagactacttggaagagaggcaccgccaccgatttgaggtgaatccagtctggaaaaagtgtttggaagaacaaggcttgaagtttgttggccaagatgttgaaggagagagaatggaaattgtggagttagaagatcatcccttttttgttggggttcagtaccaccctgagttcctgtccaggcctatcaagccctccccaccatactttggcctcctcctggcctctgtggggcggctctcacattacctccagaaaggctgcaggctctcacccagggacacctatagtgacaggagtggaagcagctcccctgactctgaaatcaccgaactgaagtttccatcaataaatcatgactgatcttgtagcggatgattcttcaagagacccttcaaacttgggtagagtttacagctctgactttacactcggctttggagactttctttaaattatgtttttattaagattattttattatgcggaaaggtatttgggaaacttgtcacttgcatgtcccatcacgtgtactggctcctctgtggtgtctgcctgttgcgtgacactctccttgcagttcttgagttgcggcagaacatcgcgatgggaaccgatggtgggtggggctgcagagtgccccatcggtcaccttgtttctcaactacctcgcatcattgcagatgctagcgcgttgcctgtcgctttcccttggatacctagaccgttataaagtgtgccacatggacttaccgagcatggagagaggattttagctaggatttgaacacttggtgctgggaacctcagggtattgcttgccactaagccatgaaaccagagacaaaatctctatactgccctgagttggggggaattctcagtgccaactgtggctggtcctcattcaaagggacggtcagtttggtgtcaacatgaaacaccaagatgtctgtctctgaagcgtgattttaaaatccccatgcctgtggctgcgcttcctatttctagggctgggaaacactccttgcatcaaggggtcacttacagaacaaagaatcttttgggggaaacttcctctaaaaccctctcatatatagacagctttgactggagggtccatttttcttccaggatggtgttactgcagttgaaagggcaatatgaagttactttcttaatgtgacctagcaataggcatagctacgtggcactatattctggccagactcgatgtgtactctaacttaagaaataaatcagtaaggcaga

SEQ ID NO: 630569 - DNA, 151 bp, Homo sapiens
aggggggggggtggcccgggggggggggggggtttccttttttttccccggggggcccccccccccgggccccccccggggggggtccccccgcccccccccgtgggggggcccccctttttttttttttttttttggggccccgggggga

SEQ ID NO: 630570 - DNA, 2511 bp, Homo sapiens
  misc_feature (2363)..(2371): n is a, c, g, or t
gactgatactgaatcaggaagacagaacagtgttagaaaactaaactgccagagaagggtttagtgcctaacctctgaaacaactttgttcttctagcttggtggaaccgtgggggacatagaaagcatgccctttattgaggccttccgtcagttccaattcaaggtcaaaagagagaacttttgtaacatccacgtcagtctagttccccagccaagttcaacaggggaacagaagactaaacctacccagaatagtgttcgggaacttagaggacttgggctttccccagatctggttgtatgcaggtgctcaaatccacttgacacatcagtgaaggagaaaatatcaatgttctgccatgttgagcctgaacaagtgatctgtgtccacgatgtctcatccatctaccgagtccccttgttgttagaggagcaaggggttgtagattattttcttcgaagacttgaccttcctattgagaggcagccaagaaaaatgctgatgaaatggaaagagatggctgacagatatgatcgcttgctggagacctgctctattgcccttgtgggcaaatacacgaagttctcagactcctatgcctctgtcattaaggctctggagcattctgcactggccatcaaccacaaattggaaatcaagtacatagattctgcggacttggagcccatcacctcgcaagaagagcccgtgcgctaccacgaagcttggcagaagctctgtagtgctcatggagtgctggttccaggaggatttggtgttcgaggaacagaaggaaaaatccaagcaattgcctgggctcggaatcagaaaaagccttatttgggcgtgtgcttagggatgcagttggcagtggttgaattctcaagaaacgtgctgggatggcaagatgccaattctacagagtttgaccctacgaacagtcatcccgtggctcgtagacatgccagaacacacccagggcagatgggcggaaccatgaggctgggcaaagaggagaaccctgttccagaccaagaactcagtcatgaggaaactctatggagacgcagactacttggaagagaggcaccgccaccgatttgaggtgaatccagtctggaaaaagtgtttggaagaacaaggcttgaagtttgttggccaagatgttgaaggagagagaatggaaattgtggagttagaagatcatcccttttttgttggggttcagtaccaccctgagttcctgtccaggcctatcaagccctccccaccatactttggcctcctcctggcctctgtggggcggctctcacattacctccagaaaggctgcaggctctcacccagggacacctatagtgacaggagtggaagcagctcccctgactctgaaatcaccgaactgaagtttccatcaataaatcatgactgatcttgtagcggatgattcttcaagagacccttcaaacttgggtagagtttacagctctgactttacactcggctttggagactttctttaaattatgtttttattaagattattttattatgcggaaaggtatttgggaaacttgtcacttgcatgtcccatcacgtgtactggctcctctgtggtgtctgcctgttgcgtgacactctccttgcagttcttgagttgcggcagaacatcgcgatgggaaccgatggtgggtggggctgcagagtgccccatcggtcaccttgtttctcaactacctcgcatcattgcagatgctagcgcgttgcctgtcgctttcccttggatacctagaccgttataaagtgtgccacatggacttaccgagcatggagagaggattttagctaggatttgaacacttggtgctgggaacctcagggtattgcttgccactaagccatgaaaccagagacaaaatctctatactgccctgagttggggggaattctcagtgccaactgtggctggtcctcattcaaagggacggtcagtttggtgtcaacatgaaacaccaagatgtctgtctctgaagcgtgattttaaaatccccatgcctgtggctgcgcttcctatttctagggctgggaaacactccttgcatcaaggggtcacttacagaacaaagaatcttttgggggaaacttcctctaaaaccctctcatatatagacagctttgactggagggtccatttttcttccaggatggtgttactgcagttgaaagggcaatatgaagttactttcttaatgtgacctagcaataggcatagctacgtggcactatattctggccagactcgatgtgtactctaacttaagaaataaatcagtaaggcagaacaagaaaaaaaaaaaannnnnnnnntaaattatccttgagggccagttttcggtcccgtttttggcaaggggccaaaggggggggttaaaaaaaaggaggcggggttaaacctggtgggaaagccttgggctgggggcccttctggggatggaaccaggatagtg

SEQ ID NO: 630571 - DNA, 593 bp, Homo sapiens
gcacgaggatgatatgatattattcagcaaagacttaaatgcaaataagaaaatcataacaacactcaagaaacaatacgatacaaagataataaatctgggtgaaggtgataacgaaattcagtacgacatacttggattagagatcaaatatcaaagaagcaagtacatgaaattaggtatggaaaaatccttgacagaaaaattacccaaactaaacgtacctttgaacccaaaaggaaagaaacttagagctccaggtcaaccaggtcattatatagaccaggatgaactagaaatagatgaagatgaatacaaagagaaagtacatgaaatgcaaaagttgattggtctagcttcatatgttggatataaatttagatttgacttactatactacatcaacacacttgctcaacatatactattcccctctaggcaagttttagacatgacatatgagttaatacaattcatgtgggacactagagataaacaattaatatggcacaaaaacaaacctaccaagccagataataaactagtcgcaataagcgatgcttcatatggtaaccaaccatattacaagtcac

SEQ ID NO: 630572 - DNA, 153 bp, Homo sapiens
gggggggttgggtttttttttttccccgggggccccccccctttttttcccttttaaaaaagggggaggttggggggggggccccgccccccccctttttttttccccgggggccccctaaaccctttttcccttttggggggttccccccca

SEQ ID NO: 630573 - DNA, 489 bp, Homo sapiens
actctataggatccccgtcactgcgtcagcctgagcaaatgcttcgcgcaattctatgagggtttctgggccgaagagggagcacagcagtaggccgccgggccgtagtgcttggcggaagccggcgaatactgttggtagatcttcgatccactgtaggcataggttgctgaagatgacatcgacactcgcgtctgccactggcagggtgcgtgcatcgccacatatctgggctaatggtttccaccagtgactgcgtttccgtgcttcttgcaacattggcattgcttgatcgaatgcgatcacttgtgctttaggccagcgttttttcattgcgatgctggcacgtccggtgccggctcctacatcgagtattacacgcggtatgcggtcgccgagatagtccagagattcgagtagacgttgttcaacttcgtgttggagtatggcgttggtgtcgtaactgcgggccgcgcgggaaaaggcgcg

SEQ ID NO: 630574 - DNA, 2457 bp, Homo sapiens
  misc_feature (2309)..(2317): n is a, c, g, or t
gactgatactgaatcaggaagacagaacagtgttagaaaactaaactgccagagaagggtttagtgcctaacctctgaaacaactttgttcttctagcttggtggaaccgtgggggacatagaaagcatgccctttattgaggccttccgtcagttccaattcaaggtcaaaagagagaacttttgtaacatccacgtcagtctagttccccagccaagttcaacaggggaacagaagactaaacctacccagaatagtgttcgggaacttagaggacttgggctttccccagatctggttgtatgcaggtgctcaaatccacttgacacatcagtgaaggaggtctcatccatctaccgagtccccttgttgttagaggagcaaggggttgtagattattttcttcgaagacttgaccttcctattgagaggcagccaagaaaaatgctgatgaaatggaaagagatggctgacagatatgatcgcttgctggagacctgctctattgcccttgtgggcaaatacacgaagttctcagactcctatgcctctgtcattaaggctctggagcattctgcactggccatcaaccacaaattggaaatcaagtacatagattctgcggacttggagcccatcacctcgcaagaagagcccgtgcgctaccacgaagcttggcagaagctctgtagtgctcatggagtgctggttccaggaggatttggtgttcgaggaacagaaggaaaaatccaagcaattgcctgggctcggaatcagaaaaagccttatttgggcgtgtgcttagggatgcagttggcagtggttgaattctcaagaaacgtgctgggatggcaagatgccaattctacagagtttgaccctacgaacagtcatcccgtggctcgtagacatgccagaacacacccagggcagatgggcggaaccatgaggctgggcaaagaggagaaccctgttccagaccaagaactcagtcatgaggaaactctatggagacgcagactacttggaagagaggcaccgccaccgatttgaggtgaatccagtctggaaaaagtgtttggaagaacaaggcttgaagtttgttggccaagatgttgaaggagagagaatggaaattgtggagttagaagatcatcccttttttgttggggttcagtaccaccctgagttcctgtccaggcctatcaagccctccccaccatactttggcctcctcctggcctctgtggggcggctctcacattacctccagaaaggctgcaggctctcacccagggacacctatagtgacaggagtggaagcagctcccctgactctgaaatcaccgaactgaagtttccatcaataaatcatgactgatcttgtagcggatgattcttcaagagacccttcaaacttgggtagagtttacagctctgactttacactcggctttggagactttctttaaattatgtttttattaagattattttattatgcggaaaggtatttgggaaacttgtcacttgcatgtcccatcacgtgtactggctcctctgtggtgtctgcctgttgcgtgacactctccttgcagttcttgagttgcggcagaacatcgcgatgggaaccgatggtgggtggggctgcagagtgccccatcggtcaccttgtttctcaactacctcgcatcattgcagatgctagcgcgttgcctgtcgctttcccttggatacctagaccgttataaagtgtgccacatggacttaccgagcatggagagaggattttagctaggatttgaacacttggtgctgggaacctcagggtattgcttgccactaagccatgaaaccagagacaaaatctctatactgccctgagttggggggaattctcagtgccaactgtggctggtcctcattcaaagggacggtcagtttggtgtcaacatgaaacaccaagatgtctgtctctgaagcgtgattttaaaatccccatgcctgtggctgcgcttcctatttctagggctgggaaacactccttgcatcaaggggtcacttacagaacaaagaatcttttgggggaaacttcctctaaaaccctctcatatatagacagctttgactggagggtccatttttcttccaggatggtgttactgcagttgaaagggcaatatgaagttactttcttaatgtgacctagcaataggcatagctacgtggcactatattctggccagactcgatgtgtactctaacttaagaaataaatcagtaaggcagaacaagaaaaaaaaaaaannnnnnnnntaaattatccttgagggccagttttcggtcccgtttttggcaaggggccaaaggggggggttaaaaaaaaggaggcggggttaaacctggtgggaaagccttgggctgggggcccttctggggatggaaccaggatagtg

SEQ ID NO: 630575 - DNA, 450 bp, Homo sapiens
  misc_feature (356)..(356): n is a, c, g, or t
tttgaaaagataaatagattaaatgaacttcatcaagggtaaaagagggtaaaaacatgtaagtttaaaaataaaaaaggaggtacaaccatgttacagaaggaattaaaagtcataaatcgatacaaagtgaaaacaaaaaagtatgatcttttaaacaatatacaaaatatcaaaattaatcagaaaagaactgggaaattttttaaaaaacattaattgccatagagaatatggaaaaggtgacttgaaaactaacattgatacagacagtaataccagatggtgtcatagctgagttttaacttttacaaacagatagttaaaatgctacttaaatattctaggccataganaatttttttaaagttctgtaattcagtagtaaaagaaaaaaacagcagattaattaaatataactgcaaaaataaaaaatcagccaatcagtca

SEQ ID NO: 630576 - DNA, 2457 bp, Homo sapiens
  misc_feature (2309)..(2317): n is a, c, g, or t
gactgatactgaatcaggaagacagaacagtgttagaaaactaaactgccagagaagggtttagtgcctaacctctgaaacaactttgttcttctagcttggtggaaccgtgggggacatagaaagcatgccctttattgaggccttccgtcagttccaattcaaggtcaaaagagagaacttttgtaacatccacgtcagtctagttccccagccaagttcaacaggggaacagaagactaaacctacccagaatagtgttcgggaacttagaggacttgggctttccccagatctggttgtatgcaggtgctcaaatccacttgacacatcagtgaaggagaaaatatcaatgttctgccatgttgagcctgaacaagtgatctgtgtccacgatgtctcatccatctaccgagtccccttgttgttagaggagcaaggggttgtagattattttcttcgaagacttgaccttcctattgagaggcagccaagaacctgctctattgcccttgtgggcaaatacacgaagttctcagactcctatgcctctgtcattaaggctctggagcattctgcactggccatcaaccacaaattggaaatcaagtacatagattctgcggacttggagcccatcacctcgcaagaagagcccgtgcgctaccacgaagcttggcagaagctctgtagtgctcatggagtgctggttccaggaggatttggtgttcgaggaacagaaggaaaaatccaagcaattgcctgggctcggaatcagaaaaagccttatttgggcgtgtgcttagggatgcagttggcagtggttgaattctcaagaaacgtgctgggatggcaagatgccaattctacagagtttgaccctacgaacagtcatcccgtggctcgtagacatgccagaacacacccagggcagatgggcggaaccatgaggctgggcaaagaggagaaccctgttccagaccaagaactcagtcatgaggaaactctatggagacgcagactacttggaagagaggcaccgccaccgatttgaggtgaatccagtctggaaaaagtgtttggaagaacaaggcttgaagtttgttggccaagatgttgaaggagagagaatggaaattgtggagttagaagatcatcccttttttgttggggttcagtaccaccctgagttcctgtccaggcctatcaagccctccccaccatactttggcctcctcctggcctctgtggggcggctctcacattacctccagaaaggctgcaggctctcacccagggacacctatagtgacaggagtggaagcagctcccctgactctgaaatcaccgaactgaagtttccatcaataaatcatgactgatcttgtagcggatgattcttcaagagacccttcaaacttgggtagagtttacagctctgactttacactcggctttggagactttctttaaattatgtttttattaagattattttattatgcggaaaggtatttgggaaacttgtcacttgcatgtcccatcacgtgtactggctcctctgtggtgtctgcctgttgcgtgacactctccttgcagttcttgagttgcggcagaacatcgcgatgggaaccgatggtgggtggggctgcagagtgccccatcggtcaccttgtttctcaactacctcgcatcattgcagatgctagcgcgttgcctgtcgctttcccttggatacctagaccgttataaagtgtgccacatggacttaccgagcatggagagaggattttagctaggatttgaacacttggtgctgggaacctcagggtattgcttgccactaagccatgaaaccagagacaaaatctctatactgccctgagttggggggaattctcagtgccaactgtggctggtcctcattcaaagggacggtcagtttggtgtcaacatgaaacaccaagatgtctgtctctgaagcgtgattttaaaatccccatgcctgtggctgcgcttcctatttctagggctgggaaacactccttgcatcaaggggtcacttacagaacaaagaatcttttgggggaaacttcctctaaaaccctctcatatatagacagctttgactggagggtccatttttcttccaggatggtgttactgcagttgaaagggcaatatgaagttactttcttaatgtgacctagcaataggcatagctacgtggcactatattctggccagactcgatgtgtactctaacttaagaaataaatcagtaaggcagaacaagaaaaaaaaaaaannnnnnnnntaaattatccttgagggccagttttcggtcccgtttttggcaaggggccaaaggggggggttaaaaaaaaggaggcggggttaaacctggtgggaaagccttgggctgggggcccttctggggatggaaccaggatagtg

SEQ ID NO: 630577 - DNA, 1461 bp, Homo sapiens
  misc_feature (1313)..(1321): n is a, c, g, or t
aacctaggctaggtagaggcccggggtaatcggccgaggggcccgccacccgattagaggtgaatccagtctggaaaaagtgtttggaagaacaaggcttgaagtttgttggccaagatgttgaaggagagagaatggaaattgtggagttagaagatcatcccttttttgttggggttcagtaccaccctgagttcctgtccaggcctatcaagccctccccaccatactttggcctcctcctggcctctgtggggcggctctcacattacctccagaaaggctgcaggctctcacccagggacacctatagtgacaggagtggaagcagctcccctgactctgaaatcaccgaactgaagtttccatcaataaatcatgactgatcttgtagcggatgattcttcaagagacccttcaaacttgggtagagtttacagctctgactttacactcggctttggagactttctttaaattatgtttttattaagattattttattatgcggaaaggtatttgggaaacttgtcacttgcatgtcccatcacgtgtactggctcctctgtggtgtctgcctgttgcgtgacactctccttgcagttcttgagttgcggcagaacatcgcgatgggaaccgatggtgggtggggctgcagagtgccccatcggtcaccttgtttctcaactacctcgcatcattgcagatgctagcgcgttgcctgtcgctttcccttggatacctagaccgttataaagtgtgccacatggacttaccgagcatggagagaggattttagctaggatttgaacacttggtgctgggaacctcagggtattgcttgccactaagccatgaaaccagagacaaaatctctatactgccctgagttggggggaattctcagtgccaactgtggctggtcctcattcaaagggacggtcagtttggtgtcaacatgaaacaccaagatgtctgtctctgaagcgtgattttaaaatccccatgcctgtggctgcgcttcctatttctagggctgggaaacactccttgcatcaaggggtcacttacagaacaaagaatcttttgggggaaacttcctctaaaaccctctcatatatagacagctttgactggagggtccatttttcttccaggatggtgttactgcagttgaaagggcaatatgaagttactttcttaatgtgacctagcaataggcatagctacgtggcactatattctggccagactcgatgtgtactctaacttaagaaataaatcagtaaggcagaacaagaaaaaaaaaaaannnnnnnnntaaattatccttgagggccagttttcggtcccgtttttggcaaggggccaaaggggggggttaaaaaaaaggaggcggggttaaacctggtgggaaagccttgggctgggggcccttctggggatggaaccaggatagtg

SEQ ID NO: 630578 - DNA, 1524 bp, Homo sapiens
  misc_feature (1376)..(1384): n is a, c, g, or t
gaggaccccaaaagtcactcttctatatctaccaccgatttgaggtgaggatccagcttgctggtactctggaaagatagtgagctgagagaccagcagaattatttttcatgcctcaacaggtgaatccagtctggaaaaagtgtttggaagaacaaggcttgaagtttgttggccaagatgttgaaggagagagaatggaaattgtggagttagaagatcatcccttttttgttggggttcagtaccaccctgagttcctgtccaggcctatcaagccctccccaccatactttggcctcctcctggcctctgtggggcggctctcacattacctccagaaaggctgcaggctctcacccagggacacctatagtgacaggagtggaagcagctcccctgactctgaaatcaccgaactgaagtttccatcaataaatcatgactgatcttgtagcggatgattcttcaagagacccttcaaacttgggtagagtttacagctctgactttacactcggctttggagactttctttaaattatgtttttattaagattattttattatgcggaaaggtatttgggaaacttgtcacttgcatgtcccatcacgtgtactggctcctctgtggtgtctgcctgttgcgtgacactctccttgcagttcttgagttgcggcagaacatcgcgatgggaaccgatggtgggtggggctgcagagtgccccatcggtcaccttgtttctcaactacctcgcatcattgcagatgctagcgcgttgcctgtcgctttcccttggatacctagaccgttataaagtgtgccacatggacttaccgagcatggagagaggattttagctaggatttgaacacttggtgctgggaacctcagggtattgcttgccactaagccatgaaaccagagacaaaatctctatactgccctgagttggggggaattctcagtgccaactgtggctggtcctcattcaaagggacggtcagtttggtgtcaacatgaaacaccaagatgtctgtctctgaagcgtgattttaaaatccccatgcctgtggctgcgcttcctatttctagggctgggaaacactccttgcatcaaggggtcacttacagaacaaagaatcttttgggggaaacttcctctaaaaccctctcatatatagacagctttgactggagggtccatttttcttccaggatggtgttactgcagttgaaagggcaatatgaagttactttcttaatgtgacctagcaataggcatagctacgtggcactatattctggccagactcgatgtgtactctaacttaagaaataaatcagtaaggcagaacaagaaaaaaaaaaaannnnnnnnntaaattatccttgagggccagttttcggtcccgtttttggcaaggggccaaaggggggggttaaaaaaaaggaggcggggttaaacctggtgggaaagccttgggctgggggcccttctggggatggaaccaggatagtg

SEQ ID NO: 630579 - DNA, 195 bp, Homo sapiens
  misc_feature (65)..(65): n is a, c, g, or t
tcagaatctggtggtgatgctttggctatctgcttcagatacagcgtcatgatgattacctggtnatgcttaaggcaattcggattttgttcaggagcgcctgacacaggatgcagttgctaaggcaaatcaaacaaaagagggcttacctgttgctttagacaaacattattcttggtttttgacacagggaga

SEQ ID NO: 630580 - DNA, 2462 bp, Homo sapiens
  misc_feature (94)..(94): n is a, c, g, or t
  misc_feature (130)..(130): n is a, c, g, or t
  misc_feature (154)..(154): n is a, c, g, or t
  misc_feature (173)..(174): n is a, c, g, or t
  misc_feature (215)..(215): n is a, c, g, or t
  misc_feature (228)..(228): n is a, c, g, or t
gcgcatgcggtcggggttgttcactggctgtccggggctccgcgcgcgtcgccggcccagctgctgtcgctgatcgggaggatctgaagccggncgcaggtcaaagagtaaactgaagtacattctggtnactggtggtgttatatcaggaatnggaaaaggaatcatgccanncagtgtgggcacaatactcaagtcatgtggttacatgtaanttcaatcaaaatngacccctacattaacattgatgcaggaacattctctccttatgagcatggtgaggtttttgtgctggatgatggtggggaagtagaccttgacctgggtaactatgagcggttccttgacatccgcctcaccaaggacaataatctgaccactggaaagatataccagtatgtcattaacaaggaacggaaaggagattacttggggaaaactgtccaagttgtccctcatatcacagatgcaatccaggagtgggtgatgagacaggcgttaatacctgtagatgaagatggcctggaacctcaagtgtgtgttattgagcttggtggaaccgtgggggacatagaaagcatgccctttattgaggccttccgtcagttccaattcaaggtcaaaagagagaacttttgtaacatccacgtcagtctagttccccagccaagttcaacaggggaacagaagactaaacctacccagaatagtgttcgggaacttagaggacttgggctttccccagatctggttgtatgcaggtgctcaaatccacttgacacatcagtgaaggagaaaatatcaatgttctgccatgttgagcctgaacaagtgatctgtgtccacgatgtctcatccatctaccgagtccccttgttgttagaggagcaaggggttgtagattattttcttcgaagacttgaccttcctattgagaggcagccaagaaaaatgctgatgaaatggaaagagatggctgacagatatgatcgcttgctggagacctgctctattgcccttgtgggcaaatacacgaagttctcagactcctatgcctctgtcattaaggctctggagcattctgcactggccatcaaccacaaattggaaatcaagtacatagattctgcggacttggagcccatcacctcgcaagaagagcccgtgcgctaccacgaagcttggcagaagctctgtagtgctcatggagtgctggttccaggaggatttggtgttcgaggaacagaaggaaaaatccaagcaattgcctgggctcggaatcagaaaaagccttatttgggcgtgtgcttagggatgcagttggcagtggttgaattctcaagaaacgtgctgggatggcaagatgccaattctacagagtttgaccctacgaacagtcatcccgtggctcgtagacatgccagaacacacccagggcagatgggcggaaccatgaggctgggcaaagaggagaaccctgttccagaccaagaactcagtcatgaggaaactctatggagacgcagactacttggaagagaggcaccgccaccgatttgaggtgaatccagtctggaaaaagtgtttggaagaacaaggcttgaagtttgttggccaagatgttgaaggagagagaatggaaattgtggagttagaagatcatcccttttttgttggggttcagtaccaccctgagttcctgtccaggcctatcaagccctccccaccatactttggcctcctcctggcctctgtggggcggctctcacattacctccagaaaggctgcaggctctcacccagggacacctatagtgacaggagtggaagcagctcccctgactctgaaatcaccgaactgaagtttccatcaataaatcatgactgatcttgtagcggatgattcttcaagagacccttcaaacttgggtagagtttacagctctgactttacactcggctttggagactttctttaaattatgtttttattaagattattttattatgcggaaaggtatttgggaaacttgtcacttgcatgtccaacaaaaaacacataaacaacaataaaaaaactttttggggccgccccgggcccccctgaaagaaaggcttttttcaacgagcacacaactcttctcgagatcgaggaggaccgcagacagacggtgtagcgcccccacccaagagaaagagagtggacaacctagagacacactaggttgggcacaataatacagctgggagttcaccattaggagaaagaccacctccaggggaggcaacaagagaacgtcggggcgcagtgggagtcacctgacacgccatattataagagaaaaaccccgcctcggagggagaaaaaccgaggaggcagatcggaggacaagacgcccaaatgaggtagtaccaggaggggaaatacagaggcggactattcacacgacgaggggtacaag

SEQ ID NO: 630581 - DNA, 800 bp, Homo sapiens
  misc_feature (559)..(559): n is a, c, g, or t
ggctgggactcgcgtcggtgggcgactcccggacgtatgtagtttgttggcgcctgggttctgagagccttgacttctctttacttttccactcttaggtcccacgattgccgcacggttaccatacctgggagtgagattcacgtccgtcggctgaccgtaaaaactctttaccgtcggctgacctctatgaaaggcaacgtgtggttctcaaatataggcattctgatgggaacttgtgtgttcacatagtaactagtatgcattgtagtttgtttggtgtgataaacacgagacctaaagctctaagatgtacacagtaaggatttgcagcaacatatgtccacagtcagctaactgcgacttattggtatgcccataggcaatgcccgccaactgttaccatgagaaactgagtcgaatggtttgaaatcgagagactttgtcagtgctactctaggacagtaccatgatcttttgcaatcagagaaagtgtagggacagacagtactttatcgtaactgaggtgggcctcgttcagacagcttcgaggtcattnttctcgtcaggttgtgctgatttaatttactttgtgcagaagctagggattgcgggattgttttcaggttcagaaagcctttatttactatttttgtgaaattgatcgagaaatgcagttctgtcttaggaaacctgggaagattattttgatgtttagggtaaacacgatgtaattggttgcctctggcaaggtttgtaatcgagttaactttgatagaatgagatattagggaaaaatc

SEQ ID NO: 630582 - DNA, 1507 bp, Homo sapiens
  misc_feature (6)..(6): n is a, c, g, or t
  misc_feature (1359)..(1367): n is a, c, g, or t
gacccntctggtccatgttaaagggggaacctagtttttccctgggaaagtaaagcccacaaatgggtaggtttaatgttcccattgcccacctttatcccagaaccagtactcagagttggtggtagggtgtgtgactgaagtataaatggaatgtatatcttttgtagctagaagaaggaaatctttctgcagtttcatgttaaatatattatgtagcaaacagtctttgtgattcctgccatgtgcaggcaagtgtccctgtaggaaccgtggttacaaaaacagggacgtaaagtgagtttttggtgggagatgatgcgtaaaccatctgagctctcacccagggacacctatagtgacaggagtggaagcagctcccctgactctgaaatcaccgaactgaagtttccatcaataaatcatgactgatcttgtagcggatgattcttcaagagacccttcaaacttgggtagagtttacagctctgactttacactcggctttggagactttctttaaattatgtttttattaagattattttattatgcggaaaggtatttgggaaacttgtcacttgcatgtcccatcacgtgtactggctcctctgtggtgtctgcctgttgcgtgacactctccttgcagttcttgagttgcggcagaacatcgcgatgggaaccgatggtgggtggggctgcagagtgccccatcggtcaccttgtttctcaactacctcgcatcattgcagatgctagcgcgttgcctgtcgctttcccttggatacctagaccgttataaagtgtgccacatggacttaccgagcatggagagaggattttagctaggatttgaacacttggtgctgggaacctcagggtattgcttgccactaagccatgaaaccagagacaaaatctctatactgccctgagttggggggaattctcagtgccaactgtggctggtcctcattcaaagggacggtcagtttggtgtcaacatgaaacaccaagatgtctgtctctgaagcgtgattttaaaatccccatgcctgtggctgcgcttcctatttctagggctgggaaacactccttgcatcaaggggtcacttacagaacaaagaatcttttgggggaaacttcctctaaaaccctctcatatatagacagctttgactggagggtccatttttcttccaggatggtgttactgcagttgaaagggcaatatgaagttactttcttaatgtgacctagcaataggcatagctacgtggcactatattctggccagactcgatgtgtactctaacttaagaaataaatcagtaaggcagaacaagaaaaaaaaaaaannnnnnnnntaaattatccttgagggccagttttcggtcccgtttttggcaaggggccaaaggggggggttaaaaaaaaggaggcggggttaaacctggtgggaaagccttgggctgggggcccttctggggatggaaccaggatagtg

SEQ ID NO: 630583 - DNA, 384 bp, Homo sapiens
  misc_feature (35)..(35): n is a, c, g, or t
  misc_feature (38)..(38): n is a, c, g, or t
gcgtcgactgcccgccgtggaccgcgactattacntgnaccggccgctgtcgttcgactccagtgcggtgaagctggagttccagaacatcgagcgcgacattacccgacgtctcggccagttcagcccggtggggcagatcatgcgtcgcatgtgccgcgaataccgcatggtggtgcgtatgctggaagcccgtggcaccgaggacttcggcctgatctcccaggaactctacggcgccgctccgatgctttccacgccggcgacccgaccctggcggacctgggcttgatgctctccgactacctcaacaacatcgacggccgtggcgacctcaaggacgaagccaagaccctcaccgccaaggatgccgtggcgctgttg

SEQ ID NO: 630584 - DNA, 176 bp, Homo sapiens
tgggcggggcacacattaggggggggacccgggctggaattcgaaatcggggggagggctgttccctggggggaaaacaacccccggggtaattttctttgtgggtccgggggttcctgggggggaagcggccctctaattaagcttttggggaggccctgggaattgccaacaca

SEQ ID NO: 630585 - DNA, 188 bp, Homo sapiens
ccgagctgataccctcgataagggcaacctagagtgagtggcacaatctcagctcactgtggtcttgacctcccaggttcaagcaatcctcccaccgcagcctcctggagtagctgggaccacaggagtatgtcactaaaccctgataattctttctttctttcttttctttttttggccttatcgag

SEQ ID NO: 630586 - DNA, 1060 bp, Homo sapiens
  misc_feature (414)..(414): n is a, c, g, or t
gcccacgtccaccttactaccagacaaccggttaggccaagaccatttaccgcaatataaagtataggcgatagaaatcgtaaacctggcgcaagtagatatagtaccgcaagggaaacgatgaaaaagttataaccaagcataatatagcaaggactaacgccctatacgcattctgcataatgaagttgaactagaaataacgttgcgaatggagagccgagaatgctaaggacccccgaaaccagagcgagctacctaagaacagctataaatgagctagcacccgtctatgtaagcacaaatagtgggaagagttaataggctagaggacgagcgatgggccgtaccgatggcctgggtggactagtcctggattgctccggaagtactagaagtcgtccagttgtcaancgttctcatgaagttagacctcacaggaaaccgtctaacaaatccctcatgtctaaaatttaaactgtattagtgtgccaacaggagcgaaacagcatcctgtcggacatacttaggacagagaagccgtgtgtaggacgaagaacgtcatacaacattttagagcaaccgcaagtacagttaggagctctaaaaagcattgtccacgcaaatttaaagacgaacgcgttacaaaagctcaaaaatccaactatctaaagaagagtcccaaagcactttttagaacgtggaaggtcctcagggacaccaaattgtgggaccgaaatcctacttcgatcctctttaattagacagaagctaaattgtgaaacgtcagttaacgttcaaccattgtgggaagggacattttcttgcacgtgcgacggtcgcctcacatggccctgggaccgtcccacggaatttcaaagaaccaactgggagagcgggacccgagttttaacacatgcctccaactagatcttacaaattccaagtcaaaacaagggttccattaattggaccccattcacgtagttaaaacccccaaaacacaaaggcacattggtacattaaaggaaacgggtgcaggaaaacgtccaaacaggga

SEQ ID NO: 630587 - DNA, 395 bp, Homo sapiens
gggaaactccaacagtgctatgaccagaggacccagaaaatagcctcaaaagtaagtaaaggtctcccatagcgagaagtggggcagagtttaatggctcccgtctgagattgagtgcaaagagacttaaaggagggtgcaggggatgccgagctgcaaggctgtcagatatacgtaatgaaacatccaggagggtgcaggggaggccaaggctgcaaaactctcagatatacgtaacacaccttccttccagaggacagcgcccccactaaggacaaacagggaaagcatcacattgactggcaggacagcgagggaaaggtctgggaacgcgtcagagtcgtgaggtcacacgcactcagagcagctccacagagctcagttctatacccgtg

SEQ ID NO: 630588 - DNA, 201 bp, Homo sapiens
ctgtcttggatagggtgaggataggatttagcatatcacagaagtataagggggaagggaaggtagaacagatggtagataaggccaaagggtcagaaaaacatcagttatattaacgtggaaaaagtaaaaagaaatgcaaatctaaatctgaattcatgggacatggactctgatttctctctaagttctatagaacaa

SEQ ID NO: 630589 - DNA, 216 bp, Homo sapiens
gattatgaaaggtgaagttgagtgaaaggagtttaggaacgtggaagacagtgagctctccccctaaccctgtaaaaagcatggtttccatagacccataattcccccttttatacatctgtaaataaatggaatgtttttaagaaaataattatgtccgatttagcctttttttttatatattaaaaaaaaatatctttccctttctgctttcga

SEQ ID NO: 630590 - DNA, 245 bp, Homo sapiens
cttagtgctccctggtttcgaggcgtacaccggcgcgcgcctcgacgcgcagctcgacgaccaggcgcgcgcgttcctgctcaagtcgccggagaagaaccgggtcgacgtggccacccggacggtgtacctgggccccatcttcgtcgagttccgcgactacatcaacgatttcggcggcagcgaggcggccgtgggcaagtacgtcgcgcggggagcactaacgaggtccagggagcactaag

SEQ ID NO: 630591 - DNA, 392 bp, Homo sapiens
gtttgttaatgtaaaattagtgttctgtctgaagccacgtaaggatgattctggtataaatatggtaactgcaggccagccgtggtggctcacacctgtaatcccagcactttgggaggccgaggcgggcagatcacgaggtcaggagatagagaccatcctggctaacaaggtgaaaccccgtctctactaaaaatacagaaaattaaccaggcatggtggtgcgtgcctgtagtcccagctactcgggaggctgaggcaggagaattgcttgaacccgggaggtggaggttgcagtgagccgagatcacaccactgcactccagcctgggcgacagagcaagactctgtcaaaacaaaacaaacaaaaagtaagtttggtaactacctgg

SEQ ID NO: 630592 - DNA, 481 bp, Homo sapiens
aataatgtcatttctctagacatacaacgcatataatcttccatgtgtggaacccttcagtatctccgggcatccaatagtttccatactttgtatttattatgctcaccatcattaaaccatgggctaatgcatgcgccccatatacatggatatatcttgctactccagagatacttgtgaaaatgctccgcacatatcattgtggcatcacctattattcatcagcttcgacacttttgatttcagatgtgtataccatctttgattcggctagttagcgcatgtataacatgttctttccctccatgccttgccgataccctataggaagttttacatatctgccctgatatgtagacgagtatgaacatcgttgctgtgcttgtgatactgaaatacctgtgacttttgctgatgatcctctgtgtttatactgataccctgtgccgtatttgtacactgccagacttctgagctg

SEQ ID NO: 630593 - DNA, 111 bp, Homo sapiens
accggtatggctagtcgtcagtgtctggttgctggggtcttacaacagcaaggatgtgcaggaaggtggtacaggctactcctagtttcagggccttgggaagtggtagtg

SEQ ID NO: 630594 - DNA, 221 bp, Homo sapiens
acatttgcaggtgttggtggtcgaaggcaaacttgaagcggtgcgcagcgccgaaggcagcaacgtcaccgagcgtgaactggccatggcgtttcccggcaaggtcggtgaggcgctgaacctgcgcgaggtcgagcaactggtggaccagctcaaccgtttgccgtccaaacaggcgcaaatggaactgacccccggcaagcaagtgggcggcagcgacg

SEQ ID NO: 630595 - DNA, 744 bp, Homo sapiens
  misc_feature (1)..(1): n is a, c, g, or t
  misc_feature (73)..(73): n is a, c, g, or t
  misc_feature (84)..(84): n is a, c, g, or t
  misc_feature (89)..(89): n is a, c, g, or t
  misc_feature (122)..(122): n is a, c, g, or t
  misc_feature (143)..(143): n is a, c, g, or t
  misc_feature (163)..(163): n is a, c, g, or t
  misc_feature (192)..(192): n is a, c, g, or t
  misc_feature (194)..(194): n is a, c, g, or t
  misc_feature (207)..(207): n is a, c, g, or t
  misc_feature (216)..(216): n is a, c, g, or t
  misc_feature (228)..(228): n is a, c, g, or t
  misc_feature (234)..(234): n is a, c, g, or t
  misc_feature (267)..(267): n is a, c, g, or t
  misc_feature (269)..(269): n is a, c, g, or t
  misc_feature (271)..(271): n is a, c, g, or t
  misc_feature (274)..(275): n is a, c, g, or t
  misc_feature (282)..(283): n is a, c, g, or t
  misc_feature (285)..(285): n is a, c, g, or t
  misc_feature (296)..(296): n is a, c, g, or t
  misc_feature (298)..(298): n is a, c, g, or t
  misc_feature (300)..(300): n is a, c, g, or t
  misc_feature (306)..(306): n is a, c, g, or t
  misc_feature (319)..(319): n is a, c, g, or t
  misc_feature (323)..(323): n is a, c, g, or t
  misc_feature (362)..(362): n is a, c, g, or t
  misc_feature (374)..(374): n is a, c, g, or t
  misc_feature (410)..(410): n is a, c, g, or t
  misc_feature (420)..(420): n is a, c, g, or t
  misc_feature (440)..(440): n is a, c, g, or t
  misc_feature (479)..(479): n is a, c, g, or t
  misc_feature (533)..(533): n is a, c, g, or t
  misc_feature (554)..(554): n is a, c, g, or t
  misc_feature (592)..(592): n is a, c, g, or t
  misc_feature (606)..(606): n is a, c, g, or t
  misc_feature (629)..(629): n is a, c, g, or t
  misc_feature (636)..(636): n is a, c, g, or t
  misc_feature (651)..(651): n is a, c, g, or t
  misc_feature (655)..(655): n is a, c, g, or t
  misc_feature (680)..(680): n is a, c, g, or t
  misc_feature (694)..(694): n is a, c, g, or t
  misc_feature (725)..(725): n is a, c, g, or t
ntattcgaatccaggtacagactggccaacctgcctctacagcgtccacagcgaacacagggctagataaggnaggagtatctnaaaangttttaatcggttctttccgcgtcacaagccancgggtaaggcaacggaatgtncgtcgcggccccctgtcgcnccgcggtcacaatactcaccctggcatcncngtcagcaaaacanacatttgtntcaccataaaanaccgcnccgccgcccctcgggtctcacaacacgcatcananancannaatattnncncccttgtcacncncntccccngaaaggggacccnaggngaccccccgggacacgccgcggggccggtagacagaccncaaagacaggcncccccccctcccgggtcccaccctcacacgcaggcnaaacacacanatcagactctggtccaaaanttgaaggaagaaaaaaccctgaagtctgacacccagtcntctaggcgactcccggccaaggcgtcgcgtaaggcaaccggagcgatgccagangcggcgacacgcccgcccctnccctgaagctcaggggctctaagaaaggaccggggctncctgtgcctaaacnactgggcggccccgcctgcactntggaaantgggtcctgcctgtnactnaattacaaggaataaaataaaagtnacagcatacaaggnaataccacaaggaagtttagattacactcanaccattgtatcaacttgct

SEQ ID NO: 630596 - DNA, 763 bp, Homo sapiens
  misc_feature (677)..(677): n is a, c, g, or t
  misc_feature (680)..(680): n is a, c, g, or t
  misc_feature (742)..(742): n is a, c, g, or t
taaaactaattctggcaggaatcagggtggcaataggactagcagcaccctggggtggcttcgcctaccatgagttaacgctaaagaacttggctcaaatcctagaatccttagccaccaacggagatcaggcattaaagagaattcaagagttccccagactctggaaaatgtagttgttgataacagactagcattggattatttactagctgaacaaggtggggtcttgtgcagttattaataaaacctgctgcacatatattaactctggacaggttgaggttaacattcaaaagatctatgagcaagctacctagttacatagatataaccagggcactgcccccaactatatctggtcaaccatcaaaagtgccttcccaagtctcacctgtttttcacctcttctaggacctttgacaactgtcttgttacaaatgtttggtccttgcttctttaacctcttagtaaagtttgtgtattctagattaccacagttccagagacaatgctggcacaaggcttccagcccatcctgtccactgacacggagaatgaaatcgtcctgcctctgggctccttagatcaggtatccagagatttttactcctccagtgccaggcagggcctacgtccataaactcagcaggaagtagttaccgaaaacagatctncgnccttctgcagcccccttaagattaaggaggagtatctaatctctgaaaggggaatgaagtangaagtgggactcactctggaa

SEQ ID NO: 630597 - DNA, 163 bp, Homo sapiens
gacccagggagcgtaagtgtcagctcgagggaggctgaacctgagcacgttagccatgcaggaacaatggcggagcctctagcccgatcaggagttggcgatgggcacctcgctggatcagaaggtcagtggacacccgtgctggatcccggacgaggtggga

SEQ ID NO: 630598 - DNA, 235 bp, Homo sapiens
tgcaggtagtcagtggggtttatttgacttcctttctgctgggcacaggaagctttcacagggctagggtttaagctggcttccacagagggcattcacgtgcacgtgggcctgatgccaaccccaggtcaggtcccgatccccggtcctaaggggcttccactcaggcttgaggcaagaatctgacggcagcagttcccgaaagcccttgccgatgcctggcttcatccagagc

SEQ ID NO: 630599 - DNA, 846 bp, Homo sapiens
  misc_feature (210)..(210): n is a, c, g, or t
  misc_feature (261)..(261): n is a, c, g, or t
tctggctccgtatgcatgcacaatgaaatgaccaccctggactacaatgtaccatgcccatgtgctgtgctgtgaatgaactgtggaatgtgcctgcccatgtggctgatggctgtgatgttgcccctgtgtgtgtgtgatgtgcctgatgcaatgtgctgtgtgacctgcctgcctatccatgtgcccatctacaatgatgctgcccancttgtgactcacctgtgcacccagtgatgatgtgtgctccgcccagtgtcnagagtggtgaagcccctgatgctacaccctcatgtgcctagatgcctatgtgccctatcccagccccttcacaatcctagcccgctgatatgtacgatgtatgcttggcatgttactgttgtgcatatgtgacatgaccgctgaaagtctggagaactgtgtgcagcctccgagttgtgtgtgatgagtgtgctggtggagagctctcgactatctgtactttctggctaagcggttgtgacattttggttgatgagtcgaggccactgaggtgtacattgttccaatcagtgtgacgacccttatgactagttgtgcttgaggattgtggacctagtaactcttgctctgccctaatttggtggcatcctctagtgcgcattgttgatcgcagctatcttcatgcagcgcgtgctatgtgtgctggggcagtttgcccttggcctgatggccagggtggatcacatcgcgccgtggactctccaaatgccgaccaggcggtggcgtcatgcgccacgggtctcaccaaccttggtgttggattccaaagcgccaggtgaaggaccggagaccgctggggccctg

SEQ ID NO: 630600 - DNA, 191 bp, Homo sapiens
  misc_feature (126)..(127): n is a, c, g, or t
ctaggcttgcctgaacttgggcatggaagaaagactggaaactaggttggaaacaacatacttatggaaaagaaagtcagcctttttatggctggttaacgagatggtcgagagtggattctcacnncaaagttgctatggttggtaaggcaggcccaactggtaagatgtactaatttgtgcttcccctg

SEQ ID NO: 630601 - DNA, 236 bp, Homo sapiens
cagtggggatgcccccccccccccaaaggcatctacccctgtgtataaggaaaaaccttttcctttgctggacttgcttgagcagttttattgtctggacatgtgagctgtgtgaaataaatgtgaaaagttcaaatgaatgccttttcctgccccctgtatacagattgtcatctgtacaaggaactgtatgtatgaaaacaaatgtacttttttataaatggctaacccttgga

SEQ ID NO: 630602 - DNA, 146 bp, Homo sapiens
gacttctagagtatccccttccaggcttgattagcaggccactctactcatgcatctaatttcgaagcgccaccctagcaattatcaatccatttaacctttccctcttacactgtatcatctttcacaatttctaatttctactg

SEQ ID NO: 630603 - DNA, 914 bp, Homo sapiens
ctgctgtgagagtaagttagtcaggtatatcggggccgagctgcgtcggactcgggatgcatcatgctcatgcatactcattggggactcagtgcatggtctccgtgttaactcgcgtcctgtcaggaggatggggaacgtttaaaacgactgagcggagggctgttgactgtcacgaacgtttatcggtaaacgaggtagagtgaagataaaggtagacgagggtcaccatgaacgtctggcatgaccatcgtactgcgtgtgaccaatgagcttcatggtacggtgaacgtgatgtcttccgagaatgagcgggtgtacgggaatcactgacaaagtggtaccgaacgtgtgagtgagggatgaaagcgagccatgatgactatctggcacactctccttgatactggtacctacacccacggtgatgttgaaaacaattggaaggattgaagatagcactgtatgtggtgggaaatcgataggaagtctctctaactggacagcgtgggatacacaccctgaaaaagagtggcctttgagaatgagtagagaaggaaatgactggggaggatggagaaggttttgtttgagaaatgaccgttgtgggagaaggtgttatagcagagcattgcaggttttatgccttactggccatgattagagagatgtttgcagaaaagaaagatgaggaagaaaaacagtgtcggaacgaaatcaattcggtgataaagacaacgctgtgggtaagctactctggccacatgacaggggtgcttagggaaggtgacagggattcatgtgattcccctgccaagggaatagtgggggccaccccacgatggaacctaatggggattatcagaagcattttagcctgcaaccattgaggggcagcaatagcgccacttatt

SEQ ID NO: 630604 - DNA, 310 bp, Homo sapiens
  misc_feature (13)..(13): n is a, c, g, or t
  misc_feature (306)..(306): n is a, c, g, or t
tcttgtcccccangctggagtgcaatggcgcgatctcggctcactgcaacctccgcctcccgggtttaagcaattctcccgtctcagcctcctgagtagctgggattacaggctcccgccaccacactcagctgatttttgtatttttagtagagaccgggtttcgccacgttggccaggctggtctggaactcctgacctcaggtgatccacccgcttcggcctcccaaagtgcctgggattacaggcgtgacacccgacggcccagctgcaactttgattcttagtaaggaagccagaatttgnatcc

SEQ ID NO: 630605 - DNA, 924 bp, Homo sapiens
gctttctttggcaagatggcggagtccgacttgactactcgcatcgcgcacacttttggatcggcatctagtcttaccgcttcttgaattgctctctgtacagggagatatataatgaacaggaattattacacggtaaaactttggaccttcttagtgataccaacatggtagacttgtgctatggatgtattacaaaaaccttttattcggatgatatcctcatgcttgtgagagagaaaagaaccacagttgtttggccaccaacttgaaaccagctttcagcgccagaaaacatgaacccaattgtgaacgattgtttgaagatcccagaaacctacaaatggcaactgtgggtcaacccagggatggttccgcaatgctctttgtgactacctggtggacaagcctttgtttcacgcgcccggacttattcagcatccactctacagatatgcaaaattccagtacgaatgtggggactttactcaggagacacgcagaatatctttatcgcttaagagtgcttgtttcccaagccacagattagaacatgcttacgttcacctctggggaaagctggcctctgcattcttcattgcagcatggttgccgccattgaagaccttacctggttaaagacgaccatagataagtaattctgggagttctcaacttcagcttctcagcagagaacatgctcatcactggtctggctggttcttaataccccaagtcgggatatatattgcctttctttacagcagaatttagcatcgcacgtgcacattcgattggtcccgggtacaacggttcaacgcgcgtacaatcgtagttaagggttattagccaaggcgtatacctggcgacggggcaggatctggtggacagcctatcatattacccttctctcgacatcttccc

SEQ ID NO: 630606 - DNA, 870 bp, Homo sapiens
agtatatcgctcacacctcatatcctccctactatgcctagaaggaataatactatcgctgttcattatagctactctcataaccctcaacaccgcactccctacttagccaatattgtgcctatgccatactagtcttgccgcctgcgaagcagtgggtgggcctagcccttagtagtctcaagctccaaccacatatgggctagactacgtacataacctaaagctactccaatgctacggctaagtcgtcccaacaattatattactagcactgagatgactttccaaataaacaacgtaatttgaatcaacagaaggcacccacagcctaagttatgagcatcatgccccctactatttattaaccaaagtcaacaacaaacctatttagctgttccccaacgctttaccttccgagcccctaacaagcccccctccataatactaactagctgactcctacccctcagaatacatggacagccgagcgccacttatccagtgaaccagctatcacgaagaaaaattctacctctctatacatagtctccctacaaatctccttaattataacattcacaggcacagaaactaatcataatttatatcttcttcgaaaccataactttatcccatcgtgggtaacgatcacccgatgagggcaacagacaagaaccgctgacacggacggcacatttcttctatactacaccctagtaggtccctttcccttaatcattggcctaatttgaattcaaaacccaagggtacgaacatttagtatgcacttgtggccagacttaagtctggccacaactatagggggttacaacacgttggaaaaaccttcggcaatattctcaaccg

SEQ ID NO: 630607 - DNA, 145 bp, Homo sapiens
gaagatcacccagtacatcgactttgatcatgtgttctctcgagagactgaagaaatcatcccagggactgtatggctgatctgctataacgagctgcgcagaagattgaggggtgtgagtacgctgactgtggggttgcccacg

SEQ ID NO: 630608 - DNA, 143 bp, Homo sapiens
gtacaggatattgatttcacggaggatggtggtcacgggacccctatcttgagtttgggtcatccatgtgggacgacgaacgggactttgcctgtaactgttgctactgtacggtaaactggctttactgtactactgtacct

SEQ ID NO: 630609 - DNA, 1217 bp, Homo sapiens
cgggtgcggcgtgtgtggagctggcggctgcagaagcagcagcagcagaaacatgcggcgggtactcatgatgccccgcgtccggaggcagacgactgcgccaccccaccctcgcacggccagggcgggaccgcgccaccagcccggacctccgtcgtcccgcggcgaccaaaagccccgctggccccaccgctgtgacatactctggactcgcccgcagagtttgcccgccggggagggtggccgattggcggagcgcactcctgctgttttccccaccatctcgtggatgtcgtccctcgggtggtgagagaactttgcagtgggctggagcgccctttgcggagaagcacactgacaggtgaaggcacaggacacagcacaagacgaccgaggccgcaggagctcggcagaagggtccggagcggacggtccggcacgtgcagggacgagtgcgcccgaggacgcgggccctgatgctcccgggctcgaggagcattgggcacttgcagggactgctctcggtggagtagccccgtcggggcccggagggattggtgcaacctgcggaaaaacacgagtgctggtcagcacggggcgtgccgagacacgctcccggagcgaccatcacgaatattcaccgactcgataatccgtagatccccgagcaggaagcatccgatgacgtcttcaacctcgctccccctttggcgtccgggacagctgacaggcaaccgtgccgaaggagcagcagaatcttgcggaggagatgccacgaaagcagtgcgagatgagatggaggaaagcaggggagctgacgagccacatgaacgctcgaccggccaggccagcatcgggaaaaacgccagaaaaaggcgagggaccaggacaacgggccaaaaaagccggccgggctgaatgttggggccaggccatgtgaccgtgaagaaggaaagaaaaggatagatttgatgagaatacgggtcaccagatatgaacggtatcaatatagggctcatcaaaagatcgaacatgaagtagaaacgagttatcatatatcataataaaatgtgtaggtgtcatcgagtagagaggacaccaaggaagaagataacaggagagatgaacgaggagagagaagtaaagatgaacgttctagccgacctatcagagaatcgaaatctagagatcctcgattgcatacgaaatagatgaaa

SEQ ID NO: 630610 - DNA, 798 bp, Homo sapiens
  misc_feature (482)..(482): n is a, c, g, or t
gcccgtttgcagacgcacgccgagaaaaccgtgtactattagccatggtcaaccccaccgtgttcttcgacatgccgtcgagggagcccttgggcgggtctccttggagctgttgtgcagacaaggtcccaaagacagcagaaaatttcgtgctctgagcactgagagaaaggatggttataaggggttccttgctttcacagaattatccagggtttatgtgtcagggtggtgacttcacacgccataatgcactggtggcaagtccatctatggggagaaatttgaaagatgagaattcaccctaaagcatagcgggtcctgcatctgtgtcccatggcaaatgctggacccaacacaattggttcccagtttttcatctgcatgcaaggactgagtgtgggatggcaagcatgtggtgttgcaaagtgaccagagggctgaatatggtggaggcatggagcgcttggggtccaggaatngcaagaccagcaagaaagatcaccatgtgctgactgtggacaactcgaaataagttttgcctgtgtgttttatctttaacaccagaatcattccctttctgtagctcaggagagcacccctttccaaccaattgtgtccgcagtatcctaaaaatcttgtgtgcctctccgctgaaagttccttttggttcccatgttttccttgtgcccttccatgctactggattgcagggtaagttatggtttggcataaaacttattacactgtttccacacacaaacacaaaaaaattgtgggcccgccccgaaatttaaa

SEQ ID NO: 630611 - DNA, 396 bp, Homo sapiens
  misc_feature (4)..(4): n is a, c, g, or t
  misc_feature (35)..(35): n is a, c, g, or t
  misc_feature (278)..(278): n is a, c, g, or t
cccnaaaaaaggcggccctgtgtaacctttttaanaaaaagaattgctgttccctaatacctaccccagtccaggacctagttacaagatgcctgctggaccgaataaatgaaaaaagcttctggcccgggtgccaaggttgtcacgccctgtaatccccagatctttgggaggctgaggcgggcggatcacgaggtcaggagatcgagacccatcttggctaacacggtgaaaccccgtctctactaaaaatagaaaaaattagccgggcgtggtgncggcggctgtactcccagctactcaggaggctgaggcaggagaatggcgtgtggggtgaacccgggaggcggagcttgcagtgagcagagatgatgccactgcactccagcctgggcg

SEQ ID NO: 630612 - DNA, 224 bp, Homo sapiens
tgcgcggctcagtatgtgtccaagcaagctgcagacatgattcgtctggatgacaagttagcctcaatagtgactggagtatgaggaaggtcgtctgatctttgataacttgaagaaatccatggcttataccttaaccagtaacattcccgagatcacccctgttcatgatatttattattgcaaacataccactaccactggggactgacatcatcctctgt

SEQ ID NO: 630613 - DNA, 207 bp, Homo sapiens
tccccccccccccccccggggagaaattgcctttttcaatggggccccccccccggggagttggggcccccccgccccgggggacccccttttcctgcgggcccgggacaaaccccaggtttgtttgccccccctgttttttgtggggtatgggatgggggccttcccttttttttttccccataaaaaaaaaaaaaaggtttgtta

SEQ ID NO: 630614 - DNA, 215 bp, Homo sapiens
ccccccccttccccctttaataaacgtgctccctgttgggtgtcttttttgaagactgcccggcctaggctttttgtaaagggttttcaagttcccggggtggtagccctgtttcctggtgaaggggtttttttccccctggaatgtgcctgtgtgggtttgtttgggtttttttatttatattttttttttttaccaagttttttgccccctta

SEQ ID NO: 630615 - DNA, 204 bp, Homo sapiens
cagaaacagaaggctatctcaatcatgaaaattattaatattaactgctgttagagaaatgaatgagcctacagatgataggatgttacatgtggtgtctgcatcggggtagtccagagtaacgtcggggacataccggactaggccgagaaagtgtagtgggaagacagttaacactttacgccgatgaatactgataatgaa

SEQ ID NO: 630616 - DNA, 186 bp, Homo sapiens
cctaatagttcaccgccctgtaggacatggacagttttgcagaaacatggtaaggcaactagaagcatactttctgctgaaaagagtctctgggggtcttgtctacgaaacatacattctttgtcccttacaaactcatacttcaaaaatgaataaaagcattggaaatggcattaaagttttaca

SEQ ID NO: 630617 - DNA, 130 bp, Homo sapiens
cctctctcccctggttactcacattaccagaccagcaatacttctcagcctcccctgattctcctcccagcacccccaacccatgctcctgagccttcaagccctgctcggatcccagttccatttcagc

SEQ ID NO: 630618 - DNA, 492 bp, Homo sapiens
  misc_feature (54)..(54): n is a, c, g, or t
  misc_feature (237)..(237): n is a, c, g, or t
accttctgtggcacacgtcaaaaaccaatcaggtcaactcgggcggtgttcctnctaaggttgcaggtgggcgagaaggtgtggctggctgtcaataactactacaacatggtgggcatccagggctttgacagggttttttccggcttcctgctcttccccgactagggcgggcaaatgcgctcaagccccacgggccttccacctccctaagcttcctggatggacccaccttantggccagtttgcatccttgcctagaccattttcccccccaaatggatttttcctccagggaggccaccctgacccacccccaatgcaccccctccccatgggttttctccttcctttgaacttctttaggagtccctgcttgtgtggttcctgggacacttaaccaaagccttttgggaccgccattctttttttttttttttttcaagaattggaaggggtggggagatatataaataaatcatgaaatccata

SEQ ID NO: 630619 - DNA, 347 bp, Homo sapiens
agcatgtcctttcaaagcagatgttgtcttctctctagttatgaaagtcctagacggcaccttcttccaatggaaggctgtttcctctacactgacaatctgtttagtcacctgcatcaatgatcttagctagatcttctgggtaacttgcagcagcttctacatcagcacttgctgcttcattctgcactcatggtcttctgcagcttcatcacctctcttaggcttcacagaattgaaacgagggccttgctctggattaggctttagcctaaggaaatgttgtggttgctttgatcttctattcagaccattcaaactttctccctagcagcaataaagctgtt

SEQ ID NO: 630620 - DNA, 225 bp, Homo sapiens
ggaggagcacttgacccccaaaatttgagactagcctgggcaacagggttagaaaccatttctacaaaagaaaaacaattagcctggtgtggtggtgcatacccttggccccagctacttgagaggccaaggtggaaggattgcttgagcctaggtggctgcatgcggctgtgatcacacaactgcactccagcctgggcaacagagccagatcctataaatgag

SEQ ID NO: 630621 - DNA, 135 bp, Homo sapiens
tggaagccccataagtaaatccccaaataattaaatttgcctaatggagcaatttgcagattaaaaaatagaacaattttcaaatctttggttttttttgtattaaataccaatccctataactggcaactccca

SEQ ID NO: 630622 - DNA, 296 bp, Homo sapiens
aatgaaggtcagggaaattaaatgattgagctgcagatacacggccagtaaatgagagaggccaaatattttgacaccttgccatgtgtggtttttattactctgagtagcctctagagggtaaatgtaggttttacaaaatgagtagccgtgattcctttcttcactaggaattttcaacatgctcaaatgattttggtgggggatagacataagtagtaaaaagcaggtttcataaaagcttaacttttgactggagtttgtaataactgcatcagttaagattaggttcacta

SEQ ID NO: 630623 - DNA, 558 bp, Homo sapiens
cttagaggattcctccataatgtgtgccaaacagtcttcgcacttcctgctttaccttcccaagaagctggaaatacaggtgtacaccatcacactcatcgaaactgcaattttgatccaacaagtgaaattacttatgagacccatgagggccaggaaataatcctaaaaaaggtactgacagtctgattaaaacaaacatcaacactgctaaattttacctcctcaatcctctatggaaaaagtcaaggttcttttggcacacatgaattcaccagcagagatacagtattgggtttttccaggcgcggtggctcaagcctgtaatcccaggactttgggaggccaaggcaggcagatcacctgaggtcaggggttccagaacagtctggccaacatggcgaaaccccgtctatactaaaaatataaaaagtagtcgggagtggtggcaagcacctgtaatccaagctactccaggggctgaggcaagagaatctcttgaacctgggaggtggacattgcagtgagttgagatcacactgggcacacattatggag

SEQ ID NO: 630624 - DNA, 491 bp, Homo sapiens
agtcaaataacccctactatttattcagatatgataaggtctgaagatggatggacgctatcattaattatcagccaacagcacctgacatgctgcgtgctgtgtgtcttgtaccgtagatgcagattccgtgatcaatgatcatctctcacgtgcacaaccatcactcacttgtgtccactttcttgctgcaaacatgtataagatgaaggtcaaccggtctccctgttctcatgcctacagaataagggaacatggctgggacaaaaccaacaagcatgaggcatggtcatgtcatttatattcatgaccacatatatcaatctggccctcactttcacacatgaatttatttagtatgtttgcatttatattttccgagttgaataatttacaccacctcctctccaaatgtttgttatttcggttggaataaatggtgtcagaaatgaaacctgaaaaagaacactattgaaatggtcgccaatccg

SEQ ID NO: 630625 - DNA, 675 bp, Homo sapiens
  misc_feature (46)..(46): n is a, c, g, or t
  misc_feature (83)..(83): n is a, c, g, or t
  misc_feature (85)..(85): n is a, c, g, or t
  misc_feature (91)..(91): n is a, c, g, or t
  misc_feature (100)..(100): n is a, c, g, or t
  misc_feature (583)..(583): n is a, c, g, or t
ggcgagcgccatggccagtccgggctgcctgctgtgcgtgctgggnctctactctgcggggcggcgagcctcgagctgtctanancccacngcgacaccnccaagaagcccatcatcggaatattaatgcaaaactgccgtagtaaagtcatgacaaactatggaagatactatattgctgcgtcctatgtaaagtactgcggagtctgcaggtgcgagagttgcaccaggaaggctggatcttacagagaaagactatgaaatactttacacatctatcaatggaatcctttaccctggaggaagtgttgacctcagacgctcagattatgctaaagtggccatattgtataacttgtccatacagaggtccgatgatggagactattctcctgtgtggggcacatgccttggatatgaatagctttcactgctgattaacggacagtgcttattatctgccacagatactgatgacgtggcaatgccgctgaacttcactggatgtcaatcgcacaacagaatgttccttttgctactgagttgatgctcgcattagcacttgaacctctgactgccaatntccataaggggagcctctccgcgaagaatctaccatgaatgtgtatggtaacatggaagggcataagtctccctgttggggtcagcagcttc

SEQ ID NO: 630626 - DNA, 948 bp, Homo sapiens
ggatggcaagctgattccaccacaagaatggttctgcccagaaagccagttgcagggccctggatgtctcggctttaacaagttgtattcccttatcagagcctgctccagttcccccaatacccaatgaacagcagtttgagccagactgacggattatgtggcttgcctgtgaaaacgtggatttagtcactctgagttcaagattcatctttcagaatcctgtatacgtgaccaacgtagaaatgtacaagttcgtattttcaactttattgggttggttaaagcacctcagtattaccgttactatgtgataaaatacgatatagaatataagatatactatatacattttgtccatagcacgttcatgctgaaatagtgcgttgacaacacgttctcacttttgtagctagtttaactaagtctggaatggagcctgtctaggtattcacggtaaagttttctgaggtgactcactaacacataagatttgcctgtttcatgtacgcaaaagtgtttgtgcaacctgtgcttgtctctgtgcccagcacgatgccgtgactcttatatgtaccatggggtgaccatgatactggttcattttggccttgaagaacatgtgctcaggccagtatctgaatcactggggattaatgatcagctcttggggaagatgttttttagcccgactctgaaagggtatgttgattcggaactgcttggaaaagtgaccattgcctactaacaagttgtaacttgaattcatgtgtggtatcaagaggcgggaggggcacaaaagggattagaatttgaagagataagggggcgggccaggaacaatgggggattgggcacaaaagattgatagcgaaggataataagggatgacaaaatgatataaggttagtctgtttttgtgtccgctggtgtttatatctttcgggt

SEQ ID NO: 630627 - DNA, 206 bp, Homo sapiens
  misc_feature (93)..(94): n is a, c, g, or t
  misc_feature (133)..(133): n is a, c, g, or t
tcttcatgcagttttccataatggctgtactaatctacgttcctaccaacagtgtgtgaattcccttttctccacatccttgccagcatttgnnattttttgtctctttggataacccctttcggaaatgggngggaaaatgatagctttctttgtgaagcggaatatccagaacacagctctcggagctaggagcagatgatttt

SEQ ID NO: 630628 - DNA, 1063 bp, Homo sapiens
cgcaggatcgagggctaagatctgatgccttggagctcacgtcaaggggcgcttctctttaccatgagtctttcgccagaatgtaaatccttgggcgttcctctgccaaagagttcctgcgtccggggactatcccggcgatggggaggaagccctgcaccttgcgaaccgcgcgttggagccgcaatttttatcgagaacaccaattcgtcttcatccgagcgtgtaatcattaggaaccctaatccgctgttcgtcggtccgggcagttccctttcgtgcggagttgtgcgttccggaaggcggtgtagtcacatagggggttcctctctaatgggccccgtttggaagggcgacaggaatctttgttcgaaggctcactaggtatcgccaacccggaggctctcacatgtcatcgttgctatgggcatggatgcttaatgtccacgtcctgggggaaaggctaagccaccgcctcctgatgatgatggatgcgtggctccacggacggcggtggttaattccagttggtgtccattttcctctcccaccaacgtatttccataggtccgtttggtcccctgagcccttccttgtggaccgtcctgggatcccgattctggagggggtttgccttcttggatccaaaggccctgttgtttccgtttttgcttttcttttttttttttctttgtttttttttgatgagcagagtttcactacttgttagctcaggctggagtgacaatgacgcgatctcgggctcgcagcaacctctgcctccttgggttgcaagcgatgctgtcgcctcagatatcgcaagtggctgcgattacaggtgcccaccaccacgcccagctgattgttttttttgtatttttagtacagatggggtttcaccatattcaccaggctggtctcgaacttctgacctcgcgtgatccacctgcctcggcctcccaaagtgttgcgattatcaggtgtgagccatcagcgccggcccaattgtcatatttaactactccatgtgtcgtacatattaacttcacactactacatatcc

SEQ ID NO: 630629 - DNA, 291 bp, Homo sapiens
cggcgcccagagactggagagacaggcagccacattggcttttggcttaggaagggaagggcctggttatgaggtgtggtatcctgctaacagcagccaaccctctgctcacaaggaagaaagtttggtgttgaggggggtgacagatggctgtaagaatgtgatcatacatatagctgagcctggtctgttgcactgttctctcccatattcttagggtccaaaggatttgccgcttagctttgaaaagctattgcttgccttggtcacatagaaactgatatgctctgc

SEQ ID NO: 630630 - DNA, 359 bp, Homo sapiens
gcgtcgaccccatgtgttttgctccctctcttcccctgaattccactaaaatgtcagtagtaaagaagtacaagaggctgggcacggtggatcacacctgtaatgcagcactttgggagacccaggtgggtggattgcttgagaccagtctgcacaagatggtgaaacctcatctttaccaagaatacaaaagattagccgagcatggtggcatgcacctgtggtcccagctactcccagatacttgggaggctgacgtgggagaatcactttaacctagaaggcagaggttgcagtgagctgagatcgagccactgcactccatcctgggtgacagggtgactccatctcaaaaaaaa

SEQ ID NO: 630631 - DNA, 277 bp, Homo sapiens
cctgcccgttttttttccatggagccccaagcccctttggggccagggacaccaacaaggcttttttttgaccctcctgttgcacccagccctggttttagcagggaccacccctggctccactttttgagctttttatgtcctttaaatctcccactacacccgggcgggtggaaggtggagttttcaggtcttggcgccttgcaagggcagaacactaacctgaccgtggcggggctttcggtatccgcccccaataaaagcaattccaacctta

SEQ ID NO: 630632 - DNA, 121 bp, Homo sapiens
ggctgggagacggatctggtttaccatctttaaacaaaaggcaaatgtcttctcttccttcagaccgagccattaacactaaaattcttgtctgggacttcttccctcctgggtgctctgg

SEQ ID NO: 630633 - DNA, 85 bp, Homo sapiens
gcggccgcctactactactactgctcgaattcaagcttctaacgatgtacggggacatgcaataaatgttctggttttaaaaagt

SEQ ID NO: 630634 - DNA, 1632 bp, Homo sapiens
cgtgacgcgttgggtcgatcacacgcgttcgggttgttcgtggcttccttcgcttatcggagaccaggtctacatccgagaaaccatgtccaaggggatctgctagatgggctattggatcctgggaaccaacctacgtcttgtggtgggtgttctcccacgccataggtaacaagtcgcagataaattgccaatggatctaggggcacaccagaacctagttccaaagctatgtcgccgtttgacaggagcactgcaacaggatatgatctggtggcatgccggcaggcagacacatcgcaagcttagctgaatgcaacaccactacacttagacacaggtatctcggagtgcgccaatgcggtccgtagaagttggggacagctcggtatcactcgcattgcatgcctgataaggtccacagatcatgccagtcatggcaacaccattttggccccatttagaaatggggtggctgcacatgcatgccgtggccagggcatcgaaaggcgtcgcacagctcacgcaatcaccaaggggcagcagcaacccaacaacagcctgtctcatcccagagaggaagcgtgattccattcttagtgggatttccttgatcgcagagccttgaacagggcaaaacttggcaccgaaggccttacccaattgggggaaagcaacatgatatacaccaagtggggtgggtgggtacacagggatggccaagtcggttacactattaaaagtagaacatcgttcaagaccggtccaagggagaatagcgcaggaaaaggaactgggccttggggacacccctactgtggcatggggatcctacacaacgaggtacacattgacgcaccactactcactgtaacgctgacacgcgccacccgtggcttgcgccgtgcccttcaatgtaggccataacaagggcgatatcaccaccgacgaacacacgagggttcgcgaacagcaacccacacagacacaaccagttaggcactacaccacgaatctagacccccatgcgcacatgctgaggcacaccacgtatatcgcgccatgatgtctgtcagaccatcactaccacacattaactgagaagaagagacctaggaacaacctcattgaccagacgacacacaggttctccacccgaactaggagagcgagacacccaccaaacaattaggggcggaggcacaacaaaagccgtgagcagagacccggacaaatgagcgaccaaccagagtagaatacagacacgacgtagtactaagagcacacaacgagacgacaaacacgccactcacgtgtgaatcaagagcaagaccaaagaaaaacacacaaccaaacagatcgaaaaccaagcgaccaggacgacgaacatccaagcaaaccagcccaagagtcaagacaagcgaaagcgaaaggaaagagaacagcagcagagaggagacaagcaacgaagggagagacgaagcagagagagcgcacaaccacgagcgagcagccgaaaaaaagaagctagacaacagagacaacacaaaaacaatcataggaggacgaaacgagcagaaacagacacgagaacaaacgactcccgacgtgcagcaagaaacgagatacaca

SEQ ID NO: 630635 - DNA, 760 bp, Homo sapiens
taaagaccagataatggggagaggatgaagagtcatatcacaagtgacgacgtcgagacacttggattccagtcaatgtccaccagtagagtgcagctggtctatgtgtgcagtgggatcaaccaagtgaatcatcgaggcataggatatcgaggttaggtgagatgggagagggctccttcaaggtaatgacctgaggtctgtggaatgaaggtgttacagctgggtcgtgaacgttggtagtgctacgcaagtaggagtataactactcttgtgggaaatatggaaaaacctacgcatattagctatgtgaactatgatgggagtgcgccacgagggaaagtagaaagtatgatcgaaacaaggtgataacaggggtagaatcggtgcatgggctggacgtgtgcatggtcctgattgttgttgatagtgtaggtgaatgagaagactggtatgtccaggagatgggcacgatcccgatcacgcagtggccttcgggtctttacacaccgggggggatcgaataacagcgtaagttagtaagcgtgattaacgcatcagtggagttccgacgtaatacgcatcgctgacaggacgtgagaatctagtatggatttgcaagttgtccgtggaacgtcgcaacgactgagcttaagcaaaagtctggtgccacacccgacaagtcgtacgtgtctgtgcccagttctttgggttgcacctcgtctgatcacgatgcttggcaagcaaaggtggtaacagt

SEQ ID NO: 630636 - DNA, 443 bp, Homo sapiens
tgatgattacaagcatgagccaccgtgcccggccagtaattttcaatagaaagaaattctaatacactaacaggaaaacctagagtgaatgaagtgtactacaataggactttacaactctgaaacaaaagagctattaatggacccatttctcccactctaatccctcctcattttctttttcttttctttttttttttttttttttttttgagacagggtcttggtctgtcacccaagctggagtgcagtagcaccatcatagctcactgcagcctccaagtcccaggctcaggcaatcttcccacctcagcctcccaagtagctgggacaacaggcacatgtcaccacaactagctaatttttttattttttcatagagacagggtctagttatgttgcccaagctggtcttgaactcctgagctcaagtgatcctccca

SEQ ID NO: 630637 - DNA, 926 bp, Homo sapiens
tgtggtggctcatgcctgttatctcagtactagaagaggccgaggtagacagattacctgaggtcaggaattcaagaccagcctggccaacatggcaaaactccatctctacaaaaaatacaaaaatagccaggtgtggtggcaggcgcctgtaatcccagatactctggaggctgaggcaggggaagtgcttgaacccgggaggtagaggttgcggtgagccgagatcacaccactgcactccagcctgggtaacagaagaaagactccatcgcaaaaaacacaaataaccggaaacaaaacaacataaggcaaaataacactgtggcacgattcaagatggacttggcagaattcactgctagcaaaacttgacacgactgatacacacaatactccatgtaattcaggccgggcgccgctggctcacgcctataatcccagcacttcgggaggccacaggcagcgcagatcacgaggtcaggagatcgagaaccatccgtggctaaccacggtgaaacccggtctccaactacaaaaatagcaaacacaaatttgaccgggttgtagtggtgggccgcctggttgtccccagctaccttccggagggctgtagtgcaggcagaactgggcgttgaaccctgggcgaaggtgggagcttgccatgtgccgccggagactggcgccattggcacctcacaagccgggtccgacatgagccgagactccgctccaacaccaagacccgacaaaccaagagaacacaccctcacaacataggcatggagccgcctataaaccaaacagtcagcccatgggcttcctcatacagtgatgagaagctgactataagttgaactcagacgcatctcgcacactggggacctcactcgtagagatctgatgatcctacacagaattcaagc

SEQ ID NO: 630638 - DNA, 774 bp, Homo sapiens
tcacgcttaattcactttatttttctggtataaaaaccctatgttggtacccacagcgggagccggagtccgctgcagggaaactcgggggggggtctggacgagggggtcagggaactccgtggatggggagactgggtgaattacaggctcctccttctccagaggttcgggggctcaggtagctgtaggtcttagaatgtggcttcaaggggtggcctgggcgaagtttgcccagggtgtggcagtgcagccccgggctgaggtgtagcagctcactcgataccagccatcatgagcagcttcttgaggcacgaaggtgcggagacgatgccagtgccccgtgggttgcgagggatgaggcgtaccagcacagagccgcaggcggcctgtcacctgtgcaggggacagtggggggcttgccgatctggtccccccagtagcctcgtgcgcagcggggacgatggagacgctggtgccatggtatgtatggcccccagggttgggggggggccacctcctgggaggccttaacacccagaaccgatgtggccatgtgtgagtccccgaatagccaacaattgcgcttgaacctggtgccgctggccggacaggggcactggcgctagcagggcataaccttcaaaactccttccttgtgaaaagaggcccccggaagaaatccagactctgatacctaagggcggggaaagaaaaaccccccaggaatggatcaaggctgaccacggccatgggagggtcccctaacggtgc

SEQ ID NO: 630639 - DNA, 914 bp, Homo sapiens
tgttggccactcctcgggcgccactttcagtgccgtgtgtggtcccccgatccttttgggggcccatgcattggggcccctccgcccatctccaaggggcctgtgcgctggtgaccacccgttcggagagtgcttctgagtccaaggggctggtcacaccacagttggaggaagtccatctgcatggccatttggccccccagggcccagctgtgctgacgacattagaaggtggccacataggtctctggggtgagaagaccagcacagaaaactgccttactgaagggaatggggccctggtcaagaagggggccaggcatctggaatcaggggagtgcatcatcctcaggagctggcccacgcccggctacaccccgggcaccccgcctttccaatcacgctgggcgcccacctttcctccttaagacaccccttttggccctcacgtctgtgtccccttttcacggtatgagattggggctgctatatggggactggccctcgtatgggttgaggccccacggcacgcttttcacgccccgtatgcacgtggagcacggccctgtcctgccctcccacgccatataccaccctccctggaggccacgctgagatgccctggctaacttggcaccccgggaacttcctgacacccaccacgtccattaattcctcacggggcctgtggctggagaaaaggtgcccagcccccacccactcctcagctgccccccacacctcttctatggcacgagaggcacgggagtggccctgtaacactagactgctggggagttgggtttgatttgttttgttttttttaattcccttttgataatttttttcctgcttctgggtggtggtggcacatggatgaatgagtatttaataaaagttcccaatttccacca

SEQ ID NO: 630640 - DNA, 87 bp, Homo sapiens
attcattacgaacgaggaagccgcggcggagcccgaaccccgcagcctgagccacctccgtcatctgggcccggggcctcaccgcgc

SEQ ID NO: 630641 - DNA, 450 bp, Homo sapiens
  misc_feature (101)..(101): n is a, c, g, or t
  misc_feature (236)..(236): n is a, c, g, or t
  misc_feature (284)..(284): n is a, c, g, or t
tcacttcctgaggttgacatttgagaagaccaattggtggtggctgctatagatgacagtggggcggtcagaacaagcaaagacgtgggtgtgtagaaagnagaacgaaagagtcctcaattacgggtgggctggggtgcccaagagtcacctttcttagcggtcgctcaacagaccgtgtctcaattgttggatgcccaaagtagaaaatgcgctccattctcccaagtgcacgnaaggaggtaatgggctactcctcaagaggtggtcattcaggatggagncgaggaattgatctctccacccatgcatctcctttgtgcatgtagttcaacaagagggcaacttcaagatacgagccgagatgtccgtccagaggccaagggcacaaagaggggacagtccatggcggtctcctaatggggtgatgtccaagcaagccacttcatg

SEQ ID NO: 630642 - DNA, 718 bp, Homo sapiens
  misc_feature (44)..(44): n is a, c, g, or t
ttagccaaaccatttacccaaataaagtataggcgatagaaatngaagcctggcgcaatagatatagtaccgcaagggacagatgaaaaattatagccaagcataatatagcacaacggactaacccctataccttctgcataatgaattaactagaactcacttatgcaaggagagccacagctaagacccccgaaaccagacgagctacctaagaacagctaacaagagcacacccgtctatagtagcaacaatagctgggaagatttataggctacgaggcagacaaaaccataccgcagcctggctgatacggcatggttgtacacgcatagaatctatagatacaacctccacaactacagcccacccgaaccctctaacacatccccattgctacaactacacacactgagaaagacacacaaaggcaggaaccaagctaccacacgagacaactaggcgaagaaaaacaaccaggacagacgcagcagtaacacaactctaacaaccgcataaacacagccacaaaagcaagccacccaaggacgaaaagcgtacaaagcagtcaaaaaacccaaataacctaataaaatccccaacacatctaactgaacacagtaaaggccaataggtaccaatcttatcaccctatagacgaactcatggcagtccaagtaacctgacacacataccctccggatacagctggtagga

SEQ ID NO: 630643 - DNA, 264 bp, Homo sapiens
ggatcaccgtgcttgccacaaaaggattggccttactaaattactggtatcaaaattttatcgaaaaagggacaaaatagcttaacatatttaataccgtatttcaggggagatacaaaacatatttgaggtatgtactcttagttgactgtacaatgtattgtaatatttaaagcccatatatattacatatagtctagcacagactagaaatagattatcagtagtacatattaaatacaacaatattaaacaaataagtaa

SEQ ID NO: 630644 - DNA, 125 bp, Homo sapiens
  misc_feature (19)..(19): n is a, c, g, or t
gactctagcaggatcttanctatacacctaccacaaattatgcagtcgagttccacatttggggaaatcgcagggtcagcacatcccggagtgcaatggataagcctcgccctggtaggtatcag

SEQ ID NO: 630645 - DNA, 142 bp, Homo sapiens
gataatcaggaagcgggcggtggaggagcagcagagggagagctcggggatggaggggaaacagcggaatatctaagataatcgggagggcagcagaggaagagaacgaggacaggagccttggcagtctactaccagggaa

SEQ ID NO: 630646 - DNA, 108 bp, Homo sapiens
accctgtctccagactctattctcctgcctcatttggacccctacaatctaattgtgaatgtaacaggtaaaaaaagttgcaaataattacgtagaaggatagcttca

SEQ ID NO: 630647 - DNA, 102 bp, Homo sapiens
cactctccttttgcatatgtgcagtatatctagtacctaacttcgcaaccaatggaactgctcggtccaaatggtatgtgcatctataactttgacagacaa

SEQ ID NO: 630648 - DNA, 253 bp, Homo sapiens
cgctacaatatataatcaactacaaataaaaactaaacttaagctgatatagtcacctatcataataaatctaaaagcatagcccttctattggtattaatacggggctctgtagtcctttctctcacattatcttttaaatacattttatcctccatgaagcagcttcatctcaccctccgtcatgtcttagaacccttttatcttttccttcctcatgctcctcttctcagtcttcatattttcatgtgag

SEQ ID NO: 630649 - DNA, 279 bp, Homo sapiens
gcacaatgcgagctcatttacaacatggaatcggtgcacaatctggtctacgcccacgctgcagttcaccctatacaccgtcgcgcggttgacatcaaccgggcgctcggcgcacaactcgcagaagcctcgcgtgtcgtggatcaactggcgcaccctaagagcgtcttcaatggaactcagtcgagatcaacccgctctgccagttcttctctggccatttatcagacaacacctgattgccgtcgcagtttcatcgggttgattgtctatggcacc

SEQ ID NO: 630650 - DNA, 901 bp, Homo sapiens
  misc_feature (386)..(386): n is a, c, g, or t
ctcgggcgcgtctgctggtacctgcgtccgaccggcggacaggctgctttggttatgtgacctcgcagggcaggacggccatcctctccagaagtgagagatcttcgttgccaggtgctgctgggctgccccttcgtgggtgtggagcgagccagctcgctgatgtgcgttctcctgacttgaagccagaagagcaatcgtgtacgtgcgctgaagccgaccatcgtgctccgtaccaggacaactactgcgtgactgtgtctgctagttgccggcattgggaatcatcgtgacactttggaccacaggcctgagcagagaccatgttccccgtgcctggccaccatcccagaacggcgatcaactgcttggctgtggcgttccantggagcgtcaagctggcctgtccacgaggctttctgtggcagacttatcgatgctggcggcgcgcatgagcgaggctgctggggcgaagccgtcgagccactggcgtggagtagccggggctagctcgctgaggcgctgctgccgggtcccttgctgacggctctcggggcgccctgtggatcgcggcgctcaagaaacccgcttgttctcgcacttcggagtgccgcggccagaagtacgagggcacacgggacatacggctctcaagtggcgcatgtgtcttcggggaatcaccccaacggagggtggtaactaggtggggaaggacgcgccccgttggaagcatcccccataccaccaggttggcctcgtagaagtcggtagattggcccccatttcgcggttcgcccgaggggattcgatgggctcccaggctcgtccgggtgggcaccacggcatacacccacccgtgggcaacacaatcagtgtgcaaatggcgaccctacaaagcaaa

SEQ ID NO: 630651 - DNA, 677 bp, Homo sapiens
ctaggcctaggcgctgattcggcactacctgtgcacgactaagaaggagcacatctcaactgataacatgtctttagaaactctgagaaacagcagccgacaatacgctatttgatgagagttaacagactcaaaaaatactgaggtgatcactaaactatgtcactctatctcatttctctgaactgaaagaggagaatgtccagtgagcagccgctattaccgtgtcttacaatgtaattccatacaccgcgcattgaaaccattgtgcacaatggactacacatgtctacaaagatacgagtttgacgatgacattggcacattatgctaaactatccatgcagcatgcctataagtacatatatcggacgacactgtttagtgctcaggacacatatctcatattcattcacacatatcatatgagatagctgtccaacatcctgactgggaagattatgaaagcaggacaaacagaacatcattttaaaatgtcgtcagctgttcttgaatagacgtattccaacatattctgaacattgatgctggaacatgacaattggtgtgatgatgtagaaatataagcttagtttggccatcagcattgtgaagatctggtcatagaattttcgaatccttgcataaaaaaaagccgccctcctaggctcagaggg

SEQ ID NO: 630652 - DNA, 453 bp, Homo sapiens
ggctcgcgagcatatacggaagggattactgacagacgcaggacgtgagtactgagtaaatgggtcaggagtctaactaccttgaactgatctcgaggtgactctgtttgtacgcggcaagaaaaggtgatataagctttgactttggctacacaggtctcagcctacaatggggttcggagcatctgagtcatgattcgtaaacgattgttataaccatgggttcaaacagggaacaagtaagaggtctggtggcaagcggacaagagatgagtccgtcaacccccacaactgagacttgagagggatgagtgggtcctgagaactcaggcaaagctgagtaggtggccccactatcaattaaaaaagagatcggcttacctgctactagtagagttaccctgggctccgatgcagtgatggcagtgggggccgggagccggggcccagggg

SEQ ID NO: 630653 - DNA, 590 bp, Homo sapiens
  misc_feature (282)..(282): n is a, c, g, or t
  misc_feature (299)..(299): n is a, c, g, or t
ttctacaggatcgccaaggtgaaactagaggtgtggccagatcggggaaatattttgtttctgctctaaattgtccttcctgttgcctcatactggaatgatcttcagtgctttagggttagtttcatacttggctcatgctggaaaggaaaggtttcctgaagccttttcatagtttatctgaagtgatttctgtcagtgaaaataggtatcttagaaattctaaagtaaaacaaaaatgataaatgctttatattatctagacttttaggtagttatacnaaggtcacaggaattangtatggactcagattctaactttagcatgatatattaaatgtctgacagacttgaaaatagacctgtctttgaataacttaaagccatatcaagagtaaattccttgaagtgggtaaacgtgaagttttctatgtataattgaccctacatcgtgataatgtcaaatatatttatacttgatctcttcttaaatggcctaagtggggaagggaaacctttcattttagtgtaaagtttattgattaatctgtggtgtaacagttcaagttcaaggtattgagacagataga

SEQ ID NO: 630654 - DNA, 152 bp, Homo sapiens
tcgtaggtttagatgaatgacttggccaggtaaccatgtagtaccacgccacatagccacgtaccacaggctaccccaggcatacgtcaccctaccatagggaaaatactaggtacctaccaggacgaccgatatacccacggacaccctac

SEQ ID NO: 630655 - DNA, 265 bp, Homo sapiens
  misc_feature (265)..(265): n is a, c, g, or t
agccgactcggaccgatcggaagctgcagcacgagcggcttcgcgcccaggcgcttcacgatggtgtgacggtgaagtagaagtccgcgccgagcttgtccatcttgttgacgaagcagatgcgggggacgtcgtacttgtcggcctggcgccacacggtctcggactggggctccacgccctccttgccgtcgaagacggcgacggcgccgtcgagcacgcgaaaggtgcgctcgacctcgaccgtgaaggccacgtgaccggn

SEQ ID NO: 630656 - DNA, 1035 bp, Homo sapiens
cagtggcgacaacgatatgaaactactagtagcaagtccgtaatctctactggggtgcaaatacagtctgttctgggctgagctatatagggtgtcaactaacacatatcttataaccaattgcaaaacatactggagtagtaaccaagatcggaagagattgatcttttttctactatgagtacttaaacaagaaactaaactggttcgccgattaacatagatacacacaggggtgagctatctttatccatataatacctcgtgtcactggtaactctaataatccctccgtctatccatgttatatactcgtttattagattccctgtactcagcggcgttatttcggactattatctcacgccatgcagtgttccctagagaacaggctgatactgtgattacggtcacaatacccatagcatatactaaggaactactagttcaggggttcgaatgatgatagtgacaaggtctatggaataggctctcgtggtgacctcaaagcataatggctatgcatccgtagttgagaacgtccttctgctcgcatatcaggcgtaactttgaggtcgtgttataacgtagttaacatatcaaagtaatccagtggagtgacgtcgatcagtgtcgtagtcattagtctacctcggtgtaatataaatacgtaacaatagtcgttcggccaaccttgacatatacgtctaggttggcaaagggtcattgacaaccggggagcaagataacccctcgttcaaagtaaggaatattccttctgatattcaataccctgtaaacagattgacgctctgtttttatcaaggactgtcattagcccatactctctcagaaagtgacttatcgtacataagtcatgcccgcatctttcaattaacgcggacacaacgattggttttgaggaaagaggggcatagttcgtattatccaccatccctctgataaggttgtctcaatgaggatagctcgtttctcgaaccactgagagggaacggggtgttgttgacccccttc

SEQ ID NO: 630657 - DNA, 228 bp, Homo sapiens
ccgggggggggggggaacctttttttttttgcccggttttaggggtttggaaacccatttttggtttttttggggcccatgggcccccctttcccggggtttgggctttcccttcccttccctttttaaacccggcccccccaccgcccccggttacccccggttggggaattggtttggttccccttttggcctttcccatgtttttttaagcccctttttttttta

SEQ ID NO: 630658 - DNA, 877 bp, Homo sapiens
  misc_feature (722)..(722): n is a, c, g, or t
  misc_feature (877)..(877): n is a, c, g, or t
agcggatggtggctcctcgtcctgcttgactggaagccctgaaacactggtgaaatggagccctgtgcgccactcccgcggtctgaggaccacgcctttcacaggccagtagtgccctgtagccctccctgataagcttcggaggagcttccactcacctcaagtagtcgccagagtgctctgtaccgctgtcctactccctagttggcgaatcactctgtcgtaccgaggtgtagttgccctaggatcgtcgagaatggagaagaaagtaggatcgccgcgctggtcattgacaatggtctcctgcgcatgtgcgaaagctggtttttgctggggacgacgctccccgagaccggtgttttccattccactcgttcgtgcgcgtcgcgccgatacaatcctatggtcgtcaatgcgatggggcatgggcccagaaggaatctcctacgtggagcgactgaaggccacagtagctcgcgtgttatcttgaccctgaaaatacgccaattgagcatggcatcgatccaccaacgtggtaacgaacatgtgagtaagatgcggggtcagcccagaacccttactaacaaccgatgctttgtgctgtaagtggtccccagagaaggaaagcaaccgcagttgtcttgctggacgcagaaggatgaccttgaaatcgcgaatggcaagcacgaggatgaaagatagacttgcagaagttattggtnggttgaacgcaccttcataactagcactcccggtcatatgtagcaagtgggtcctatcacagtgcccgtagcattgtcccctctactgctcgtctagggcggcaccgacatgggcattttgttctgttgggaactcttaggatgaacgtgcgggn

SEQ ID NO: 630659 - DNA, 268 bp, Homo sapiens
tttcttgcccctgcttccagctttgggccaatcagagaaagccaaatgtgctcctcacaccaatcgcgtaagaagccctgcttctagtatagccctcctccaacttcccgatgccaacatcctccaatcagagccaacctgaagtttctcccttttttcagtatatgtaaagcttttccactcccctgcctgcctatgagtctgttaaatcaagtgatgggtcgcggctaactcttcccagctctgagtaaatagcaaattctcatta

SEQ ID NO: 630660 - DNA, 362 bp, Homo sapiens
  misc_feature (73)..(73): n is a, c, g, or t
  misc_feature (80)..(80): n is a, c, g, or t
  misc_feature (161)..(161): n is a, c, g, or t
  misc_feature (198)..(198): n is a, c, g, or t
  misc_feature (248)..(248): n is a, c, g, or t
  misc_feature (279)..(279): n is a, c, g, or t
  misc_feature (352)..(352): n is a, c, g, or t
gagagcggcgcctcactactgactatgctgcgaaaacactacataaggggggggcggggtggcgccacccctngattgcngtgccacggactgctcctgctgggcggagaggacacattttgcaaagcggaggctgcgacgggtcctgcagggggacattnaggaaagggccgcctcatctccgctcctgggggaccncagaaataagaatcgaactccacaatgacgacctatttggaattcattcnacggaatgaagaacgaaatgggagtccgatntagttggaatgtttggccatcgattcgactggaatctacaagaatggttgttcctgtggcaaccctgtttagnccactgaaag

SEQ ID NO: 630661 - DNA, 176 bp, Homo sapiens
tcattagacggcgagaaagtcaatggtcgatatcgctagggtgccgctcataaaggtacatcagtaggtggcctgcagtaatgttagcggttaggcgtacgagccagggctaattggttaaaatgagtaggcggatggttccagataataactcagtatgcgggataacggggttg

SEQ ID NO: 630662 - DNA, 178 bp, Homo sapiens
cggacgcgtgggccggaagtagaatttagaggaataaaatatctgagttgcagggtataggtaaatttctcaaggttataggtgggggttcttaaaacaatgagtggtgtgtgttggtctaaagcgactcacaatcgttagtgacttcaactaaaaaaactaacctctctgctgatcg

SEQ ID NO: 630663 - DNA, 645 bp, Homo sapiens
acctagaggatccgtgatgttatccccaacacctctaatacttgtcctgacagatgtttccatacacagcatggtactcagcttattatgatcccacagatgcagtaagaaaactccattaactaaaacgcaggagtctacgtgccatcttatttgtctataagtgtagactgtattgtttcgggtcaacccgagctcaaaatcacaggaagaaccataaaagtgtagcaaattataatttaccgagatctatgaggatcttatttgtaaacatgaattggtcaccatcagttttccaatagcaagagacacaaatcctagaaaaacttatttcaatttccagccttcaggatttccaaattttcccgatacatttcagactagaagaaaaattaactatttcaaacccactttgacatacagaaaagccctggcatactgaaatttcagattgctggacccccatctcgagattttgattcatcacattctggatgtaacaataatttggatcaagattaaggagccaaggccgggcgcagtggctcacactataatcccagaacttttggaggccgatgtgggcagatcacttgaggttaggagttagagccagcatgccaacatggtgaacccatctctatg

SEQ ID NO: 630664 - DNA, 305 bp, Homo sapiens
  misc_feature (40)..(40): n is a, c, g, or t
  misc_feature (61)..(61): n is a, c, g, or t
  misc_feature (90)..(90): n is a, c, g, or t
  misc_feature (119)..(119): n is a, c, g, or t
  misc_feature (159)..(159): n is a, c, g, or t
  misc_feature (164)..(164): n is a, c, g, or t
  misc_feature (170)..(170): n is a, c, g, or t
  misc_feature (185)..(185): n is a, c, g, or t
  misc_feature (192)..(192): n is a, c, g, or t
  misc_feature (236)..(236): n is a, c, g, or t
  misc_feature (285)..(285): n is a, c, g, or t
aaaaaaaaaataaaaaaaaaaaaaacaaaaaaaaacaagnttgagaacctctctgacagcnctccgaaaaaattgtgaactgagccaagnataggaagttatactaatatgttatagantcaggatggaatgttaagttatcaagaataactggatggnttgtntcctgnatcatcttcttgtgngcccatnctcttttgtacaaactgagggttcactgtgatctcctggcccanggctttccgccgctcatccagctcactgcacttcagcatctcctgatcnatgttatgccgcatggctgg

SEQ ID NO: 630665 - DNA, 229 bp, Homo sapiens
accaccatccactacaactacatgtgtaacagttcctgcatgggcggcatgaacccggaggcccatcctcaccatcatcacactggagaactccagtggtattctacctgggacggaacagctttgaggtgcgtgtcggtgcctgtcctgggagagaccggcgcaagacgaaggagactctccgcacgaaaggggagactcaccacgagctgccccccgggagccctag

SEQ ID NO: 630666 - DNA, 636 bp, Homo sapiens
gtacataatccagtcttcagtaattctgtcaaaccgtgatttcttaattgtgtcggtgcaatatctctattatcgatttaacctcaggatatgcagaacaacaggattgtgtagctgctgaaagtctgagcagtgttgtaccgtccccagcccccctcccacatggtcacatgttcactgtcgtgtccttccatctgtaggttaaggtgagctgagagcatctctggacacatggaagggaaccagggattcctgtgatacagattttgaaccatgcagagtactttggttttcttcatgtcctaagggtttgatccagaaaccctggtgcttcccctgtagaatactgtacttcatttaccagaatgagtgatttctgtttcaatcagcatgttcaccaaaaatagaaaagttcttctaaggttaaatttggtattgaaaagttagttggccatttgatcagggaattttctacacacattaggcaaatgtatgcttttcatcctctgggcttacctctctcctctgcaatcctggaagcatcgtgcatagttctttcattgtaagccgctatttaactcccacaatgaaaactgttaaccagtaatgtgctactgaattgtccaaaacgtatcc

SEQ ID NO: 630667 - DNA, 115 bp, Homo sapiens
tctgtgcgtgtgattatcgtgtgtgctgtagcgctatctgtcttaaggcttaggtgggagaatcgctggagctcgggagcacaaggctgcaatgagctatgaccacgagacagtg

SEQ ID NO: 630668 - DNA, 124 bp, Homo sapiens
ggatccccgtcagaaacgctgaactattttgtatacactgcattcaatcaggatgcatttcaccacgctgcattgaatccacggcattcaatcgggatgcattgggcccaatgccgcggtaccg

SEQ ID NO: 630669 - DNA, 379 bp, Homo sapiens
acacatacttccgcaggtacatgaccaggggcccagcttttgggcccagtaactcagctactctttgcggctggcttcatgtctttttttgtggcctgccacgcccatctttatcaccagaatgaggaactcctgtaagttaactgcaccatcagtgttgatatccaactctttgaaccagacgtctgcaccctttttcctgatatactgaggacactcggtctctagcaatttcttcaggtcatccctgtagacggcatgaaaattcccttttatcagggagtacttgtggtagacgtcgatgatagagttcaaggctttctccagctcgtgcaacatgatgcccacgtacttgccccaccaggtcttctgaaagaca

SEQ ID NO: 630670 - DNA, 112 bp, Homo sapiens
tactatgctttagttacatcgtagtagactaccctagcagtttcttgtcccatctcggaggaagttctctagctacaccaattactttgtgacaagttactaggaactggtt

SEQ ID NO: 630671 - DNA, 1646 bp, Homo sapiens
gcgcaattggcatgcatctctgtccctgcccctggtggtggcccactctgatgtgggggagcgagcctgcctctacgtggggtcgccagcgaggccttactgcatgtacgtcgcgccactgcctagctcgagcaaatgcgtagcgtgccggaagttgccctcgctcgatccggtcgatcgtccgtcgttagcgtcctccttcctatgctatccactcgattcggtccgctgcgatgcggtcccctctcgtaccctacgcgtacgtgtggcatcgctagggtgtacctcatgttgaccgtcccaggagggggccttcgtatggccgtttcctgttgctagaccctgccaggtggcacttgatggacggtcgaggggcacgcgttgcaccttctgtagccaaagatcctatcaagctgcggggggcacgcgatactgtgcgcgcgacttgagagttctgcgcgaggaggctgggccggaagcgcgaagccagatcactactcggttccacaaggggtgtggcctatggaggcttcttactggccaggtgcaccgcggtatgtgggggcgacccttttggaacccccgtttcgagacgccttgagtgagggttagaggataccgcacgaatattagtcatagcgcgtgcaaaggcgagcgttgcgtggcgcaaggtgcggatgttgcatggagcaaattcgggtgcaccttagaacttagagggaaagtccttctcggcataaagggttttcagatgggcaattccataacgagcgcgaacttagcggtaagacacaataaaagttgtctcccctcgggctaccgttccgttagcacacggaatgaggcatcctaggcgaaaactcataaagtaattgagagcaacattaatccgcgggaaccgtacttataactctatctaatcagcccacccgtcaaaccggggactgcgcgcgcactcttgtggccaacagatttttatagacacacctcccaaggttgattggagaaaaggttgcttcccaatagggggacattggtgaaagaccgcgaaattctgccttccacggcaagggggttcccaggacaccacatgtccccccttgacctttcacccttgtggcgctttacccaagaaagtgctcaaggtgcaacacagagtgctccacttttaattacatcccacaaaggtgcccgaaagctcagagtgcagcagacatcacaacccacagggggagccattaccaccccgcacagaaagggttaggagcggggtactttccccgggaagaggagaaagcggcgagaaaactgctcacccccagaggtttcacagacgtattttcccacagcacgaccattgtgacgatgccccacaggacaggggacctcttatattatcccatccccatataaagggggaacaccattcctttgaagacgggtttacaacgcttggtaatcaccctaatatagtcgccaggggccgcagcacgagtgtctcgcgctctgggtataacacaaaaggttcgggggtcatacgatcgtagacaccaccagggtctccacgcaaagaagaaatgatctggcgacaaatagaatgatcaagaaaaagatcacaagagccagatataagaaggaccccaccc

SEQ ID NO: 630672 - DNA, 955 bp, Homo sapiens
tcttctttttttctaaaaaaaataatcaagataaactaaaaagaaagaaaaacaaacacattgggactcaatccatggccttttctcaatctgtttataggttttagtgtatttttaatagtgtgtctcgttcccccctcctggttcgcctgggaccattataggatcctctttttctaactgtgctacaccagtttccacgatggtttggaccacaataccccccaaaggtgtggtcacaaaagttaatacaagacttgtgccccccgcttctcaagtttcaagtgaaatcattggttcacaagttgcttcaatggaggatggctttctcacggcctgggaacagcttgtcttcccccccccccggatttcatgaggatcaccgatgggatccgaatttggggcgcaccaaccggcaatctctaaatatggggggctaggcccccccccccaccaaggggttggaggaccacaaacagcgccccaacatgctttttgctcgccgggcatcttcttacgtcccgtcataagggggtcctccctcccatcgaggaggatccgtcgtcccccgggccgctccccaaaggcggcctcactgatttccttccatccccgtgtgtgtcagccagtctcttaatgcccctcaagcttcggtgcttaatgcctcaaccgccacaggtccctcttttcgcttctcatccctcgcgagccgtcaatgtgagtcccaccttcatgttgcaactaagtggcatgacacacaaccgtgcagtctaaaatttatgtgactccgactcgcgtcatcaattgttatttcatgggcatgcttcctccacacctctctcccctgaatcagacaaccctccacacagaaggattttctttctttaatcacccccgttggcgtacaaacccaatcttcattatcctgtcccttacccccaaaacacacataaca

SEQ ID NO: 630673 - DNA, 924 bp, Homo sapiens
  misc_feature (29)..(29): n is a, c, g, or t
  misc_feature (329)..(329): n is a, c, g, or t
  misc_feature (386)..(386): n is a, c, g, or t
  misc_feature (400)..(400): n is a, c, g, or t
  misc_feature (408)..(408): n is a, c, g, or t
  misc_feature (410)..(410): n is a, c, g, or t
  misc_feature (452)..(452): n is a, c, g, or t
  misc_feature (472)..(472): n is a, c, g, or t
  misc_feature (495)..(495): n is a, c, g, or t
  misc_feature (562)..(562): n is a, c, g, or t
  misc_feature (774)..(774): n is a, c, g, or t
  misc_feature (795)..(796): n is a, c, g, or t
  misc_feature (836)..(837): n is a, c, g, or t
aggtggccccggtatgctgcggcgcccgntggcgggctgctgcggcgcctgggccgggccccaccggacggcatgtcgggccccaggcctgtggtgctgagcgggccttcgggagctgggaagagcaccctgctgaagaggctgctccaggagcacagcggcatctttggcttcagcgtgtcccataccacgaggaacccgaggcccggcgaggagaacggcaaagattactactttgtaaccagggaggtgatgcacgcgtgacatagcagccggcgaccttcatcgagcatgccgagttctcggggaacctgtatggcacgacgcanggtggcggtgcaggccgtgcaggcatgaaccgcatctgtgtgctggacgtggacctngcacgggtgtgcgngaacatcnanggccaccgatctgcggcccatctacatctctgtgcagtccgncttcactgcgacgtgctggnagcagcggctgcggcagcgcaancactgaaaccgaggagagcctggtgaagcggctggctgctgcccatggccgacatggagagcagcanggagcccggcctgtttgatgtggtcatcattaacgacagcctggaccaggcctacgcagagctgaaggaggcgctctctgaggaaatcaagaaagctcaaaggaccggcgcctgaggcttgctgtctgttctcggcacccgggcccatacaggaccagggcagcagcattgagccacccccttggcaggcgatacggcagctctgtgccctnggcagcatgtggagtggaggnnatgctgccctgtggttggaacatcctggggtgacccccgnngacagcctcgctgggctgtcccctgtccctatctctcactctggacccagggctgacatcctaataaaataactgttggattagaaa

SEQ ID NO: 630674 - DNA, 313 bp, Homo sapiens
  misc_feature (134)..(134): n is a, c, g, or t
  misc_feature (178)..(178): n is a, c, g, or t
cgctctagaggaccccgtcgtcagcatcaagccaaaaagatttttctcaagccttaagatctcatggagtgtggcgtgtagcctggacttacatgggagttgttacccttttcttcttgctatttctccctttnggaatggatatgtctattctatccctgtcccaccactgtatttnggaagcatatggcttatttggtttcacagtgtcacagctagggagcaatttgcctcaagatgaatcatatcttgagtctcacccatatctgatttagatgatatttaggtgagactgtgggttttaaattttagg

SEQ ID NO: 630675 - DNA, 1070 bp, Homo sapiens
  misc_feature (399)..(399): n is a, c, g, or t
  misc_feature (456)..(456): n is a, c, g, or t
  misc_feature (470)..(470): n is a, c, g, or t
  misc_feature (478)..(478): n is a, c, g, or t
  misc_feature (480)..(480): n is a, c, g, or t
  misc_feature (522)..(522): n is a, c, g, or t
  misc_feature (542)..(542): n is a, c, g, or t
  misc_feature (565)..(565): n is a, c, g, or t
  misc_feature (632)..(632): n is a, c, g, or t
  misc_feature (844)..(844): n is a, c, g, or t
  misc_feature (876)..(876): n is a, c, g, or t
  misc_feature (919)..(919): n is a, c, g, or t
  misc_feature (924)..(924): n is a, c, g, or t
  misc_feature (941)..(942): n is a, c, g, or t
  misc_feature (982)..(983): n is a, c, g, or t
ggaggaccctgtgcaagagtcggccggtgtttctttctccctgcatggacagacccgagacgatagccgcgcgagcgtcgtgaagggctggggccttcacgtcctctgtggctcgtggaagagcccgatttcctcaggaggcatgtcgggccccaggcctgtggtgctgagcgggccttcgggagctgggaagagcaccctgctgaagaggctgctccaggagcacagcggcatctttggcttcagcgtgtcccataccacgaggaacccgaggcccggcgaggagaacggcaaagattactactttgtaaccagggaggtgatgcacgcgtgacatagcagccggcgaccttcatcgagcatgccgagttctcggggaacctgtatggcacgacgcanggtggcggtgcaggccgtgcaggcatgaaccgcatctgtgtgctggacgtggacctngcacgggtgtgcgngaacatcnanggccaccgatctgcggcccatctacatctctgtgcagtccgncttcactgcgacgtgctggnagcagcggctgcggcagcgcaancactgaaaccgaggagagcctggtgaagcggctggctgctgcccatggccgacatggagagcagcanggagcccggcctgtttgatgtggtcatcattaacgacagcctggaccaggcctacgcagagctgaaggaggcgctctctgaggaaatcaagaaagctcaaaggaccggcgcctgaggcttgctgtctgttctcggcacccgggcccatacaggaccagggcagcagcattgagccacccccttggcaggcgatacggcagctctgtgccctnggcagcgggggggtttttttgggggcgccccnccccccccccccctttttttttggggggccccccccaaggganccccnaaatgtggagtggaggnnatgctgccctgtggttggaacatcctggggtgacccccgnngacagcctcgctgggctgtcccctgtccctatctctcactctggacccagggctgacatcctaataaaataactgttggattagaaa

SEQ ID NO: 630676 - DNA, 892 bp, Homo sapiens
gctgtctggcgaggaagttatgggatgtgagcgccgccaccgtgcagtagattctccgcgacgtggtcctctctcctcgggctttgccttcgctctctagcttttcttctttcactcccgctcccgactccagcccgctgggctcacgctctgccggacaccaatcccggcggcctgcccgaggagctcgaggctaggcctggccttgtcccgggagtcccgccctcgccgcaccgggatccgccccggccgaacgcacttccggcagcgccgggcgggagggaccgagcggggagaaaggcctgcggggaggcgcaggatggacgcgttggctgtcatgatgtaggacctcctgacctagaaccatgcccggcgcaggggagaacaacgagcttatggaccggttgccggttgtctgcttgtgcgagaaagcctacctgctggcccgggagcgttcgccggcccacctgttggcttttccctggacgtactaacggcgactccgcccggcctcccgactttaagatgcaggcgttctcttaacatgaccttttcttcgaggctagattctcgaaagaacatcctgaaggtggcttttcttaattagctgcctcaccgggcatggctggagcaagtacgatagtcccctaccatcgaacaggggagaagcccccgttactgggctcagttactaggtgatatcggtggacaccgttgtagcagggacctacgcgacgtgcggtaggaaacagtcggggccggattccccggatgtattgcgagaagcggttagacggcatggaccgagcagagacgtatcacatcctacaagcccccggcacaataaattcaaagctgcatggaattagaaccctcgatagggaaagttgat

SEQ ID NO: 630677 - DNA, 470 bp, Homo sapiens
taggtctacaagacgctacttcccctatcatagaagagcttatcacctttcatgatcacgccctcataatcattttccttatctgcttcctagttctgtatgcccttttcctaacacttacaacaaaactaactaatactaacatctcagacgctcaggaaatagaaaccgtcttaactattcctgcccgccattatcctagtgctcatcgcccttccatccctacggtttctttacataacagagggaggttacgtgtcctccctttaccttctaaataaatttggccccccggggtctttaccttcggggggcacccccttcggggggttttttttaactcctaccatattcccccttttttccccgagcccggggacctcgagtttttctgcggtgtaaaaaggggtgggttccccttatagccccctttgttttatattacacaaaaggggtttcctcttagattt

SEQ ID NO: 630678 - DNA, 834 bp, Homo sapiens
  misc_feature (834)..(834): n is a, c, g, or t
agcggtctccctgcctgagaaatgggccggcccgtgctgcgcgctgggcagcagctggtggcgtgcggtggtccaagatggcgtgaactgcatgctggaccctgtgcgatgtgctggtggctgggagtggggctgccgggtcccggaccacccgatgcgggcatggggtgctgtgcgtgcgcggcctgctgggtcagtgctgacccgtgggaggcacctacttctgtgaccaccagaccagaccttattgcctggagcccaagtcatttctctgccgcctctgctgccaggaggacccggagctggactcagacaaggatgagacaggagcctatctgattgacagggaaccccacctactttggtcctatcctcaaactacctccgatcacgggaaactcatcatcactaaggagttggcacgaacgaacgcgtgtgctggacggacagcggacgttttacaacatcgcgtccctttgtgcgcgctggttaacgcgccacgtgatacagtggacaactgagaacagaacttcacaaaggccccgtgacagcacgtgtaccagagtcctgccagtgtcatggaaagaaagaagccttcagcaggatgggtgttgcaaggatggtccgacgagctggggattttcgaacaggctatgaggcattcgggaattcttccctatagcgtaggggcgaattgaggattcaggcacagaatttcacatcgttgcggtaggtatccaagaggaacgtaaaaataatatattaaccaaatgcgcattggacaagtagaagaccgaagcgacgaaggttaagaatcgtttaagagagaacagn

SEQ ID NO: 630679 - DNA, 461 bp, Homo sapiens
gtagtatagtatgtactacagttaattttatgcagttatgatttaatactgcatcttaatgtttgtttacattcctcttgactgccaatggtgccatgtagtctatagatgtttacagaagttttgataaattttaacttttcatgatagaatcgtgtgcatttcgtggtagtacattatcaaatataaactgggatctacatctattttatgtattcatgacacctttttgttaattttttgatacttctaggctacagggtttgtctgtgagttttttcagattgttgcaaatcttcaaatctttttcaattattgaaaaagaatccacgtataagtggacctacgcagttcaaacccatgtagtccaagggtcaactgtgtattttttttttttttttgagatgcagtctcactccagcctgagcaacagtgagactccatctcaaacaacaacaaca

SEQ ID NO: 630680 - DNA, 496 bp, Homo sapiens
gcacgagtagagaccagggtattgcccaggctggtcttgaacttctggcctcaaggaatctgcctgcctcagcctcccaaagtactgggattacaagtgtgagccaccttgcctgttccggatcatttaaaaaacatttttctttcttttctgtctttttttttttttttttttgagacaagctctcactctgttgcccaggctggagtggtgcagtggcacaatcatggcttactgctgcctctatctcccaggctcaagcaatcttcccacttcagcctcttaagtagctgtgactacaggcacacatgcccccatgcctcgctaattttttaattttttgcagagatgggaatctcactatgttggttaggctggtctcaaactcttgggcccaagctatcctcccacctcagcctctcaaagtgctgtgattacaggtgtgagccatcacacctggcccaaatttttctttctttctttttttttttttttt

SEQ ID NO: 630681 - DNA, 142 bp, Homo sapiens
cacgaggccaatacccactgccattagctgtggcatctgtgtctgcagggctccctgtacatcacccttatccgtgaggatgtgatgcaggcgtataaaatcaccgatgacctgtttactagtttgatagggaatggcatga

SEQ ID NO: 630682 - DNA, 83 bp, Homo sapiens
  misc_feature (41)..(41): n is a, c, g, or t
acccccggaccgaccaaagcccgcgcgccgctgcatcccgngtccagcacctacgtcccgctgccgtcgccgccgtcaccatg

SEQ ID NO: 630683 - DNA, 1846 bp, Homo sapiens
  misc_feature (483)..(483): n is a, c, g, or t
  misc_feature (642)..(642): n is a, c, g, or t
  misc_feature (812)..(812): n is a, c, g, or t
tccgaaagagaggtgtttcttgggcccaatacacaacattcgggaaccaaccccacggacaaaaaaaggaggtctttgggttcctctctcccccccgcgggtggacaggggtgtgtggccccgggggccgggttgtccgcaccccgctggggggcccttatctctctctctctctctctctctctctctcgcaaaacatcttctctctctctcaacgcgtgtgtgtgagcgccactgagacaacacacagagaggtgtgcggagtctctctctgtggggagaccaagaggggtatgtcgcccgcgggtgctctccagacatctctctcaaagacgccccaagagaagacgcgtgagagagtgtcgtctggagaaaccacagagaagcggggtctctctgtgtcgcctctggagagagtgtctctgtgtgtgtgagagacaaacacaaagagatgacacacacactagtgtgtgcgtcgggcgnctctcgcaagaagagtgtgtctctctcttctcagcagagagaacacactcatctgagagaacaacaatagcgtgcagaagagtagtgtgctctctgttgtgcgccccccacatctcgggggacacagacgcgcgcgcccgcgcccgtgagggagaaatntctctcagagagatgatatagagagacggtgcgcgcgcgcagcacactccacagacacaagtgtgtgtgcgcgcacagaagataaacagaggcgcggtgtggaggcggtgtgtgtgtgtgacacgcgcgtgtgagacacgtgtgtagaacagctgtgttgtgaagaaaanaacatcctcctccgctgcaggcgtacatgtggaggagccgcgaagtggagcagacagaagataattaaaagaaatcccacctcctgctggtgatgttcaaacaacattttactacgaaagaagagcggagaatcctacaacattgagaggagagagagatataacaacaacaatacacagaggatcctcaagggcgagtcagaacaaacacaagtatgttggtgtggtgtgattcaccctcctcttgtggtgagagaaaataataattatctccccgactgctgacgaacccccaggcagcaggtggtgagggagaatactacccatacacagaggaagggagggagcggcgaagcagcagaaggcgagggaggcccaacattaaagagagacagaacgcccaccaacacaagcaagtaatgatggccccccctggtaataacacgccgggggggtgtatctaacaacaacaacaggagacgaggaggagaggggaggagagaagacacacgcgcgtgggaaagacaaacctacaacacgagagtgaggcaacgaatatgcacacacaccacaggaagggattgaatgatagactagcagtacaaaaaagatagaaggcacgacaataatgtagatagaccgagatgatagagacgctagtcaaaacagagagggagaggagaggaggggataattatacacccccccctatcttcctctccttcaccggtctggaggaacacagacggcgagtacaataagagacaggcaacaccacccggaggcagagagagggaagagagagatccaacaccacccacaacgggcgcaggacaggaggaagggaggcacgcgcaacaacagaggaagagaacaagaacgccgcagtgagagggaccactctcgcaggagcccgccagcgacgacggtgtcacaacagaagcaatctacctccctcgtggagcaaacagggagcactcacgagagaacaacaaccatctgtcgacgatcgtgggcaaaaacaacgagaggtc

SEQ ID NO: 630684 - DNA, 865 bp, Homo sapiens
ggtttatttatggagaatggttttagaaaccaacatctaggtgctcagtatgcttgctgctactgaggtcatttcatttagttcctctcaactgacagagtaaaaaaaatgctgttttactaacctatgtatttatatatatttataaatacttctatatgtaccaaatctatctacactaaagtacacatgaagtcatactgatgtctccaattataattaattactgcatgggtcagtctagcttcctgtccttgtttatctgtgaactcccattccaacagtgtaaaacctgatttccaccatctggcacccatttacttaattattatcattctcacgtatactagtattatgtagtacgtacaatgaataatctagtctggcagtcctgtaaaaaataacttggttaactacagtaaatgttttatgttgcagttccctttggcccttagtctttcagactgtactcatttccagagttatttcggtcagcacctttaatgcaatggtttcatatacttgtaaaagagttagtcttatcatagtcttcatttcttcctgggatcacctgactcctaaaatgacttttttaaatttacttttggtgttgtaaatttctacagttttggcagatgggtaatgtctgtatctgcattacaggttagaatttaccgcctaaaatactgtgtttccctatatctaacctaaattttaggaacactatcattatggttaaaggtgctttagaaggcgaactggaccattaaggggtcaaatggttactagaggcgttaggggatggggggggccattatggagatccaaggggccgggtccccttgaacggagcgggggaaggaaa

SEQ ID NO: 630685 - DNA, 322 bp, Homo sapiens
ccaggagcgatgaagtgaacatatttttgaaaagaaacaaaattgacaatcctttagccaaactagaaaacagagaaaaagcaaatacaatcagaaatgaaaaaggagacattacaaccaatactgtagaaaatcaaaggatcattagtggctattatgaatgagtatatgccaattgattggattatttagaaaaatgagataaattcctagacacatacaacctaccaaaattgaagaaggaggaaattcaaaacctgaacatacccataacaaataccaagatctaaagcataatagaaagaatcctagcaaaaaaaaa

SEQ ID NO: 630686 - DNA, 324 bp, Homo sapiens
acataatatgtgataattcaggtacatagcaatattgtctctccagacggtttccatatgccaaacagtcataacagatggtatgaacatggtggctactgcttgcaggagcttctatcagatgagtcctcatttccactaacgcagctgtaggcactctttcatcaaaagtgcatccatcaggactatctctaatcgtaggtcggccaaggcagtcctgctttggttgccagggcttcattcagctgaatatgcatatacctgaactctcatggctattctttgtgtcattattaaatcattctgtaagcacatgttctgaac

SEQ ID NO: 630687 - DNA, 453 bp, Homo sapiens
  misc_feature (1)..(1): n is a, c, g, or t
nttctaagggacagcaaaggatgctgatctgctgcgtatgcaagtctcgcgcccatctttcaagtgctaatctcacttgatcacacccacaccccacacaacacaaccctctaacacagtctgtcttggcccacagaagaactctggtaaacacatttcccctgcctgtaagatggcatcacacacccctccctttggttctcgaaaacctggtgactctgtgtcacctgtttccagttacacacttcttcagtcttccccaccttgtacgcaaaccaaaccaatttgtgtgtgttagtttgtctgtttgcacttaaagttctaagcactttggaaagtttctaagcaacttctcacttacaagccacatcttacccaactctcaccacttactattattaaagagtattctcgtggaacacccgcgctagtgccgtattcctacagcccggg

SEQ ID NO: 630688 - DNA, 410 bp, Homo sapiens
  misc_feature (46)..(46): n is a, c, g, or t
  misc_feature (50)..(50): n is a, c, g, or t
  misc_feature (187)..(187): n is a, c, g, or t
  misc_feature (390)..(390): n is a, c, g, or t
  misc_feature (399)..(399): n is a, c, g, or t
tgagacatggtctcactctgccacctaggctgcagtgcgtatgccncttngatgccttgacctctcaggctcaagctatcctccttccgagcctcccaagtagctgagaccacaggcatgtgccaccaggctcggctaatttttaaatatttgtggagacggggtcttactatgttgcccggccttnaactcctgggctcaagtgatccccctgcctcgggctctcaaaatgctgggattacaggcgtgacccaccgtgctcagccaatgattcactttttaaagaaaacagcgttactgagatataattcacataccattacacatcacccgtttaaagtgtacagttaagtgggttttgagtatttttcaaagaatttgtttcagccntcaccacantttattcttag

SEQ ID NO: 630689 - DNA, 236 bp, Homo sapiens
gcgtcgacggtgcaccaaaatctcagaactgaccactcaagaactcgttcatgtaatgaaaaaccactggtactccaaaaacgattgaaattttaaaaaagaaaattataggctgggcacggtggctcacacctgtaatcccagcactttgggaggctgaggcgggcagatcgcctgaggtcgggaatttgagacaagcctggccagcatggtgaaaccccgtctctcctaaaaag

SEQ ID NO: 630690 - DNA, 168 bp, Homo sapiens
ttgtgtacatagtattgatagtctgcctactgcttacagtcggacatacttctggtgggcactgtgcggaaacttgaggatgaaatcagtgagctgcatgcactatgaaaggcatggcctgtctcctcacattgagtgcaaggtccatcgaccaaagccctgtactag

SEQ ID NO: 630691 - DNA, 189 bp, Homo sapiens
  misc_feature (5)..(5): n is a, c, g, or t
  misc_feature (41)..(41): n is a, c, g, or t
  misc_feature (119)..(119): n is a, c, g, or t
tctantcagatatgtaaggtagaggtacattcatcctgagngcaaaaattccctttccacgcttttgtgaaaccagcatatgttatgtatttgcaaggagacaatcgtgggacagcggngccccccaaaaacccagtgacagacattcccactccaaaaggtagaaatcagattaaagaaaggggtgac

SEQ ID NO: 630692 - DNA, 304 bp, Homo sapiens
cccttaaaaagggggggtaaaccccccccgcccggcccaaaaagggtttcccaaggaggcccggaaatcccgggaccttccacacagggaaggtccccaaaccttaaaaaccaacctttaaaagcccaagagccaaagggggggaaaaccttttttttaaaaccccccttccttgttttaggccaaaccgggtttttaaggggatatttaaaaatcggttttttaaaatagccccctccaggaaaaccccctttaaaccgggaaaaggggttatttttcaataaaaaaaaagaattggggccca

SEQ ID NO: 630693 - DNA, 769 bp, Homo sapiens
catgttgccctcccctcccagtgggatttcacgccgcgcataatttatgtgcgccctccttggtgtcctactctgtggccctttttggctccgtgcccccatattctcgggtgtccatgagattcccttgctgtacacactcacatagggcccggcgcgggtgattcatcgcctgccatacccaccaccttggggaggcccaagcgggccgattcccactccgggggttcgagacccctcccgttgtgaacactggggaaccccctcttgttcttgtcaagttccccaatttgctgcccctggtgtgcaaggtgcgcgtatgtccccggctatctcacggagctgtggcccgagtattggcgtgaccccggagtggaggcggggctttccctggtgtctgagggttgcccccctgcactccacacctgggcgaacagagtgagactccgtttccaaaaaaaaaaaaaaaaggaagacgtctagctgggcacgatggctcacgcctggaatcctagcactttgggaggcccaggcgggcgggtggatcacctgaggtcaggagttcaagaccagcctgacccccctggtgaaactccatctctacccaataccaaaaattagctgggtgtggtggcgcatgcctgtaatccccagctactttggaggctgaggcaggagaatcgcttgaaccccggaggcagaggttgctgtgagctgagattgtgcccttgcactttagtttgggtgacagagctagacgccgtttcca

SEQ ID NO: 630694 - DNA, 381 bp, Homo sapiens
aaggggggggtaatttaaagccccccgggtggggttccccctttgggaccataaacaaaatttggttttggtataagccctttggattttttaaaaattttctccccgccaagggaaatagatttggttatacccctataatatatttggtaaaggataaaagggtattataatggccattaaccaacccctggggggcccccccccccccttttgccttttcttttgggggccgggggggggtttctgaacccatttttatccccgttttaaaaaggggacccccgggtttaactttttgttggcccaaacccttttgttttttttccctttttttcccagggtggttccctaaaaaaaaataaatgggatttaacttta

SEQ ID NO: 630695 - DNA, 543 bp, Homo sapiens
  misc_feature (18)..(18): n is a, c, g, or t
  misc_feature (34)..(34): n is a, c, g, or t
  misc_feature (91)..(91): n is a, c, g, or t
  misc_feature (111)..(112): n is a, c, g, or t
  misc_feature (114)..(114): n is a, c, g, or t
  misc_feature (119)..(120): n is a, c, g, or t
  misc_feature (123)..(123): n is a, c, g, or t
  misc_feature (128)..(128): n is a, c, g, or t
  misc_feature (162)..(162): n is a, c, g, or t
  misc_feature (183)..(183): n is a, c, g, or t
  misc_feature (227)..(227): n is a, c, g, or t
  misc_feature (246)..(246): n is a, c, g, or t
  misc_feature (259)..(259): n is a, c, g, or t
  misc_feature (285)..(285): n is a, c, g, or t
  misc_feature (294)..(294): n is a, c, g, or t
  misc_feature (297)..(297): n is a, c, g, or t
  misc_feature (335)..(335): n is a, c, g, or t
  misc_feature (337)..(337): n is a, c, g, or t
  misc_feature (347)..(347): n is a, c, g, or t
  misc_feature (349)..(349): n is a, c, g, or t
  misc_feature (372)..(372): n is a, c, g, or t
  misc_feature (381)..(381): n is a, c, g, or t
  misc_feature (383)..(383): n is a, c, g, or t
  misc_feature (387)..(387): n is a, c, g, or t
  misc_feature (404)..(404): n is a, c, g, or t
  misc_feature (415)..(415): n is a, c, g, or t
  misc_feature (433)..(433): n is a, c, g, or t
  misc_feature (440)..(440): n is a, c, g, or t
  misc_feature (442)..(442): n is a, c, g, or t
  misc_feature (451)..(451): n is a, c, g, or t
  misc_feature (458)..(459): n is a, c, g, or t
  misc_feature (461)..(461): n is a, c, g, or t
  misc_feature (468)..(469): n is a, c, g, or t
  misc_feature (527)..(527): n is a, c, g, or t
taatatacaatttaaccntcctccttcaaactancttaaaaactactctctcttatttcatttttcattttctattcattatttttccatnctctttaaaaacatactcannanctttnnaanagcanaaattcaattacttacatacaatattattataantttttcattatatacaaattnacatattacaatttattaacatattacaattttttactttttanaaaaaataaacttacagtnaataaataaacanctttctatatcaatttatttatttantataaaaantanttactatatatatatacatatacatatatatataaatntncatgttctanantataaatatactatatacttaantatttcacntnacanaacattatttcatcttntttcatttttntacattaaaatacatctngcagttngngtctccctnatctctnnanacccagnnatcctcttcccattccaagggtagacgcaccagcagagtcccgcctctccatccatgnatgtctcacactgtct

SEQ ID NO: 630696 - DNA, 301 bp, Homo sapiens
gatgtgtggcaatgagtgtgacctctatcgctggtttacaggggttgccttgggacccttcagtagttggtgggcgtgagctgcaggaatgcacatttgtgcttgggagtgagctgtcaggaaggggaagcggatatcctgcgattctgccttgtactgccctggttgaagccgcacaaccacagctcagctccgcagtgggcccaggcccttgtgtaatgtctgtattaagctcccctggggctggcctggcttgacggaagttgcaaggggggattgccgcattgacggagggacctgg

SEQ ID NO: 630697 - DNA, 795 bp, Homo sapiens
  misc_feature (267)..(267): n is a, c, g, or t
  misc_feature (384)..(384): n is a, c, g, or t
  misc_feature (409)..(409): n is a, c, g, or t
  misc_feature (632)..(632): n is a, c, g, or t
cggaagtagtcctatcatatcatctgcaggaagtaattcctattcgtcaggcatcagacgtgagccttccttacgcaacgtgcacctagtcctaggacccctatccacccaaattctcaggacgtgagccaccgtgaccccccacacatggacgatacgagcccgtgtgaacatcccactaaggaaagtcaccacctcgctaaatcaccattcagtaattcactcagtccattcaggcagtatccagtctacattgcagcttcaccnatagaagttctaaatcaagcaatagacgaacatcgcacaatcaatacataaattacgaagcaacatagctgtaatatccacaattatatactaggcgtctggttataatataccacnttcctaccagaggccctccagtagntaacatctcgatgcttatcccgtctcaccaatgttccgttcgggcatcttctacgtgcatcaaatatcccgtatggtagtcaacagggctctaccaacggtacttggaagtcactggagtggcctcagagcatttccatcgatctatcatgcggtcacacacgtcaacctaaatattttcgcttctatcatgcaaaacaatacaatttggctttcagaatgcncagacgatcagattagggggtcatgaagtaggactgtggtatgatgtgatattctgtatgatcgtcgcgatctgattgatgacgggtactgtactaccaaaactaatagatgagggtcttaaaaaaaaggggggggggaaaaaaaaaaccggggggggccaaa

SEQ ID NO: 630698 - DNA, 196 bp, Homo sapiens
ttttcacgcaggatcaaattcacacataacaatattaacagtacatgtaaaatggtttaacggcccaattacaatctaagattacacacgagaagtacaacacatcacacatatatctcattcatacaacatttaaacatcccagaagaaactccattagcactcctctcccatctacagtaccgggggtaccgag

SEQ ID NO: 630699 - DNA, 814 bp, Homo sapiens
ttcaggctacccagaaccttaagtcctaacaacgacaataaaatgttcaggtgaccacgattcttattctccttgcaaggaaagcccagaaaagtttcagattgaagccaattttcccaggcgagtgctgacctgcatcccttcagaggagtggcccaatccccctacgctacaggaggccggactcagccacacagaagttctttttgttcaggacctaactgatgaatgacatttttttatttctgtcccctcctaccccagtccctaaaagaaatggggaaaaaaaaaaacaacagcatgtctgatataaaaaacatgacagagaaatccatgttattattattattataatacagtatctttattaagagactgctagatccttacgaaatgatcatataccatgctgtccgtaagagtcacaacctgtatatgcactcaatgttatcatcataacaaactcgaatgggaagtaccacccttcctcgagtcctctgtgctaattccttccagggtacagaaactctttaccttactacctacattgtgcccgctgagtaagtggacactccccctagtcactattcacctttgccctaaacacaatggatgagaaaaccactcataaccaagtaattataaatataattctaaaatacctatatagctctttgtgtacacatcaacaacacgcacctacacggaggcaataaaaagctgtaagagacagaagttaaagctattatcatttgacgactaaactaccgcttgatgtataaaacgcatatacacactatcacaccaaggataa

SEQ ID NO: 630700 - DNA, 327 bp, Homo sapiens
tattcttctaagacaaggtatgcctctagcgcccaggatcgagtacactggcgcaatcttggctcacagcagcctacacctcccgggctcaggccatctttccacttcagcctcctgagtagctgggaccacagttgtgcaccaccatgtctggctactttttgtattttttgtagagagagagtttcactatgttgccccggcaggcccggaactcctgagttcaagcaatccacctgcctcgggcctcccaaagtgctgggattacagtcgtaagccaccacgcttgtccaataaatggattttaatggaggagttagagaagtt

SEQ ID NO: 630701 - DNA, 135 bp, Homo sapiens
taaaagtacagcaggatggtctcaatctacctgacctcgtgatccgcctagcctcggcctcccaaagtagctaggattacaggtagtagagccaccgagcccaaccgtgtaacaaaaatactatatctatatttt

SEQ ID NO: 630702 - DNA, 375 bp, Homo sapiens
tcgccacgcacggcaattttttgtgtgttttaatagtagagacggggtttcactgtgtgcccaggctgattttgaactcctgagctcaggcagtctgcccgcctcggcctcccaaagtgataggattacacgcatgagccaacgcaccccgcctcgtatggtaacttctgtgtttaacttattgaggaatcacgtaaactgtgtccactgcagctgtaacgttttacattcacactagcaatgcacaagggttccagtttcttcacctcctcaccagcacttcttattttcaatttttttgatacaagccatcctaatgggtgtgaagtggtatcttagtttgcatttctgtcatttagtgactcgtggaaatgt

SEQ ID NO: 630703 - DNA, 473 bp, Homo sapiens
gaggtgactctagagtgatcttaccttatcctgtgggatccacacaggcgaacagaccctactcctagcctgactgtgtgcaaagagctacctgctccttctccaacctctggaagcaccgcaatgacccatcagcagcagcatcagggagctgtgcggcagtagctggcagaggcggaggctgccgttggcctggccgtcatggagacttgctgtggaggcgctacccctggttggaagccacttgtgatctacccctctgtgccgagggctgaggggggtcccagatcaagttgggctgactcttgccctgactttcctacttttggcaccttccatttcccttgttgctgaatggccctcgcagcatccccgttaagcatcttgtacatacttgtgtcccttccctcttccccatccccacggcataagtgtggggggtaccgaagctctgaattctgtaatccattggt

SEQ ID NO: 630704 - DNA, 211 bp, Homo sapiens
  misc_feature (26)..(26): n is a, c, g, or t
  misc_feature (59)..(59): n is a, c, g, or t
  misc_feature (155)..(155): n is a, c, g, or t
  misc_feature (182)..(182): n is a, c, g, or t
gctccaggacagtcagtcgcccgtcngcctaggccgaccacgctgtgtcctgtgcacgntatctttaggtttcccacacacccactttctgaattctttctccccaaagcaaggaggaacctcgtctcgtcctccaacctcatctcccacttagntatcccttggtaagccagtcaggacanagaggacacatcggtggtcgtcgccccct

SEQ ID NO: 630705 - DNA, 167 bp, Homo sapiens
cgagaaagcctaccatgaacagctttctgtagcagagatcaccattgcttctttgagcagccaaccagatggtgaattgtgaccctcgccatggtaatacatagcttgctgcctgttgtacctggtgacgtgtcccaagatgtcatgctgcattccacatcaaacca

SEQ ID NO: 630706 - DNA, 221 bp, Homo sapiens
  misc_feature (61)..(61): n is a, c, g, or t
ggggtttttttagggtttttaaatgcaaggcattttcccaggggacttttaaaaatcaatnccaggaagcaaaataaaaaatttaaaaatcaaaacccagcagggcacggtggctcgcacctgtaatcctagcactttgggagccaaggcaggcagatttcttgagcccaggagttcgagaccaccctgggcaaaatggtgagatctcatttctaaaaaaa

SEQ ID NO: 630707 - DNA, 260 bp, Homo sapiens
tccaataacttgaccatcgtgaacaaggtgaccctagcggcataacagacgcaatgcctattctagagatccatatcagcaagagggctttacgagctcgatgtagagatcaggacatcccgtatggtgcagccgctattaagggttcgtgtgttgcaacgacttaaagtcctacgtgatctgagttcagaccggagtaatccaggtcggtttctatctagcttcgaattgctccctgtacgataggacacgaatgtgca

SEQ ID NO: 630708 - DNA, 1195 bp, Homo sapiens
  misc_feature (308)..(308): n is a, c, g, or t
agcggagcggtcggcgggacggctcccggatgcaatctgtcccgtcccgtccccgcgcggggtgccgtacgtctgctaagcgcgcctgcgacccggtcgtccggtcgcgctggataggacgctgaggagccatgagtgcgccacgcctgcagaagtgtggcgtgctgctgcttgctctgggctgactcttggcagtgcacagtaagccataataagcattgctggtatttcgaaggactctattccatacccttattatatatgctcgtctcctatcgatggacttgccttgtgcgcgtcccagtgtngcttgttgttgcggagccctcttccattacgtgatgtgatccgtgggtattgatcctctgtcgggaattcctcttggctatgggcgtttcccaggtcctctatcgccctgattcatttccctatgcgtgcacgtgttgtgcacttgctaggtctctcccggtcgctatcgacttatcgttgtcgaaacaatcgtctctactctgtccaccctcggttccagtaaaccttgtgtcacgatcggaccgaggcaaataatcgttaattttgagagggttcgctccaatcaaattgcttacgtaagacgtatgaatgaagcatggttatgcaatgccgcgacctttatacctgaatggagccactcatttttggtccctttacgctttttggaccccgtttttaaatctttcttctacgaagcaaaacgagtgggaccttctggctcgtggaggactttgacgtggacaccgttggtggcggaagattctacacttgccttggaagtaattcactcttcgggaacttgttcaattagaccagccatgagcctccttcatttttcagcgtggccttggttcctcgaggtagcggtatggctcatctaaaggtacgactttgttaggaaattctcttcctgcatgcgtgttctgttgtcctggtccttttccttgtccttgggggccgggcttgttatggggccttggagcagcgcctatgtttcttgggttgggggtccttccaacggatttgcgcttagcgttgttcgacgttgtacacccggggttcccggccgcgtgtgtggcaatgaccgtgtgtcccctttactgggggtggaggcgatggtagctcccacggtatttgctcgacccaggtgtgggtgtacgcaccg

SEQ ID NO: 630709 - DNA, 835 bp, Homo sapiens
agactttgatgactatcacccaccccatagcgtgaggaggacgtcacagtggaactgtcccagcttttaagtatatctagctatgaaactatatgcttgaggacgtaaggaattctgcatgcttgcatgatgtttaagcaaaataagtggccagattttgttgtggtccttcccaaagatgttaagtgatacctacagtatagctatacttaggacagagctctattgtttcactccctgtggcccctgtactaagttttgtccacaggcaatagttgtatcgatggaatgaatagaggttattctgtaatggcaaaagtgttgcctgctcagcatccttctgtagcagacttgagcagtgttcttttcacatattagtctttcattgcacgaatttgttcgttgtagcaagatggaagcaatgtggttattggctaatttcttcatgtattaagtgagtttattttcaaaagatattctgcagtattattcatccttgtacacgttatcccttaccttcagtgttccatgtgcgaagacgcgttagtaatagatccatagatcagctgagttcatcttgtaatattctttatttacttgactattcattactgtagcagctaaccagggaatttgtgtttatgcctgcagaagcaacgttttcataaattgttacctacttgcctcttgtttagcagtccttggatccatgctgatccagttgcaccagtagcgttggacagcatatcactttggcgtcacttgggtcccttgtttgatcaagcatgttctgcagtttattcctttaaccgggcggaccttttggctgttccta

SEQ ID NO: 630710 - DNA, 251 bp, Homo sapiens
ggggaaagtttggggataaaggagagcttaaaggtgtttcaattaagttaaaaaactccccaggctgttgagaattttttgccccttttccccccccaaaacagcatggggcctgacattttttgccctggtcccctttctcttgatgtggaaagtctgaatccagtatttatagccttttaaggttttaaaatccagtatcaaaaaaaaaatcaaaaatcctggttggtgaaataaagagtttaggcata

SEQ ID NO: 630711 - DNA, 392 bp, Homo sapiens
  misc_feature (300)..(300): n is a, c, g, or t
aaatgcaaagaaggcaaatgattcataaaagttgctgagtgaattagaactataatgtgggacaaacactccgcctttctgtctctgcagctagtggtatttccaggttcccagggaactcctgtcccttgctccactgtgcatttttagatggacctgatatttggttacctcccttgtcaggcccaacaatccttgctaaggcacagacttgtgtatttgctgatccctgaggggaaagctgtgattcaggctctgaagtctaaggaattgcagacttagtttcttgtctcccgatgnaaactgctaatctggggtgccaatgggtgtttctgcttacatgggacacctggccccacacaggcatggatttaggaaattattaatgtatg

SEQ ID NO: 630712 - DNA, 922 bp, Homo sapiens
ggctgggtcctcaggctgcgtgctgttggaaggaagtggagaggattccagggagttctgggaccttttcaatactgaagagaggaggctgggtgcatcatgggagacgagactattgggaagaagttacctgcaatctatgaagtcgtccatgactctatgcaaatgcaccgactagtggacacggcaggacaaccgagcaaggattcactgcacagtagctatgtccatatgagggcacagacatgcatgctgaatcgagaatcaaagaaggcgatctagtcactctcatcaataaggactgggatcgacgtagagctggtgggaacagagagctgaacggcgagaacgcaggcgtgtaccccgaataacattcgaggaagttagtgtccaccgggaactcggagacacggcaagggacatagtaccgaaagaacgcccaccggcatcacgagtccgactacctgatccaatccaagaccaaagagggacacgggcgaacagatgaaggagagaacacatgagccagtgaagccagaggagtatccgtcgcgtggaagcggagcgcacggaaaacgtgactcccaaacaacgagaaaacacggacagaagactagaggacggaagaaccaagaagaagaagaagcccaaaacgaacttgagactataaacaagcaagggaccatacagatataccatggccgataaacggccgcaaagaaaagggccctcggagacgcagggataagaaagccaagatggcgtcgtcaagacaaggacgactaagagggcacgattggcacccacagagagaaagggccgggaaagagaacgcaggacaggggtacctggatggacgaagacaaccaatcggaatgacaaagtcccaacaagatagcgacagaaaccgcaccacatcgcc

SEQ ID NO: 630713 - DNA, 187 bp, Homo sapiens
ccgagtgtgtgaggtattagaggatcgtctagctcccagtggtaggatagtaggcacagacacagccattgcgtcactcaccacagcctgccatgttcagtcagcaaaggcagtcagccaaccggtggtagcaccttcccttcttggaaccacaagaaaccagcccactggcggaggctaggagggt

SEQ ID NO: 630714 - DNA, 373 bp, Homo sapiens
  misc_feature (32)..(32): n is a, c, g, or t
  misc_feature (260)..(260): n is a, c, g, or t
  misc_feature (305)..(305): n is a, c, g, or t
tcaccataattaggaaacagactgtgttcttnatttgaaacacaacagtataaatactatagtaaagttgggtgcagtggatcacggctgtggtcccagcactttgggagaccgaggagggatggtcacttgagcccaggagtttgagaccagcctaggcaacatagagagaccttgtctcaacaaaaaaatttaaagttagccaggtgtggtggtttgcacctgtggtcccagctactcaggaggctggggtgggaggntcgcttgagcttaggaggtcaaggctgcagtgagccatgattgtnccacttcaccctgggcaacagagaaagaccctgtctcaataaaaaagaagagaaaaattggagttgag

SEQ ID NO: 630715 - DNA, 245 bp, Homo sapiens
gagaaatcggaaccctcctatgtagctgatgcggaatggaatcatggcacactacattgtggaaaataatttgggagctcctcaaaaagttaaacatgaagcccccatatgacccagcaattccactcctaggtatttatccaagagaaagaaaaacgtgctcccacataaaaacgtgtatataaatcttcacagcagcattatttgtaacagccaaaaggtgaacacaacctggtcgaccgtct

SEQ ID NO: 630716 - DNA, 169 bp, Homo sapiens
gcccgcgcagtacacaatcatgtctgaaccaatcagagtccttgtgactggagcacctggtcaaagcgcatattcactgctgcacagcatgggcaatggatctgactttggtgaagatcagcctataattctatgtgctgttggatatcacccccatgatgggtgtcct

SEQ ID NO: 630717 - DNA, 728 bp, Homo sapiens
caagtggttagacatcggggggagaaccttggtggcccccccttggaggatgcccacgatttcctgttttgaatcctaggaaatggctgccgagtggggagccgggattattaaggtaggccacctttgtggaaaatcgcataattggaggaaatggatagaaattgtgatttccctgagaatcggaacccttggttcccttgaaccctgaattgatgagaggctccctgcttgtatggtgtgtaccaaacgtcacctggaatgggacttttttagacccagatcttcatgacgcttgttccccacccccagattcatcatcatctcttgttacgacccaaaggtctgccagggtgtggtaacttgtgttcttttgggcccactttggggtggagaaagagtggatagtgatgagagcccataattcaggacttattccctcttgttgttgtgttgttttttttgcccctgcacccagagtatgaaatagcttcccggagcgtcccagctataagcttggaagtgtctgtgtgattgtaatcaccatggtgaccaaccactccagaatctaaattggacttctgttgtattctccacccctccaattgttttttagccgtttaatgggtacattttagagtcttcccttttgttggaattagatcctccccttccaatgctgttattaaccacactttaaaaacttggattaaatattggaacctcca

SEQ ID NO: 630718 - DNA, 986 bp, Homo sapiens
ggctggctgcgcatttgtcatcagtggacggatgtgtgtgggattctccgcgctagggttttcggccggtaagacgatgtgcgggcaaggcagagtgtgtttctgcgccgcggcttgggtgttggttgcgcggtataagcggcctctcggggctcttttgtgggccccgtctttcttgttggcggggtgtggtattattctcgcggcaccttggtttatttctgcccccccgccgtgcgtttgacgagtgtactgtggttggctggtgttccgtggcgtgtggtttcgtccgcctcgcccgcccgctgcggcctttctcgataattccgggtgcggccacgcggtcctgttacactgcggggtgggttctccccccccgcgtgcgtggttttgatgactcgccctcctgtgacgtgctggggtggcgagggacaccccctcgggcggggttgtcattccgtctctgttgcgcgggatcgcggttcactccgctccgtgtcttctttttgcccccccctctgtgttggcagtgtgttttaccgcaacgcctccctgccggcggtaagtttcatttccccccccctcggggagggtcgctcctttcgcactgctggagtgtcggggcttatttgtctttgtcggcggtagtaagatccgactcgccacccccgcaggaggcggcctgttgtatagggtgaaagagcaagtgagcgagtgtggcggagtgttgagtatagttcgaggtgacaagttggtcccgcggttgcggtccagagggtgcgtgtttgtgtttagccgccgccgcgcaatccgaatttagtctgtgatacgaagctagtctcccccccacgcgaggcggggtgtctattgtttgctttggtactgaggggttgtgttagatagataggaagaaacaaggccaatcaattaatcctatatttttctccgcgaagcatggttaataagaaccaacaatgaacaagaca

SEQ ID NO: 630719 - DNA, 358 bp, Homo sapiens
  misc_feature (30)..(30): n is a, c, g, or t
  misc_feature (40)..(40): n is a, c, g, or t
  misc_feature (119)..(119): n is a, c, g, or t
  misc_feature (176)..(176): n is a, c, g, or t
  misc_feature (279)..(279): n is a, c, g, or t
  misc_feature (293)..(293): n is a, c, g, or t
  misc_feature (345)..(345): n is a, c, g, or t
  misc_feature (347)..(347): n is a, c, g, or t
  misc_feature (356)..(356): n is a, c, g, or t
ccccgtaaaagtggtaaatttggtttaaangggatgaaangtacccctttttgtaaccctgtaccagcctttgtccttttttaaatatgaagtaccttaaatgtaccttacctatgatngggaaatataatgtgtgcccttcctaggatttgtgaagtggtttcatgaactcctanggaatttgttttccctatcctaactcagtaacagagggtttactccgattatgtatagaaccttagtttgagaaaatgaattttactatgtactgaatttagnggttgagaataatnggatctgtgttattcttagtacccactgataaattgtgcaataaataatcantngcaagtganaa

SEQ ID NO: 630720 - DNA, 247 bp, Homo sapiens
gttctgatagcctcccaaagtgcgggattataggcgtgaaccactgtgcccggccaatcttcatttttatacataaacaatagggcagaggaagccatcagatatgcatttgtctcaggtgaccagagggatgactttgagttctgtcctttgtcccatacctgtgaagataacttaccaatttacattgccagggtgaaaatcaacagaactgtttaagggtatagatcttgaggcaaattgtgaa

SEQ ID NO: 630721 - DNA, 100 bp, Homo sapiens
tgggggtcaacttgttctatttctgcatcatcatttacctgtacggagacctcgccatctacgcggcagctgtgcccttctccctcatgcaggtgacctg

SEQ ID NO: 630722 - DNA, 1849 bp, Homo sapiens
  misc_feature (788)..(788): n is a, c, g, or t
  misc_feature (1680)..(1680): n is a, c, g, or t
gcctgtgctctaacgatgtacgctcggactgagcctctcaggatactagtagtgtggtgcagacgtctggatgacgagctctatgggacgcgctcgtttcctacgacctaggtgtgcccccggtcttcgcgggactgcacgtctcaccatcaaagtatctctgcgccggaagtttgtgccgaggacaggcgaaaatgtatgtggcgctggaacgtgtggacgcgactgcgctggaatcgtgctcggggagtcacaaaggccggggacacatggggggcattggcctagttaaccactgtcgagcgttaagcagcggtgcaacagcaccatgcaggcgtcttagtcttcgaacgtctccctcgcctttgggtaccacgtggagcaaggtggtagcgggatcccccgcgagaacaactgctcgagagactcagctgaccgtctagcactcaagtgcattacacacgttgaccacgaacttagatggaacctctctcaaagcataagcgatagcgcttgctagcagcttgcgcctctacagctagcgagcaagagggtccataccggtttgccctgtggcaaaggtctcagcacaggacagcgagaggtaactagactgcgtgagggaatctctatcatttggcgtaggggcaccttgcccattggcaaaggcccaccgacatgccaacaagggagccgcgagcgtgccagttagcacggccgaaacggccaatatgtgggaccgagagcaaatgggttttccagaacggaaggctttatcatttgcaaancgaaacccgctctcacggggacttgtgcccagtgggcgtgggggacaacgccatcgttgcagtgggggcgccacacgaccgggagaccgaacaagccgccggtctgaggagcgccattgggaaacgccgtcccttgcacctggggttgtgcggttgacgggggccctaggtgtgtcgaacggcggggtgtcggtgcagccgctttggacgaacgggaagagccgcttttcgacccattgagacgcgaaaacgctcatttgaagacgcggcgacttatgagcgcacaatccgacatatccacatttggctggttacctacaagaattcgaagttaggggcgtgtaacacccgcgaggcgctattccggctgcaccggtgcaaactttcgacagaggctatgcgggcgccattggtggcgggagcttccattgggaaccttttgagagaacttcgtatggcgcccctgttggtgtacgcaacagcctttataaacctttgcgcgttcggacgccatatggcgcagaggcgagcgctctcgaaagcgggaacgcaacggacttcccaataccgtttcgctacagaaggtgccacgggcgaaagctccctgaacatcgaggcggggacaaagtgctctccagcgccgcggttgtgatatttcccacccagacagttttttttggaaaaccccgagtggttgctgaagccctgcatgagccccactttgcgtgcagatccaaggccggggttatccactttgaacacatgggatagcgcccgataaactcggcctgcaaccgcacaccacattgcacgggcaacatgcgaagggccatcttcgggcacaacccgcgaccacgtgcccacgcgcttcaacacctgtgtgaccaccagntccacgaatatcagtggcccgacgaaacctctacagaagagacgctgcgaacggccacgcgacgagacaacatacaacgttgtgtacgtcccgacgaaacatacgcgaccaccccacctgcatgacccatcagcatgacatccactcgcagcgccgatcaactagcacg

SEQ ID NO: 630723 - DNA, 595 bp, Homo sapiens
gctccccaatgcccctcagtgcccctctccatagtgcccaacccgatacgagccccagagggtcaacagcggctcagttctgacccccactttgagtgagccaggggaccaagtggtgagaggggtgggtgggactcctcgggactctgccggggttacgtccctttccccctaaactgtcgtggagcggcctcccagaaaaccagagactgctacaggaggaatctttgccacctccatcatagctctggattcttgggctctaagcctgattgtgcccatgtgacctcatggcatagtccatgagatacatggcacagacggccctgaacccctcacatctggaaccgtaatacatactgccacatagccgaaaagagttaccgtgccagaatccatggagccttgagatggagcccctgagtccatatatgaggatgtggctggcacagaaatgagtcagtctgacaagtgatagtggacctgcagatggggggattacgtcaagagatgtacatacaaggatcccttgcaagacaagcgaaggttccccctgaatggagagacttcaatgggggcacgctagcagggaccc

SEQ ID NO: 630724 - DNA, 1686 bp, Homo sapiens
  misc_feature (202)..(202): n is a, c, g, or t
  misc_feature (205)..(205): n is a, c, g, or t
  misc_feature (364)..(364): n is a, c, g, or t
  misc_feature (369)..(369): n is a, c, g, or t
ttagctgtcttatcaagctgttcctccgacttcctatacagaaccccctactaatacctacacttactacatgtactacctgaccctcgtacatacactgcatggctaccagacacaaacagggcgcacatgtattaccacgctgaatcatctacatgcatgcaataccagaaattactaacctctactactactataactnctncttcactagcatacatctcccttaacttatcatccattcaactagatcacagtacaactaagatcatagtaactataatcattcatatcgcataaatcctaccattctgaatcacaccaccattgtgatctcactcatcctactgccgtatgtcaggcnacacncgagatgccaggacacgacccagcacaacgacagcgccctgaatacgtctcacgtaatctactaccatctcctagttctcagtacatccccatatcctcgcgtaatctccaatctgccacctacctctatatcgacccatcaacaatctaaccacctacgactatccaactcacctaccagtctctcttactctcacatcccactctcctcacatatagctcccacacacgtacacactttagtccccacacacctcaccacttgcactcccaaaaccctcacgtgtaaactcatcgcacctccagctcatactaccttcgcacactcagcctttgaaccactcagattagacccgcatccacacctcggttctcacgatcacccttcccctacttacagtgccaacttcccccccttataactgcccctactcgctctgaaaggcccccctgattccggcactgcgccgctccccattccagcctccctgtctcgcccccgccagctcacctccgtcgcgacccctcagctgccgtggctccgtcgcgcccatgccggccaccgccctgcccaccacctcacatccccttcgaacgaccgtccgcatttgcagtccacaaacgcccctctacttgaaggaccatataaacccacctatttaacgcttcttgttacacaccaatttacccccttaggttgcaccgtggacactcccctcaaacttgcaacgccggccaattgactctccattacatcggcacgtcatctcgccatactacggaccgttacctgaacaacaacccgggtacccctttaagcggatgtcacggcccaatcacaagcgactaagcgccacgtattcaaccccccaccttccgcgaaagttaagccaccgtccccgattcaagcttacacatacccgaacagacgcccctcccaagtgcacagagcctatcccccccggggagcagcaccagtcacaccagccgcagccaagagtcagcgcaccccacacgaacagatagcaccccccgagcggtaaccaagcttccgcgccgacgaagacacccggcgccaagtaacacacgccacactcacgacagcgccactcacaagccccgcactaaaagaccgcacccagcagcgtcccccacatagcccccgcaagaactcatccaagcccgcgacaacgagccgctacccacgcgatataccaccggcgaaagcacgcggcagacaccaccgcgcacgcacaacccaccccccatcccccacacacgcaacgccacccccagcttaacaccggcgcgccacct

SEQ ID NO: 630725 - DNA, 307 bp, Homo sapiens
  misc_feature (67)..(67): n is a, c, g, or t
gcccccgttttttttggggggcagccccgggaataggaaaggtccccccttccccttctggcccccngtggggttccccccaaaccccccttttttgtgtttttagggccccccggtttttttttccccgggggggaacccttttccctggtttccttcccccccccccggttgggcccttttggggggggggttttccctttggcccccgggggggggcccccattttttcttttttttttttttttcccccccccccccccgggctttttggggtttggaaaaaaccccctttttgtccctggga

SEQ ID NO: 630726 - DNA, 279 bp, Homo sapiens
gaggatccactaatggtgatgactggatgtctggttactggctacaaattatcagagtagtaaacttcgatatatattgaggggatttaaaactacactaagtatcatttgattcgattcagaaagtactttgagatctctcacaaggctccagtgctatcatggtgagcaattgtcttttatataccggtacttggtagcccatactataggccggtttggggcattctctagaagtttccttttttacacaataaattccttataacagccagggta

SEQ ID NO: 630727 - DNA, 412 bp, Homo sapiens
ttcgtcgaagaacaacggcatttacaatacgaaaacagacaatgccctcagttatgaaatgaataaaaatgtatttagtgctttatttttaactgacagcaaattgacttcctttattgagatcgtggctatttgactgtattatactttagctctataaaggtacattgggtacctggaagatcaagatctacagctgcctatttccacatctttcaatccatctggctcctttaaataggggaaaatgcccttatttggtgtaggagcatttcccaatatgaagttacaggttctatttaaacttactgtcacatcaactgttataatagggccttttgtgttttgttatttcaccttaatatcaccagaattcctgtaatttcacaattgtgattttactatgtagaat

SEQ ID NO: 630728 - DNA, 907 bp, Homo sapiens
agcggggcgactgggccggaacggctggagttctcgcggtgcccagtccgggcgctcccttcaggccagttcggcctacgttcagagagcggtccagagccacggatgatgactgatgtctccgaggctctctcggatcgtttgtatctagttattaacagggagcgcgtgaaatgagcgctgaatctctatcattcatcttcattcagacaaagtaagatcatgggcctaaggactagacagcatgctacaggtgctagagatacaacagtgaacaaagacatgaaaaaactctatcttctggagctgacatttatcatccgatcctgactaggcagtgtaacaacctccaataagacaatgaatacattaatactataatagatctgtgtacacatacttaaattatagaagtaaagctaacaatatagaaaggcgagcacattaagagtgtgggtacacttggggtttggtgcccacaagtgtgctacctgtggcgaatagcgtctccatggaaactctacccttattacggcaaacgacttacttgagacggagagtccgacgagatgcatgtaacagtgggcgttcctgggtgacaaaggcatacgagaatcccacgtggcattgcacatgggcttggggaatatagacaacatacctgacagaacgtggtttcaacactggttgtctaagcccacagatctccagcacacatcttgtattcattcaagtatgtggtcatggcttcatagtcttccgttttgccattcaataagcactatgacgaagaaaatggacaaaaggaactaagtttaaggacaaaggggggaatagaaggagagccttggtatatgttactaagcgactaagcccaaggaataagtttcctatttcggggagaaac

SEQ ID NO: 630729 - DNA, 1097 bp, Homo sapiens
agcggtggctggcgggtgggctgcggccggcggctgctcgccccgaagtgggcgcagcctgcccgctgcctggagggcggccagcattagtgcgcgcgacatcgggtcttttccttcccggcgaggagcagtccagacctcctgctgtgacccgggatgccgacgcacatcggacccaaccggacgacccatcatgccgggtgggcctggggcgggagccacacacacagatacaacatccactgaacagcggcggatgcatcatggagcatcatgacctccatcatcccaacatcgacgccccatcataccttcgagacgaaggcgcgacacacagtggtccagatccaggatcatgagtggcacacagatggatcacttgtcagaaccccaccagacacatcagaacccccgatggacgagcaagacgttatggcaccgaagtccgagatcatatatgggatcacgccatgaccagggcagaagcagaagagattcaacgacgagagacgacgcaacgactttccatatccctatgggttacttttcagctggaaagaagtcttccttacttggaagcaaccttatgacacctcatttctttttcatactgaaggttatttcacgttcctacccatggaaggggcatcaagattattgtaagacaattaacatcagtgggaaaatatcccttcacgaagggggagctttagggcgttgaaacaatggggtttgacgatttaaagaaaggaggcggcataaaaggatatttgatagcaggcattttacaacacgaaaaaatttatgaatagatcatggacccaggttagaaggacgttatgccaaccacgtggtggattgcctcttggatcgcaacattaaagaaccaatatcccctggaccaacggacacttaacacctacatttgcgcccctcacagagcgggatcgataggtaccttggccagccacggaacccttcctgcggtccagtcatgcaagacacaattacccacatgtcttcccacccaaagacactgtggccccaacccggacgagcagccatcatatcagagtactgaacagggttccagacac

SEQ ID NO: 630730 - DNA, 164 bp, Homo sapiens
cgtattacattttctgtctagtcacatttacatttctggtaacagttttttacattcatgtgcttgcgtttcctgggccattcaacgcctccgggccattcaacgcctccgggccattcaacgcctccgggccattcaacgcctctggccattcatcgcctcga

SEQ ID NO: 630731 - DNA, 401 bp, Homo sapiens
atagtatgcgctctatatatactcgtgtgtggaatgtgtcctctctctttccactctgtgaaacctatggttctgccattctgggtgaccctgtgtttctttctggtgcccattccatttgtccaggtaatacttcctcttaaaaatctccaagaagctgggtctccagatcccatttataaccaaccacgtgctgcacatgtagatatatggccatcattctaagcccaaagtagttccattctataaaggtttggagagggaaatccaagctcttaaaggcacttaatttctaagtatgtgcatttcccatctcaacttcaagggaggtgtgaacagtattatcttcactttcaatatccctccgctctactctggaggaggctgtcccctctgtgggg

SEQ ID NO: 630732 - DNA, 547 bp, Homo sapiens
  misc_feature (14)..(14): n is a, c, g, or t
  misc_feature (155)..(155): n is a, c, g, or t
  misc_feature (170)..(170): n is a, c, g, or t
  misc_feature (186)..(186): n is a, c, g, or t
  misc_feature (252)..(252): n is a, c, g, or t
  misc_feature (257)..(257): n is a, c, g, or t
  misc_feature (414)..(414): n is a, c, g, or t
cctctgcggcgccncttgcatcctctctccactgcccactaatatatttctttttccatagcatccaacactggaccaactgctttcttttcttctcttgggaccaaaatttaggggtcttagtttctcactgctatgctctggtctattttgtnttttcttctttttcntggttcgttctgtctntgagctctgtgtttcttgtttattttatggctgggagttactgatgctgtttctgctttctgatgntggantggctttgcttctataagtatgcttcttttatagctgtggctgtaggaacttaatttatagggaggagcttgtggtagctgctgttttagttatagctgtactgactgtgcttattatatatctggggtagcttttcttggtaggggtcttcgtggnttcttatttttcattcctttcactgtggctaaggggtggggtgaggggatggagagggagggctgcttaccatggtttggggcttgaggaagatgagtttgttgatttaaataaagaatttgtcatttttaaa

SEQ ID NO: 630733 - DNA, 683 bp, Homo sapiens
  misc_feature (302)..(302): n is a, c, g, or t
cgggatgatcctcatccggaaacaagggcttctacatagcaggactgtctacatagacagccgtggcgagttctgcccaagacctatcgtgtccccgagcgcacgtcggcagcggggcctatggctccgtgtgctcggccatcgacaagcggtcaggggagaagggtggccatccaaggaagctgagccgaccctttcagtcctgagcatcttcgccataagcgcgccttaccgggagctgttgcttgcttgaagctactattgcatgctattgagaactgtcattgggtgctccttggatngtcttcaaccctcagcgctcctccgctgcagcgaacttcctatgacttctaacctaggtggatgcccttcatgcagacggatctgcagaagatcatggggatggagttcagtgaggagaagatccagtacctggtgtatcagatgctcaaaggccttaagtacatccactctgctggggtcgtgcacagggacctgaagccaggcaacctggctgtgaatgaggactgtgaactgaagattctggattttgggctggcgcgacatgcagacgccgagatgactggctacgtggtgacccgctggtaccgagcccccgaggtgatcctcagctggatgcactacaaccagacagtggacatctggtctgtgggctgtatcag

SEQ ID NO: 630734 - DNA, 624 bp, Homo sapiens
  misc_feature (187)..(187): n is a, c, g, or t
  misc_feature (231)..(231): n is a, c, g, or t
  misc_feature (238)..(238): n is a, c, g, or t
  misc_feature (342)..(342): n is a, c, g, or t
  misc_feature (420)..(420): n is a, c, g, or t
  misc_feature (441)..(441): n is a, c, g, or t
  misc_feature (448)..(448): n is a, c, g, or t
  misc_feature (456)..(456): n is a, c, g, or t
gatctcgccgaaatgcccccacctcggaaaccatttccgtcggggtggtggatgcctgaaacggcacacaaggcggtttcgctgcgtgtgttgaccgtggacgactcttcttgtagcagcgcaagcaggtcacgctgttgcctgcaaactggtcggggttgaggtggtagcgctcaatgatggccgncaggccttggattacctgcgcaagctggcagacgaaggcaagangcctgangaagaattcttgatgatgatctctgacatcgagatgccggaaatggatggctacacgctcacggccgaaatacgtaacgatccacgcatgcaaaagttgcatancatcctgcatacttcgttgtcgggggtattcaatcaggcaatggtcaagaaggtcggtgcggatgactttctggccangttccgtcctgatgacctcgnatcccgngtagtcgnccggatcaaggcagcagatcacggctaggggatttcccctggcggtcacacgatttaagaggcggcatcattgtctacgggtaatttggatttcgaacagttccgggtcgtcctggaaaaagcctgtaacatacccctcggtgaaaacaagcagtacctggtatccac

SEQ ID NO: 630735 - DNA, 336 bp, Homo sapiens
  misc_feature (148)..(148): n is a, c, g, or t
  misc_feature (213)..(213): n is a, c, g, or t
  misc_feature (218)..(218): n is a, c, g, or t
  misc_feature (222)..(222): n is a, c, g, or t
ttctcttcagatcgccttcagagtattcccacaggaccctctccagagccttcccatcacgcgagactctcttctggcatgacaaacttctctccttaaccagttctgatacgcacccacaggattgcgccaagttacagcaaagttnagtttgtgcccagcatccaggaatttctttgccaccatcattacctgtttctccagtagttgganccttnagcntcttttcatagtccacttcatagtaacgcaataagtaagtccgtgccgtgtatcaaatctatagtgtcttgtgtcatgtgagggcagatcccaaatatgttctcgtgtataacc

SEQ ID NO: 630736 - DNA, 374 bp, Homo sapiens
atcaagcccctggacaaaaaactcatttttgacagcgctcgtgcccccaaaggcaggatcctccccgtggaggaccattattattaaagtggcattggtgaggctgtgttccaatcccagtagtgggcgagacctggcatccctgtcacccccctggcagttaaccgggtaccaaaaaatgggaaaccggcttaactgcttaaaatgtttggtatcgacagggatgcccttgccccaactgtgaggggcctcatccccaaggcctagggcgggtattaagtgtggggcgggggtctatacattccttaaattttgggaaaggtgctcaaaaatgtactgaaaggaggggtaaatatatgtttttagaaaaatta

SEQ ID NO: 630737 - DNA, 150 bp, Homo sapiens
catgctgctaaagaaaccaagatgctggtggctgctggagacacacgatggggacaggcaaaataggggttgacgaattctccactactggatggctgaaagctaaaaagcactgactgcccctggtcttccacctctctgccctgaaca

SEQ ID NO: 630738 - DNA, 265 bp, Homo sapiens
  misc_feature (1)..(1): n is a, c, g, or t
ntatctcacattagtatgtctggggctagatttcaacacccacgttatgaaaaagtcagttttacaagcctaattttgttgttttttttttttatattcaattaacgttcaaattgcgtcacctattttattcattaggatctttcatattataatttaaccttaaaattcaaccgccatgtgcttttataaaggaaacattttttcagagacgtctgagcccacttttacatggtggtgcctacagccgttaatgtgtgagata

SEQ ID NO: 630739 - DNA, 1045 bp, Homo sapiens
aaccctccggtgtccctgacccaggctaagcttgagcaatgggtgagcaggagcccctacagccttgatcagctgggccagattgcagtcggagaacgatggaggatgagcagctcggtctgactatcatagcctcccggtcgccagtaaagagcatccaggcagatccaggagctgggacaaggacgagcgagagcctgcgaaaggtaccatgtaggcctctgctgggcctgctgtgtggctcgtttcgcgcagcatgcccaatggatccgctcgaacgttcgtggttgactgtctctgtagccgtggatgtgcgaacatcgagccccgtggctcactcctgagatacttggtacgcattgaccggcgacggaccctgggaagagctttcatacgacagccagatcgatttggtggcttgacagtgcatcgagtggttggacgttgacccgtggattacctcgaaatcgtcctgcccgggggggttaacccggcggaggcatacgtggtcctgggcacttggaaaggtagcaattctcgaggcaatttaacgctgtgcaaggggacacactggggcccgcttcacactgagtttgtaaccaaaggaacttgaaacttaaccgaattgtggtaaggggcaaggtctgaccagggccattcaagagggttcccccggtgtttccatccacgcaacggaactagaaccgaacggaactacagaagcacacccttgtacacgttgtggtaagagctggcacaacttccctgtctaccccctatttcccaaaagagaacaggcgcaacctttggcgcacatcgggccaccgtgtgtggaggggaccctgcccagaaggcccctaaacgaaaaaggggccgcgggggccaacggcggacgcatgcaacctttgtaatctggttgtaagcccgggaaagcgtggaaaccctggggagctaacgggggccagcgacgtgtgttttggtccacaccacgtacgcgttggggacacagccccccaagacagacaaaggcacaacaagcatcaat

SEQ ID NO: 630740 - DNA, 112 bp, Homo sapiens
cccccccccccccccatgggggggtggaaaggggggcaaggccctgcctgctcccctttttttcccttggaactgtattaaataaaatcccttttgtttgttcagtttttca

SEQ ID NO: 630741 - DNA, 264 bp, Homo sapiens
acatctgcgcagcgcggactgagactttctccggaagtgcattataaagcgctgataaatcgccctgatgtctattcatcactccatcctgatcaaaaaagtcagtaccatgttctttaatcacttgggcataactctgagaagtatttggcactgaagacacttcgtactctggctggctagtatttcctagatggggaagtagcgagtgatatcctctgattataccttctatttggtctgaagagcacatatactaaagcg

SEQ ID NO: 630742 - DNA, 320 bp, Homo sapiens
  misc_feature (189)..(189): n is a, c, g, or t
actatcagttttgacacaaagacagctgaaaaaaataataaagctggctggacgcggtggctcacacctgtaatcctagctactcaggaggctgaggcaggagaatcacttgaacccaggaggcgaagattgcagtgagctgatatcgcaccattgtactccagcctgtgtgacagagcaatactctgntctcaaaaaaaaaaaaaaaatttcaaatcagagtgtgaggtgattgagacaccccagtttttcctttctactccgaatttccagctgtgattttagccctcctccttttcaacatttcaccgaacccttcg

SEQ ID NO: 630743 - DNA, 426 bp, Homo sapiens
gtctgtgagggtattgccaaaagggattaacatttgagtcagtgggctgggaaaggcagaccccctcttaatctgggtgggcacagtttaatcagctgccagccctgctagaatataagcaggcagaaaaatgtgaaaagaaagatgggtctagcctcccactctacatctttctcccgtggtggatgcttcctgccctcaaacattggacatcagatcggcctgcagatggcctattgtgggacgttgtgatcgtgtgagctaatatttaataaactcatattatatatatatatatactattagttctgtccctctaaagaagcctgactaatacagaggtcatccctagaatttgtcctactacagagagattgcaatttaccccatatgagaattgtgaatagaataaaatgtttgcccaga

SEQ ID NO: 630744 - DNA, 730 bp, Homo sapiens
  misc_feature (28)..(28): n is a, c, g, or t
ggtcttgtgtggctccggaaaggcgttngggatgccaacgatgaggctgctgtcatttgtggtgttggctctatttgctgtcactcaagcagaggaaggagccaggcttttggcttccaaatcactgctgaacagatacgccgtggagggacgagacctgaccttgcagtacaacatctacaatgttggctcaagtgctgcattagacgtggaactatctgatgattccttccctccagaagactttggcattgtgtctggaatgctcaatgtcaaatgggaccggattgcccctgctagcaatgtctcccacactgtggtcctgcgccctctcaaggctggttatttcaactttcacctcggcaacaattacttacctggcccaggaggatgggcccgttgtgattggctctaccagtgcacctggacagggaggaatcctggctcagcgggagtttgacaggcgattctcccctcattttctggactgggcagcctttggggtcatgacccttccctccatcggcattccccctgctattgtggtactccagcaagaggaatatgacactcccaaaacgagaagaactgattggggcttcacagcctcctctcccacgaaattcaggctcctcctccaacaaatccacgtgctttcagcactccacagggtatcttcacatgccactcttctctcttagcccttggccacttttcctggatccttgct

SEQ ID NO: 630745 - DNA, 674 bp, Homo sapiens
agcggagggagctgggcggagcgagctggacggtggacggagcttggtgggcggtgcgtggcgctcccgcaatctcaggataccctggctgctggcggggctgcggtgctggctcggggtgaggtgtgtgtgtgtgtgggtgtgggggtgtgtgtgtgtgtgtgtgtgtgtgtgtgtagacgtggattttaacaaatgctgggtttgagtgtgcgtcaatcctggctttacagttttttctacctaggcttgtacattctcttcacactcccttaagtacccttattctcttcatggccgcgcgcagtgcagccttccgtgcacgaatcccttatgtgtccccaagtttcctccttccgtaatgggatttgctttccgtacactttttaatcgactaaacggataaactccaaagttgagagagactaagtgggattcttcctttgcgctctgaagttcccttgaatgccctcgcgctagcttatacccttcattaacgctcgtcgtgcctgtcattgcttcgtccatgtcgtgcatgccacactaggtttcaaacgtgtcgcgaagtatgtagagtacttataaggaagtgagtgtacgagtgagaccttcagagttctgaacttcgctcctcattactcctgggtggatgggggacgcgtctttcccacaga

SEQ ID NO: 630746 - DNA, 1112 bp, Homo sapiens
  misc_feature (234)..(234): n is a, c, g, or t
  misc_feature (249)..(249): n is a, c, g, or t
gcctcgtgtccgcgcatcaccccgtggctgggggttagctaggggagggcgggaagggcagaggacgcggtggctggaggacgtgtaaccttgcaagaggcgggaggcggggggcagaggtgattgacccccgcccccccgcccgtgggaccaagaaagggatgtgacaggcgaggacgaatgggatctcaggggctggactggagagtggggtacagggatgtgaggaggacnccgcgagtccgcggngggatcccaatagagctgtggccaaggaggaggggagcagcgggaaggctgtgggcactcctgtgtgagggaaagctacaggctcctgcaggtccgagatcggccgaaatcaggcaccccaaggaagccctgctctggccacatggtgtcccctcagaagactccaccagccgatgaggctgctgtcatttgtggtgttggctctatttgctgtcactcaagcagaggaaggagccaggcttttggcttccaaatcactgctgaacagatacgccgtggagggacgagacctgaccttgcagtacaacatctacaatgttggctcaagtgctgcattagacgtggaactatctgatgattccttccctccagaagactttggcattgtgtctggaatgctcaatgtcaaatgggaccggattgcccctgctagcaatgtctcccacactgtggtcctgcgccctctcaaggctggttatttcaactttcacctcggcaacaattacttacctggcccaggaggatgggcccgttgtgattggctctaccagtgcacctggacagggaggaatcctggctcagcgggagtttgacaggcgattctcccctcattttctggactgggcagcctttggggtcatgacccttccctccatcggcattccccctgctattgtggtactccagcaagaggaatatgacactcccaaaacgagaagaactgattggggcttcacagcctcctctcccacgaaattcaggctcctcctccaacaaatccacgtgctttcagcactccacagggtatcttcacatgccactcttctctcttagcccttggccacttttcctggatccttgct

SEQ ID NO: 630747 - DNA, 117 bp, Homo sapiens
ggatttgctggtgcagtacaactaggcttaatagtttggatttgctggtgcagtacaactaggcttaatagggagttagaagcttgaattcgagcagtagtagtagtaggcggccgc

SEQ ID NO: 630748 - DNA, 221 bp, Homo sapiens
tgtataccgccaggcgtctgttgtgctgatcgggccatgctgtctgctggcttccgctgcgcagcagggtaccaagtgtttgcgcaggacggccgcgctggacgcccctttgagggacccatgcttgagacagctgctgtgagggaccgtcctgacgactctgcagccctacgggaacccactcggagggtgccctctgctcagccgggtacctgagctcg

SEQ ID NO: 630749 - DNA, 860 bp, Homo sapiens
gcctcgtgtccgcgcatcaccccgtggctgggggttagctaggggagggcgggaagggcagaggacgcggtggctggaggacgtgtaaccttgcaagaggcgggaggcggggggcagaggtgattgacccccgcccccccgcccgtgggaccaagaaagggatgtgacagatgaggctgctgtcatttgtggtgttggctctatttgctgtcactcaagcagaggaaggagccaggcttttggcttccaaatcactgctgaacagatacgccgtggagggacgagacctgaccttgcagtacaacatctacaatgttggctcaagtgctgcattagacgtggaactatctgatgattccttccctccagaagactttggcattgtgtctggaatgctcaatgtcaaatgggaccggattgcccctgctagcaatgtctcccacactgtggtcctgcgccctctcaaggctggttatttcaactttcacctcggcaacaattacttacctggcccaggaggatgggcccgttgtgattggctctaccagtgcacctggacagggaggaatcctggctcagcgggagtttgacaggcgattctcccctcattttctggactgggcagcctttggggtcatgacccttccctccatcggcattccccctgctattgtggtactccagcaagaggaatatgacactcccaaaacgagaagaactgattggggcttcacagcctcctctcccacgaaattcaggctcctcctccaacaaatccacgtgctttcagcactccacagggtatcttcacatgccactcttctctcttagcccttggccacttttcctggatccttgct

SEQ ID NO: 630750 - DNA, 486 bp, Homo sapiens
aggaattcggcacgagagagagtttgagagagagagttagagagagagagagagagagagatatagagagatttattgatacatacagtgcctttcttactcacttgttcttttctacctttcctgccttgttattttctttttttctcctcctctttgcctattccttccttcgatttcttcattctcattcttttccttttttctttttcttctcttcttatttcttcctttctcttttccttcttttcactcttctctttttatttcttttctcttcttttctttattcccttttttctttttcgttttccatcttcttcttttctcctcccttccttttctttcttccttttttatcttttctcttttttctcttcttttctttcttcttttttctcttttccttcccttctcctttctctcctttcttatcttccttttctcattcctcgttttttctttttttctttttctttctttctt

SEQ ID NO: 630751 - DNA, 167 bp, Homo sapiens
aggtgtagggttgggaggctcaggagctggtgctataagcttctcggggaccacgcttaggatcacaagagctgcatctacgtaagaatcactgattgccaaggaagcacggagtcctttcatatcttcttctacatttaatatctgccacactggtgatgtatccg

SEQ ID NO: 630752 - DNA, 893 bp, Homo sapiens
taaatattatactatcatttaccatctcacttctaggaatactagtatatcgctcacacctcatatactccctactatgcctagaaggaataatactatcgctgtccattatagctactctcataagccctcaagcacccagctccctcttagccaatattgtgcctatgccatactatgtctgttgcccgtcctgcgaagcagcggtgggcctagccctactagtctcaatctccaacacatagtggcctaaactacgtacataacctaaacctactccaatgctaatactaagtcgtcccaacgattatattaactaccacgtgacatgacttgtccaataaaagcacatagatttagaatcaacacgaagccagcccacagcctaatgattagcatcatccccctatctacttttttataataccaaagtcaaacaatcaagcctagttgtagctgttccccaacccttattgcctttccgaccgcccataacaagcccccctcctaatagctaaccatacctgttactccgtaccccgtcacaaatcatggccaagccaaacaaccaactaatccagtgaaccactatccaccacaagaaaactctacctctctatacataatctcccgtacgaaatacgcctttaactctatgaccattccagcagcccacggaattgaattccatatatcagtatcttctgagaacagcacatttagtcccgaccattgggttatctgtcacccgatgaaggcaacagggcagaagcgccctgagcggcaggcacataaaaggcaatctaccaccctacatagggcaccttcccctattcatggcctaattacaaggcaagaaaaccgtaggtcccaaacacatctattagcactca

SEQ ID NO: 630753 - DNA, 286 bp, Homo sapiens
  misc_feature (168)..(168): n is a, c, g, or t
  misc_feature (181)..(181): n is a, c, g, or t
  misc_feature (195)..(195): n is a, c, g, or t
  misc_feature (241)..(241): n is a, c, g, or t
  misc_feature (266)..(266): n is a, c, g, or t
agaattgacataacaagagactgcaagacttcaaggactgcattcgtaggcaaaggttgacccaatcaaagataaaagaaaatcgacagcaaatcgttcgtgctcgaaaatattatgatgattatagagttcagttgtgtgcaaacaatgatgacgaatgacggaccncgggaaggaatgnatatttaacgaacnactgttcgaagacaggtttaacacattcaaatagcaacagattacngagacctaagtaaactatgccaaangaaatgagatgttggaacgg

SEQ ID NO: 630754 - DNA, 523 bp, Homo sapiens
ggaaggaggtatcacatagtcccatattctggaggcttgtcgtcctttttattcttctttccctaatctgtttcacgctttatttcattaagttgatcttcaatccctgatatcctttcttccgcttgatcaatttggctatgatacttgtgtatgcttcacgaagtttttgtgctgtgtttttcagctccatcaggtcatttatgttcttctctaaactggttattctagttagcaattcgtctaacctttttcaaggttcttagcttccttgcatggggttagaacatgcttctttagcttggaggagtttgttatttcccaccttctgaaacctacttctgtcaactcgtcaaactcattctccgtccagttttgttcccttgctggcgaggagctgtgatcctttggaggagaagaggcattctggttttcagcctttttttgtgctggtttttcctcatcctcatggatttatcgaccttgggtcttctatgtgggtgaccttcgaatggggtttttg

SEQ ID NO: 630755 - DNA, 134 bp, Homo sapiens
gcccgcccccccccccccccccccccccccggggggggtccccctttttccttttggggcgggggaccttttttttaaaaaactctttttgtccccgggggaataaagttggggtgttgtttgggccggggcca

SEQ ID NO: 630756 - DNA, 208 bp, Homo sapiens
ccccccccccactttttttggggtggtttgggtggcccaaacagggttttggccggccccctttttcctgggggggggggccaggggtttcccccgcccctccctggggtagccctggggggggggccctgggttcccaaaattgggaaagggggagaaaaaagatgggccgccccccggtccctttaaggggttttccttcccctga

SEQ ID NO: 630757 - DNA, 405 bp, Homo sapiens
atgaatgtcagtagacatagtagatatgactgataagcaaatctggctaccaggtgaaactctgaaaagaaacctgtcttcctggccgggcacagtggctcacacctgtaatcccagcactttgggagttcgagaagggaagatcactggaggtcaggagtttgagaccagcctggcatggcaaaaccccatctctattaaaaatccaaaacttaggaccgggcatggtggctcatgcctgtaatcagcattttgggaggccgaggtgggtggatcatgaggtcaggagttcgagaccagcctgaccaacatggtgaaaccctgtctctactaaaaacacacacaaaaaattagccgggtgtggtggtgggtgcctgtaatcccacctactcaggcggctgaggc

SEQ ID NO: 630758 - DNA, 252 bp, Homo sapiens
ggcttccagcgcatacagtctttgcttctacagctagtcccatggtctccttatcttcaggaggaaaggtttacctcccagcttgtctgttatctccaatctgattctttagagaataggcatagctttccaactcatttctagtatcaatgcgctccttgagctttttgtcttcctcagcaaacttctcagcatcattaaccatcctttcgatttcttcaggtgtcaggcgattctggtcattggtgatag

SEQ ID NO: 630759 - DNA, 288 bp, Homo sapiens
aacaaaaacagaatcataccaaaatcgagctctagacatccaagacaaggtcaaaccaaaaccaaagtatcaagcaatccaagtcaagtcaaaaacaaaaaccaaagtgccgatacaggcacgccataggtgatcaggccacacttccactcaaatggagtgggcaagttccaaagactagtcttaccaagtttcagatgtccagactccaagtgccagttccttcccggtgttcagccactgcattgatcctccgcgggggctgccacacgcttgtgtaaactgatt

SEQ ID NO: 630760 - DNA, 226 bp, Homo sapiens
  misc_feature (6)..(6): n is a, c, g, or t
  misc_feature (34)..(34): n is a, c, g, or t
caaagntaagggaagctgctcaaacattcagaancacacagacttaactgacaagaggagagtgaagagaagaggtcgatgaacaggggagaagtaaggacatagaattggcatgtcacaagcaaatggtcgagagcaaaggcagccgagccctgaagaacaacagaatgaattgaaatgcgattatggaataacaatgaaccatatggaagcaactttttttggt

SEQ ID NO: 630761 - DNA, 345 bp, Homo sapiens
ccccctttccttttcttcctccccgcccccccttttttctttaggctttaagaagaacagaaaatctttttttcctttttggtttttttttgcccccccgccgttttttatggtttttttattggtggggccccgcccagaataaaattgctgcccccggagggggggcccccccaagtttaccccttggtgaaaggaagatgccccctcttttttggcccgtggtgggggatccgggggtgccccctggtggtcttgttcccgggggttggtcctccttcatggccccctttatgctcctggggctatttttttgggccgggaataaaaatggccgagctgtga

SEQ ID NO: 630762 - DNA, 202 bp, Homo sapiens
  misc_feature (23)..(23): n is a, c, g, or t
gtcggcaaagctctatggaagtngggatcaggaggccttgcagaaaggagtcctgtttgcttctgggcagaactttgcacgctcaattgatggtagacggcagtccaatgagatgacgccaaccagatttgtcgaaatttttgagaagaatctcaaaagttctagttagtaaaaccgaggtcatattcagacccaaggtctt

SEQ ID NO: 630763 - DNA, 503 bp, Homo sapiens
gcggccgcctactactactaaattcgcggccgcgtcgacatcttccctgttgtttcatcaacaacctctactgatttaaaacgggtaccaaacgtattggtattattaggaattcccattttttccgtacttgatgctattagtccaccaacatagcgctctttttctgcttgattacgggttaacgctccacgccccgataatgtaacactctttgcttctggtgctttagtctgccaagttttcttcgttttacccgtcactttatcagtcgtttcaacagcttcaaaacgccccgttaacaccgttgatttaggaaaaagagcgctattatcgaaattaagcttagaatcaacaggttttgatgacatgtggctaacttcagcggatggaactcgtgcactatctaaaatgctttggtgcaattcttttaccgaagaaatcgtattttcccatgcttttccagttgataccgctactcgctcattattgacttgaggaat

SEQ ID NO: 630764 - DNA, 566 bp, Homo sapiens
cagaaccctaatgccaccccagcccagggggcctccagccagtcgggctatgccggcagtggaggcggcagcagtgcttcccacgtttccccacgccagcccagcagccagtggccccacccctaatgacccctaggtttctcttcagggccccaagccaggccatctccccccctcagtacccccaggttcagggcagcacccccccacagttgggccagggccagccccagccctttttcagcttccggcaacggcagcagcagccaaagttccacagccatgcagcccttgactggggaaaaatggcggagcagtggctgcaggaaaaggaggcagaacggcggaaacaaaaacagcgggtgaccccttggccctcccccagccccatggttgaaagcccccccatgtcccttgctggggatgcccccccccttctggacgagatgggtcggtagggggcctgctcctcggactttggtttccttttagggtgggaaagggctgggtgccccctgcctccccccctgcccctccttttttgtccctaaagtggggtgaagtta

SEQ ID NO: 630765 - DNA, 162 bp, Homo sapiens
ctttttttcccccagaaaactccgatagcccttttgaaacttaagggtcgaaggtggatttaccagtaaactgagagtagagtgtttagttgaccagggcccttaagggggtaccccccgcccgtccccctcctcaagtatacttcaaaggcctttttccta

SEQ ID NO: 630766 - DNA, 317 bp, Homo sapiens
ttggggtgcctagaggatcccgacggacgcatcacggagagttctccacctcatatgccagcatgtaccacctacagtgtgtgtgctacttgccacgtcttacagtagttctagaactaagacagacagtgcagccgacaggtctccaggtctcctacaatgcaggaagttaaaactccttgattaaaaaccctcctaagatgaagtcttactatttgaaatgcttccatcaagagtgctagtaatccatgcttcaaagcagtcatattgcttgtaagttggacctaacactttttgatctatgaatgcgtccgccg

SEQ ID NO: 630767 - DNA, 613 bp, Homo sapiens
  misc_feature (22)..(22): n is a, c, g, or t
cctcaaggccgggcaagaacgnaatacatatttcgctgatgcacgttcctccgcctcacgaaacacatataagtactactctccccccctatagcacacacataatattataatatttatatctctacccccttgcctcacgcacattttttgtgctacataacacacccgtgtttttgtaacacacctgaatcattgtatctcaatatatttcgttgttgtgcataaacatctcgtactatacaactatgtttgtggtggatattatagaagagcgcgtgttgttatataggtgaggagcgaagacatgttttttgtagtgtgtatatataagagcgcgatgtataccaccgctttgtatcttgtagcatgtctagatcgatcgacagggtgagcgccacacatatgtctatagtatgttcttaatatatgagctcggtgctaccacgccccatttcttacctcctattctgtatgttaatatggcttacccacataggaggcttctctcctcctccctcaaggcatccctgatagttttaagtaggcttagcaccaccccctactttaatgtggacaagacacaaatcctttttctccaaagtaaacgaga

SEQ ID NO: 630768 - DNA, 895 bp, Homo sapiens
atattctttagatcgaatgtctgtgtccctgaccacgttaagggtagtgtgatgctggctctgagctagttccattaggcagtatcttgatatatgaaccagtgcaagatatacacatcattagtacatagccggatggtaaaggcagcgtattcagagtaggtgcacaaactgagcgtatctgtttggtccggattagtccattatctattagaagtcctgacgaggaccaaaccagttaaattagcacactaggtggacttctgtttgaaggaagggtaaacgttataaggaaacctcaaatactataagatgtgtcaaaggtatttctccagaattaattggcaaagcttagtgctgaaggatttctaaatcagcttctaaaattttcttctcaataagacatatgtttgattacttagggaagattcctcattttattctgccctttatgcatttaatccacatgataggacattacacaccttactatccagaacaactcgtgctcatactgtacatctatttctgtgcttggaactacttgttaacagttttatcgaagctgtcagcacataagggactaaaactgcgtgtattatacattggtggcaattgactaaacagctaaatttctgtgtttctagtatagggacctaagcatttcccactttgcagaacagtgtattactactttccatatgccttccgttaacagggaaggttattagttttggtaaacccctcctgtgccgggttctacccagtataaggtaattgggcgccatagagaacgagaacaggcgcgtgtagggcaacttgtgatgcgaggctcatgtaacaaattaaatcgcgcacacaaagtctttttattgtgatcagcatatagactccc

SEQ ID NO: 630769 - DNA, 1311 bp, Homo sapiens
gctccctgagccggtgctgcgctcctctaatgggtgactccgagctgggggctattgtctggaccgactggtcggcgtgttccacaggaaggcaatccgcagtttgcctaccagacgtgcggtcgcggacggaagtccagtgtcgtgtcgcatcagccgcccagcaccagcagctcgcggccaacccggagcagcgcaaccgcaggaccgagcggccgagctcgcgcatcccagaccaatcactcttccacctgcatccttagacgaccggcgaatgactgaagtgaggtcagagctcgacagatccagcccaagccccggcagccttccataggcacggaagacagcggagcgcgccaccgcgacgacccgccgcggcgtccggggcgccacacgcgcgcggccacagggccgccgctcccggctcgaacgtcccgcggcacgcacgcgcctcggcacgcgcgacggtcacgcaccaggagacccacccgaacggtgcccgactgccactaatgcacaccctacgcggcgcccgaccccatgaaggggcaaaccccagaacaccctcaccgtgccaatgaccatgcccacacggacccccgaggcaacacaaacccgacgccaccaaacacgtgccctggcaacggcacgccacccacgacggcgcgcatcgaccccccccacagacagacctcggcaccgaacccgagccactccacccgacggcggcactacctccagccccgcccccttccccccccccccggcagcaccgaccgccgcacccccactgccacctgcaggacactcagcaacgccccaaccaccgacgcgacgcacagactcacccccatcacagagacaccctcgcgagacgccccccctgcaccccgcgccggaacccgcaccacacccacccaacccacccccccccgccccacaacccacccccacaccacaccccacgcccccacaccgacacgccccgagcaccccaacacaccagccacacacagaacaccccaccgccacaccacaccacacacgcacaaaacaaacgcaaaccacgcaccacaccacaaccaccatcaaacacccgacaaccacccgaccggcaccacggaccaccgcaccctacccagcaccggacagccccaccgaccacccacagagaccccgcgccaacaaccgaaccaacccaacccaatcaccccgagcacaacacccccaacgaacccccagagcataaccccacccgcaaccgcaccaacccgaacgcccaacaccaacccacccaaacccccccacccc

SEQ ID NO: 630770 - DNA, 595 bp, Homo sapiens
  misc_feature (322)..(322): n is a, c, g, or t
tgttcaagagagaatggaaggaaatggaaatggcaaacatggcctgtataactctttcaaagagttttgttctggtgatgatcagagaaatgaggtggtaaagcagatgtgtggtccaatgagtgttctgcttttgttttcaaaagcagatgggagaaatagcagcatgtttgtatgctgatgagcagatttgatagcagggaaaactttaatgattctggacatagaggagagaactgctgagctaatttctttgactaggcaaactgagatgagatctggcgcacaaatgggaggctgggcccttgctgggtcagacagntcattcccagaagtaaaagggtaaccagagattatggactcaaatgcttgagcaggagaagaagtaggggaagttctcttatgaaatattcttctaaatgggtggctttcactgaaacagttagcagggcctcatcttgaagtgggatggggagcaatgtaaagtttcagggaagaagagaagattagcttgtaacaatcctgcaaagaaaaggactactgtttgtacccaccaatccattggtacgacctgaatcggatatgggctaggttt

SEQ ID NO: 630771 - DNA, 479 bp, Homo sapiens
gaaattcggccattatggccgaggaactttttgatattaacaattaatttttcattaccatcgaattattcctcaaaatttggggtttattccccattttaaaccagcaatcccatatgaatactaacccaatttaatacaaattgatactaccctattcaacaacaatataaaccaaaacatcttttaccaataaaactatagaccaaaaaaattaacaaaacaaacataaataaacccaaacctttaaatatcaactcaacatacctaaaaacattatctcagtatattactaatatcaccaattaaactctacaaaatcaaaatcctaactaccagttctaaataccactctaaccctttcaacacaaaatatttacttttaccgaatccatccctaccctttcccatatatcgatcaataccattttcccctattaaatacatccctttttacaaagtaaaatttccctgaacat

SEQ ID NO: 630772 - DNA, 666 bp, Homo sapiens
ggccgatggctgagtggaacggcggaggctcctctagagaatggtggtggtggcgactcgggagcctgagctttggaacgaggattggcgcccatttaagcgtcaatacctcaccagcaaggagcagtttcaccaattcctggaagccaaagggcaggagaagacttgccgggaaaccgaggtaggagaccctgtctgtgcaatgagtctggctgagcctgatggctaagcggatccgactggaggatggacagacggcggacgtggtcacgacggaggaggcagctgagcccgttggtatgcatctacagactcagaagagggcccgtggacgaaaacaagggtccggccccatgtgaagcccagcgtaacctacgacaatgaacaggctgtgtccctccctaatccaggagtctggctgctaagtgtttcttcggtgcatcgctgtccgctttctgcatcgtacgtggggcgctacctggatgaccaggccggccgacctgggccccctgctgcgtgctcttcgagaccttcgaccggtgcccctacggcgtgacctgccgcttcgctggggcccagctgaaggccgagggacagaacctggtgcaggaggagttggcggccgcgtgaaccagcccccgtccatccgaacggctggacaagccc

SEQ ID NO: 630773 - DNA, 199 bp, Homo sapiens
ggtgtagagtagcagcaggatgatggggacggggtcagaagaggtctgatggtctagccagcacaggcgtttttcttattttccataattgggtcttagtcgttctgccagttgtctgcaggtaaataaaggtggcccatggcaatcatgattctgtaattgttatagtgcctttgtaagttgacagtttccaaatccc

SEQ ID NO: 630774 - DNA, 213 bp, Homo sapiens
  misc_feature (55)..(55): n is a, c, g, or t
  misc_feature (205)..(206): n is a, c, g, or t
aacatagcaagtagtaaccgatcaaattgctataacgtgtgtactgaccttatgnggaaaatgctgcaaccctgtttactgcctatgtaagtgaaatcttaacttccccattttggaatgctgactccagtcattaggtgtctgtatttcctgagtggttaccctcaagctttgtgctcaaataaactctatacttaatcataanntatcaaa

SEQ ID NO: 630775 - DNA, 779 bp, Homo sapiens
caggcgcggtggctcatacctgtaatcccagtactttgggaggccgaggagggcagatcacaaggtcaggagttcgagaccagcctggccaacatagtgaaaccctgtgtctgctaaaaatacaaaaattagctgggcatggtggcgcccgcccggaaggagggccgtaatcccagctactcgggaggttgaggcaggagactcacttgaacctgggaggcagaggttgcagtgagctgagattacaccactgcactccagcctgggtgacagagtgagactccatctcaaaaactgaaaataacaatcaaaatatgtattctcctaactgacaatatttacttaatctggaaaacaatgtaactatttttaaagtggttacatctattcttgctgaagaacaataaacagaagttgtttggactaagcataaccaaatttcagaaacagtctaatcaatgccaagtatccaaggcaaactctaatacccatccattgtgcaaaagcacgaagcacgcaagtattaaatcagagcaagctgtcctgagcccatacctattgaatggtgtctaaaatattggtacatggtgtaagaggcttgtcaaaactgggattatggcaagaaaggttgcctgacttcataccctttctggctgcaaatttccagggtgctaaagggcttaatggcattgtaaaccatcttaccattagttacaacacgtttaatattggcatatggccaagcagggctaaataggttaagaggcaaggtggagaca

SEQ ID NO: 630776 - DNA, 121 bp, Homo sapiens
ctgacgtcaggtccaacttgaacgatttgggagtcgtgagatagaaatcaagagatgtttattactgatgaaatctagactggaagcctgatgttagagctcctgccatggggccagcggg

SEQ ID NO: 630777 - DNA, 121 bp, Homo sapiens
gattcatcctatatctccgtcatgatgaaactttggctcacaacagactccaccaccgagccccgtccatttttccaggccaacacttctcatcattccaactcaatacaacacgcctaag

SEQ ID NO: 630778 - DNA, 1018 bp, Homo sapiens
cggacgcgtgggtccggacgcgtgggtcgacccacgcgtccgaataaagtttaataatatccgaacatgtacagctggtatggacctatacatgcatcttcaccagcagctggagcatctccacccttggctatttactggtgtaacatcactatgagctctgttgctattgagaaccatgtattgatagagtcctatctacctaacggagctacctagacacgggctaagccctaggccccactgggcacgcctaacgaaaattccttccacgtgctactacaaggaagacccaacaaggctagaggcgcttcacataccggctcctaagttaccctctcggctaaaccatctccgcttctaacccacagaaagctcatatattccacttaaggggcatacggccgtctctgtctccaccaccccaacaaggatcccttacaccgcgattacactgaggcaagccccatatttggattaccccgagcaacaacctatattggcccgccatatccgcgagcaagcccccaaccataattcgttataccctcctacttttcggcgccccccctatagtgactccccacacctccgacgcaaactctcagaggctactcaccaagcaaatggccgccgaattcactcatacaagggctccgcattattctaccaattatagaagccaccccagaaatcacactacattatacaccaaaagctcacggaaaattccccacttaatccacataaatcacattaaatacaccttaatggacattcaccgcatacaacacgatattctccaagccgggtcacagtagacctccacattttcccggacccgcaaaccaatgcggcctattccgcgagctaacgcgcacacacctttacgacgacgcaccgtgcccaaagggcaaccgaagaccccaccgcgctccctacgcgcccccccccttgcccgggcattcccccccagcgcaaacctctgggcgccacagagcagccaacagccacatgc

SEQ ID NO: 630779 - DNA, 868 bp, Homo sapiens
gaccgcccagagggaaggaggtcggcagtgtgaggagctgctatggtgctgagtttcctggtagagccggccgagctgaggcggtcgcggccatgaaggcgggtgccacgtctatgtgggcttcgtgctgtgggctgctgaatgaagtcatgggaactggagctgtcaggggccagcagtcagcatttgcaggagccaccggtccattcagatttacaccaaaccctgagttttccacctacccaccagcagctacggaagggcccaacatagtttgtaaagcctgtgggctttcattttcagtctttagaaagaagcatgtttgcttgtgactgcaagaaggattttgggtccggatggtcagtgcttacaagaaaaatctctcgtgagatagtgtctacattgtgacatgtatataaagagagagagatttaaaaggggccctacaggtaaatggcgattggaaggtgagggaccttgcggaagaatctccattctgagaaaatatacccatagatgctggtcgtgagaaacgaagacttggtgggatctagtacttgtgccatcatgggactaggctctgaggaccgacatggacaccaagcagtctgaattcttcaagggtcccagacttctagcttttttacacggtcgtatgattcaaagtatacaggcccctctgcgtactatggtcttcggttcagggaaggagcttatgtgatgggagaaccaaagattccagaatctggagtgggcgggcacagtgtacaaaagttgaaatcaacttcaggaaggaacagaagatgatgatgacgacgaatgattgaaggatgatgatgaatgaagaaggaaaaggagaggatggaag

SEQ ID NO: 630780 - DNA, 408 bp, Homo sapiens
  misc_feature (85)..(85): n is a, c, g, or t
gctcagttcaccccattaattcaaaagtgtgctcgctttgcaagcccacgtaggtgccgttcttcccttcgtcaatcgtcttgtntagtcagtgcgtccgtctcttcccatgttgatttatgatattgttaatttggcacgtcaacttggtcagctctgatctattcgtaatctttccttatggccgtttgctcagagaggtaggcaacaccacaccgctcggctctacttgaataactataattaataacacacgcacacactctctctattctgatactcactcaccactcgacatctacaaaagaatacataaataaatacacaaaaaaacacaataaaaataaaacaaaatataatgaagaatcaattatataatataaaacaataaaacagccaacatgtcga

SEQ ID NO: 630781 - DNA, 734 bp, Homo sapiens
  misc_feature (478)..(478): n is a, c, g, or t
  misc_feature (489)..(489): n is a, c, g, or t
  misc_feature (503)..(503): n is a, c, g, or t
  misc_feature (521)..(521): n is a, c, g, or t
  misc_feature (727)..(727): n is a, c, g, or t
tagatagagtctcactctgtcgcccaagctgaagtgcagtggcgcgatctcggctcactgcagcctccgcctccggggttcaagcgattctcccacctcagcctccccagtagctgggattacaggcacacaccaccacgtgcagctaatttttgtatttttgtagagacagggttttgccatgttggctaggctggtcttgaactcctgacctcaggtgatccgcccgcctcggcctccctgctgggattacaggcatccaaagcgctggaattacaggcatgagccaccgcacccggccttatcagatgattaagtgaaccttcagtgggcgttgttttgtgggcccacacagaggttcagatttgcctgtcttcgagtgattggaatgtacacacaagagagtgtaattatggtgctggcagaagtattaacctatctggatgtcactgtcttcactctctgactaggctgcttncagggaatctntccacctcaatatntatgagatatctataatnttataacacactcttataggagcctcgggttccttatacacacttgatgacaccagctgttctggtggtcttccatcattggtgatagagccagagtctcactgtgttgcccaggctggccttgaactactgctcaggggatcttcccacctcagccacctgagtagctggggactatagtgcacaccactgtgcctggtcagttntctggtt

SEQ ID NO: 630782 - DNA, 165 bp, Homo sapiens
cgcagcaccgatgctgcagtcgactctaagtatccccacgtccgcattaaagtctaaccgccttagataaataccaagtttacactcacatgaacttactaaaataaatcgtcacaaggactcttccattcacgctgtacattaacaactatttgcacacagcgc

SEQ ID NO: 630783 - DNA, 179 bp, Homo sapiens
  misc_feature (134)..(134): n is a, c, g, or t
accggagtgacgcactggtctactggtctcctgcattcctcttcgcctaaggcgtggaatctataaagcaggcagagagatggcacacgaaacagatcatgccctcaaggctaagcccagctcactcagcctgngtccacaagcgaaggtctctgtgaacctcctattcttctgccact

SEQ ID NO: 630784 - DNA, 109 bp, Homo sapiens
aagtacccacctggcagcatctcaaacccctaggaaggtgaggggctgatggaccacagagcatagggctacagcgagtggtagagagcgagcggcgtgagcgagtgtg

SEQ ID NO: 630785 - DNA, 123 bp, Homo sapiens
ttaggacgtgtcggacacgggacgacggacctgtcggactacgggacgacggactgaccggacgacgggacgacggactgctcggacgacgggacgacggactgatcggacgacgggacgacg

SEQ ID NO: 630786 - DNA, 120 bp, Homo sapiens
caccagatgctcccaccatctttcgggtcctaacacgtgcgctcgtgctccacctccccggcgcggtgggagcatctggtgtcgtgctccacctccccggcgcggtgggagcatctggtg

SEQ ID NO: 630787 - DNA, 415 bp, Homo sapiens
gttaagctcgatgctccacatttgagagtgtcctccaccatactcgtggtcttcaaagtcacggtgtctatcacatttggtcttaacgattcttcagtgttacaagtgagttggaccgctttcaacagctgtttgcattctcatcatttgtgtcaagcttgacgtaggatgtagtccaaagcactgtagatctgagtctaccgggtatgataagtaggctgtaaatctccaatcccacaggtacttgggcacataatcaccgagtcattcatgtactacgcaacagttgtctctggtagctccatatgctgcacatggtatagagagctatcatagagcatggaagtagagatttgcatgctgggcggtcaatgagctgcgcgtcatgtgtgagtgctcagatctgcgagctccg

SEQ ID NO: 630788 - DNA, 524 bp, Homo sapiens
gggatcccctggccaggtctctacctggccagctctctacctcatacagaggggatcagaatagggaatggtggcctgttcatcgtgggtaggtagtagtcatagaccttgagggtggctgggtttcaaggtgggtgaccagcacacttgggctggagggtgaatgtggtaagtctggagtgttcttaatggagctcatccaagtaaaggtgaagttggtgtcagttccaaattcaaccttcttcaccagggggtggctgggagaagtaacggatgggtgccctccaggggacggaacccagatagcatcttcacttccacaatagccatatgggaagagctacgggtccccacatagggggggtgactagtgagagtcacggatcgaggtgaagtgggtggctcacatctagcttttcctatttccacactaagagtaagggtcttcatatgggggggagggagaatattgtatctcaagacggggtggaaaatagacacaggccgtggagtgaggcctccaa

SEQ ID NO: 630789 - DNA, 554 bp, Homo sapiens
gctgcctccatccgaagctctgctgtgcccagtcccctgtggacaagtactataccctcagtggaagcaagctttggatcagtaatgggggcctatcagactatcttcacggtctttgccaatgtacactctatggttacagatccagccacaaggcagtccgtgacatcgcagaagaatcacagtgtctgttgtgggtgtgacgagggggtctgtcaggggtgcatttatcgcgcaattggtgccccgcttggaaagaagaatgggctatcaatggctttcgtaacacaagtcaagagagtgtgctttgaatggacgtacaggaggtgccatcggacgaagctggtgctcgaggtgacgtggtagcggaggtcgtgcattccacggtttgacattgcccaatcctcaatacacctggaatggtcccgggccatcgggcctgcgataccccgtgcgaccaagcattacacatagcaggagcgcaccatgcagttaatcgtcaagagagcggagtgagaagttcgattggcgcgaacttaaaatttcggtgaagc

SEQ ID NO: 630790 - DNA, 375 bp, Homo sapiens
caacgcacaacgtatctgagggtaaggacagctgataggagaaataacaagggcaattcacagagaagaaaggaacagaagtagatttcagattaagaaggaggtaagcccggagtagtggctcatgcctgtaatccggcactttgggaggccgaggcaggtggatcacctgagctcaggagttcgagaccggcctgggcaacatagtgagacctcgtctcagcaaaaaaatgcaaaaattagctgggcgtggttgcatgcacctgtggtcccagccgctcgggaggctgaggtgggaggatctcttgagtccaggaggtcgaggctgcagtgagctgtagttgtgtcactgcactccagcctgggtgaggggga

SEQ ID NO: 630791 - DNA, 1234 bp, Homo sapiens
  misc_feature (670)..(670): n is a, c, g, or t
tacaatgtcagaaaatgtatttgggctttttttttctttttaaaataagtgcattacaaattacagcttagaaagcatttctcgtgatttgtgccaaggtgcctctaaaaaagcagcgcaagttcacagcctacatagaacgggtaacgtggtcaccaggattaattaaagcacaaagatatgtgctaatacacgttacacaaagagaaaaaaaagtgtctttataagtgtcacatcaccttttgtggtcgtacaaaaaaatattatagaaaaccacaagtgtttattcaaaaaaatatcaaatatttatccgagcctagtgtttttatgaagagtcttaaatattctcccctgtgttcttggggtataattattattattattagtgggagaattattattatcacaatctcagagcgaggttttaaattaagagcggtaaactcaagtgggggttttctcgtgaaacacgcggaaaagagttccacgagagatgtcctctctctctcatgtgtttctcactttctccacaattctctccgagcaagaggaagtgtggtgtgcaaattctccccctttgtgctattaaagaggccccgaggggggccacccttgtgggagcccccaacaaagagaggggccattttttcgtccccgcgagcgtgggggncacactatatagagacctctcttccccactattaggctctccccgtgggctgtgtttagtaaattgcctttgtggtctgggacgccaaggggggaaaagaccagagacacctttgtttgccaaaaggcggggaacagcggcatgacgggcgaccaaccttgtcactcccaaaaaaaggcggggggttgatccccttcccaaaggcccggctctcgggtgtggacacagcacgtgggtgttgccactgccacaaaagcgcggggggggaccaccttgtgggttggtcgcaccaacacaagagaaaagttcccccgggaaacagcgtactggggccaacggggtggtctaacacacgatggggcactcccaaggaaccccaccatcccatgatgatgtagggaccctgtcgacctccccgtggtgggcccccccacaaaacgttcacttgtgggggcgtcccccagacagcaactatctatcgcggtgtcaaactaacaagcacacgcgagaaaaaatgaggacgcaacagggatgtaggagcagaaaatcacacccacagggtag

SEQ ID NO: 630792 - DNA, 417 bp, Homo sapiens
gagagagagagagagagagagcgagagagcgatagtgtcagcgatagagactttgaggggagcacagctggagaacctggtctaaatcttctcatccttctagaggatatacattcgaagacaggtgctagactgtttactttatgaggatcacttcttgctcttctatagctgtggagctccctatcacatagtatggcacctgtaccagcagcctactttatcagttgaatgacatactgcttttcagagaggctactgtgtcgaagattgtcgcactccttaacgagatgagcggtactggatgttcactagagcttataccaactggatgagcgtggcatgtatcctgctgatcatgcatgtgagttcagacacttatagcgctgtgcatgatcctcatagtactcaggttgt

SEQ ID NO: 630793 - DNA, 362 bp, Homo sapiens
gggctgcaggattcgcacgagggtcccttcactataacctacatttttgtgacactaagtttttccccattccaggacaggtcaggccctttaaaaatttcaacagctttattgagatataattgatataattcaatcctgcacatgtgtcatgctggagccctattgatttcaacagggatggcgccttgtccaagaagagacccagagccagtgaatgggacatagggtttattttagacttatatacagatgtggtccactggcagtgggctggacaggaccgctactatttgggaggatgtaggttatataacatttctacttagcactctccacttagcaacctccatttaaccctt

SEQ ID NO: 630794 - DNA, 231 bp, Homo sapiens
ctcctgccggctgcaggtcacgtctaatgcccgtcatcaacgaggggcaggaacattatagttgttgctgcctgttttcagccaatcgtcgagggatatctctcatgttctgttgaaaccttaggggaaaaccgctcacataatgtgctttaaaatgacaaaagtcattcgtacgcttaccacacctcctagaaacctgggcttacccagccagggaccccgatgtctttg

SEQ ID NO: 630795 - DNA, 477 bp, Homo sapiens
ataggtttaggtaaaattaactatatttaataggctttcatcactgcaaaactttttttcctttctttctctgtgtctctagtctcttccatttgttctcccttctttactagcaccgaggatttgcttgaaatctctgatagccagtattctcatttatcatattctttctcactttgtgtttccttggtaattttggataactcctttaatttatcttccaaattactggtttttatattctgtactgtcagtcctcctgttcactaatttcaaaatttatagttgtttctcttgtttacttatatagttgtttctcttgtttacttaataacattctcttctttcctatcagtttaattttataaaggctaaccaattaactgtttttaacttctatttccagatatgattttaaaaattaaagcaaaatgtgtataaactttattactgcttcccacagtaaatatttttcag

SEQ ID NO: 630796 - DNA, 1031 bp, Homo sapiens
ctctcaggacgagctgctgtggtcacattcctgcagtctgtgcaggtacccgaattcagccccaagtctggggtcgagatccatgtttctgacctggagctgcagagcgccaatgcctctgttgatgacagtccgtctagaggagctcatagccactctgccgcgatgcccagactagctccctggattcaagatgtaccccagttgactatcgacgaaggatgatgacaggcatacttatcatatggatttcatcgtggcatgcagtccaacgctcaccggtgacagaaaatctatgacattccttctgcgggaccggggcaagagctaagctgattgcatggggaagatcatcccatctcattgaagctacgaaactacagcagtccgtgtgttggccttgtggtgtctgggagctgtaacatacgttgtgcttggggcgccgaacagccttgtactcctgcaagaatggtttcctccatattgtgcaccctgccctttcttatggttatctctgaaccccctggccgtattcacagtcacccagtactataagcaagagtggacatgtgggatcggtttgaggtacaagggctgtagcctaatggtgaggaagatgacccgtcaaacagttcctcgactatttaagacagaggcacaaattagagatcacatgctgtccagggcgggtcatgctctatttctttttcaagccagtgcagcctcaggaacggtgcatcagccggtgacagagatgtgagccggtgtcgaacgacgctgggcgcacgtgtgggcgctgggctggaactgtgctgtacgacacaccggaggatttaaggtccttgtcgattggcactcgggacccgctgtctctaaggggctttggccctttacgcattacaggcctggagtgtgtgggggcacaaatgggtgtgcataaccgagccttctggtgtgtgaggcacgacaacaaaagcggcatagcaccataagtatatagatacacaagagctacaagcgatgtattcagg

SEQ ID NO: 630797 - DNA, 1392 bp, Homo sapiens
  misc_feature (808)..(808): n is a, c, g, or t
ttcggtaagccttcttccttcccagctccttaataaaagcaaagtgattgagtaggtaatgttcaaagtgtctgcctgtgtacatgtacttgtatggattatgtagttcagtaagatgtgcccaagtcatttcagaaagaaagacccttcagttttgatgcatttagctgaacacttgggtagtgagtgggatcctatccagttgaggaatgcttgcaatgctcattgaagggattcgcttcgggacttgtcatcttccagaaaaggaaacatattgtatatttggcccagtgtgattgattgctttatcttcggtaactttgacttgaatgggatttgctcgcattacgtgactatcgaatttaaaactacttatgagtcgacaactaaaatacacaggttcagcgtaatgtctgagcttatgtgtcgagctaacaccaggttactcagtaaccatgacctcgtcctccattccactcatctcaacattaacatagtctacatctgtcgtgccagaaatgcacttgtggcaaggtatagtcctggggtatgaaaggcttctggggcaggaactctggatagggccctacatatgggtctcggtggaatctggttacggggcacaccaggatacaatattacgtcctggtttgccacaattcacctgatgtgtccgcagatcttatcaaccttgcacctggcctgagcggaacccacacggaatacggacgtaaatgccaagagcatgtgcaaaccaccccatcttcagtcattcctcttcagtttcgttctgctgtcttttttttcntcctccaacgaccacattgcaccatagaaggacgataatcaactcacacacgcatcccccactacatcacataacatagtcaagcccaactacatcacccacataccacccaccagactgacgacgcacacccaccaaccacaacactaaccacaccacaactctaccgcacaccctaacgatcagcactactaccccccctaacgacacgtcacacacaaggcagcagacgagcagcagacgcgcgacaagcgagcagcgcgaagcagagcacagcaagagacaagagataagcgacgaaaaagagagggagcaagcgcaaagacaacgacaaaagaagcaagcacaaacgaggaggatggaagcaacaagagaggcgacaaggtgcgaggagcacacacacaaaaggagctgagagacaacagaggaaggggaccagcaacgaaaaaagtggaagacgctgtagcacagcacagacagggagaggacagcgggagcaacacggacgaagcgcacagaacacaggacaagcaagcccagaaggaacgaacaccaacccagcaacagcagaggaaaagacggcg

SEQ ID NO: 630798 - DNA, 201 bp, Homo sapiens
  misc_feature (130)..(130): n is a, c, g, or t
  misc_feature (134)..(134): n is a, c, g, or t
  misc_feature (166)..(166): n is a, c, g, or t
  misc_feature (171)..(171): n is a, c, g, or t
  misc_feature (197)..(197): n is a, c, g, or t
tggccaccatggcggccccatctctactaaaaatacagaaattagctgggcgtggtggcatgcgcctataatcccagctacttgggaggctgagctggagagtcatttgagcccaagagatggaggttgnagtnagcagagatcatgccattgcactccagcctgngcaanaagtatgaaacatcctacaaggggtntgaa

SEQ ID NO: 630799 - DNA, 845 bp, Homo sapiens
ggccaccggggtgctctggtctcgtggggcccctcctccgccccgtcgtcctgactctctctccctcctttcctcagtaggatgtccggcttccagtatcaagctcaatccacgtctcagaggagccagctcggctgtcatcaagggtcctcgagtggattagttctatctttgcttttgccagctgtgggaggtttctaagggccaatagcagagagttcaagtgagatgtcctcctgctgttactgagaatagaatggttacagctactttggttatccattcaggtggaattgaggcatcgtttcagccacctccaaggtggtaataccactagtgtggactgtagatactcggaaacgatgagcgtctcctcataggcgatttactcttcttctgcacaagtcctatgttaccttgggcagtctttgtgtgcctgttatctgcagttgatggcctgctgcttataatgtgggctacacgagtctgtatctggagtagtcgtagaagttcctatgatagactgtgtgttacactgtgtgggcacttttgtgttgtgggtgggtgagcacttgaggcgtgggctaatgggtctgactgagtttgaaatagtgactgttcacgatttttttgtttgaactttccgtcgttgttagaagaaaggggtactgtgttacttgtggtctggtgagcagtatgggatccgtaaatgatctgggaattgggttctagatttggaatctgggggggaaaggctggttggtgaagggacagttacgggagataatttggcttaacggggttgccttacagaaaataagggaaacgggggttttgggaagatg

SEQ ID NO: 630800 - DNA, 234 bp, Homo sapiens
  misc_feature (75)..(75): n is a, c, g, or t
  misc_feature (140)..(140): n is a, c, g, or t
tgctagttatgctaggcatggatggagtagctagatgtggccagagtagctgggtgtggctggaatagctgggtntggctggagtagctgggcatggctgcctactcgaatagctgagtgtggctggaatagctgggttnggttggagtagctggacatggctggaatatctgggtgtggctagagtagctaggtatacatggagtagctgggcatgactggagtagttaggtt

SEQ ID NO: 630801 - DNA, 188 bp, Homo sapiens
gacggcttcaacggaactttagggcgagtgatacgagatgctggtgcagcctgagtctagactccggggacgatgcaagaggaggggcccattgtgctgggatgacgacaagaaagctttggcggaagaaccgtcagtgttagatttcagaccctagagtttcgttattcacttgatgaagcgatggg

SEQ ID NO: 630802 - DNA, 101 bp, Homo sapiens
taaactctacaaagaagttctgccactatattccaagaatgtggttccataagcaaagtcggtttgaaaaattgattaaggctgggtgcagtggctcagtg

SEQ ID NO: 630803 - DNA, 672 bp, Homo sapiens
agtggccattactgccggggttattatgaatatatattctaatttgcttgattccttttctcaacgtatttttatttattttatttttttttagatggagtctcgccctgccgcccaggctggtctcgaactcctgacgtcaggtgatccacctgcctcagctagttgggaggctgaggtgggagacttgcttcaacgtaggaggcagaggttgcagtaaaccgagatcgcgccactgcaccactgcactccagcctgggggacagagtgagatcctgtctcaaaaaaaaaaaacccattattttttttcttttgatattgaattgtcgggcacaggggctcacgccgtgtaattcccaacactttgggaagggctcaaggcgggggggactcaccgtgaggctcaggagttcggaaaacagtctgggccaatcttgacgaaaccccgtctctactaaaatatacaaaattttagccagacttggtgggcccgtgcttgtagtccccagctaactggggaggctgaggcaggagaatcgattgaccccgggaggcggaggttgcagtgagccaagatcacgccttggcactccagcctgggtgacagagcgagactctgtctcaaaaacaaaacaaaacacatttgtacttcacaaaccctcagggggggaa

SEQ ID NO: 630804 - DNA, 335 bp, Homo sapiens
cgaaacaccatctccctctactgtccagggtagagtgcaccggcacattcatagcaaccttcgaacttctgggctcaggtgatcctcctgactcagcctcctgagtatttgggactatagtcatgagcgtcttttcatatttattactcaaaaaggtttcaattgcttatttagctttctgagtctgtgcttgtgccttcaacactttcacaacgattttctgctcctcgataaggaaaggacgcttggtcctgctcactcatttacaccaagcacccaactatctattaacctagccatgggcatcccccttatgagcgggcgcaggattatag

SEQ ID NO: 630805 - DNA, 368 bp, Homo sapiens
  misc_feature (4)..(4): n is a, c, g, or t
  misc_feature (84)..(84): n is a, c, g, or t
  misc_feature (94)..(94): n is a, c, g, or t
  misc_feature (109)..(109): n is a, c, g, or t
  misc_feature (112)..(112): n is a, c, g, or t
  misc_feature (119)..(119): n is a, c, g, or t
  misc_feature (122)..(122): n is a, c, g, or t
  misc_feature (133)..(133): n is a, c, g, or t
  misc_feature (147)..(147): n is a, c, g, or t
  misc_feature (153)..(153): n is a, c, g, or t
  misc_feature (204)..(205): n is a, c, g, or t
  misc_feature (238)..(238): n is a, c, g, or t
  misc_feature (260)..(260): n is a, c, g, or t
  misc_feature (291)..(291): n is a, c, g, or t
  misc_feature (302)..(302): n is a, c, g, or t
  misc_feature (360)..(360): n is a, c, g, or t
agcngccagaatctttgtggattatagatgcaaagtagttaggagtccttggacccacacttaagttacagacagaaaaataanatgaaaaaanaaaaaaaaaaaaaancanaacaaanttnacacaaatagnaaacaaaaaatttnacaaancaaaacaatacaccaataacacaactaaccaaacaaacaaaaacactacannacctaccaactaggaaaacggaaagaaccaagnaaaaaaccaaaaaaagaccacnacccacaaataataaataataaaccaaacanaaaaaaaaaangaaaacaaaccaccaaaaaaaaaaagaccaaacacaccaccaaaaaaacccccaccanaaaaacaa

SEQ ID NO: 630806 - DNA, 1263 bp, Homo sapiens
cgtgacgcgtgtgtcgacccacgcgtcggtgtacggcttccggctggcgtggacgcggtgccgtgcacgcgggaaaagcttccccggtgttccgacgctcgctacgtttgttataactagcatccgctaagaacagtggacataatccttacagagctggctgagtgaggcgaactggttcagcactaaagaaaaggcgcgagcatgacctcaggcatgaggaaccgatgctacgtgaaacgtcatcaagcaaacggtcactgtccaagacagctggaacactccattatccagcacagaatgttcgatgtcaactgtaaggacgaagaatggaactgactcctctaatgcatgcagcactataaacggacgacactcgatatgtgccaaattactactgcgacactggagaccgagtgtcacatagacatacagcatgaacactggatacacagcaccatcatgtaagcatgcactaactggctaataaagacatcaccatgggctaaatgttagaagcgtggtggctgagacacgactgatcgatcagatctgatgggaagaacagcagcatccacatggcagccattagcgggtcaacatgaatagtgtagaccaataatcgaccaactacatttcctcgagagagacctgcataatgacacataagccccagagacataggaataaagagccaaagacatgccccaaagatggaggcaccggtgaacacaaattctcaacacaaacgaaattatacacctggaaacagatccggcaaggcagggaaaaagaagaacatcacagatgcgagagagaacagagccatgaataaatggcccaccagtaataggacaaaaaatacgccagaaataaagcaacacaacaaagacacgacaaagacgcggaacactcataagacatgcagcagagacgacacagagaaacgcctcaaggcgacgaggaagaaaacaagagagacaggaagcgagcgaagtataagtgagtggcaacagacgacaagcacaagaggacacgagcaaaaaacagagacaagacagaaagagaaaagggactccatgtgcaggagaaacaccgaagaaggcgagacaaagagagagcgacgactaagcagacagaggagagaggaagagcacagagacaccaaacatcgactaaagaagagaccgccagatactccggcgacaacaaatgagtgagtcgccgaccgcatataggctagcaacgaagcaagaaagaacg

SEQ ID NO: 630807 - DNA, 124 bp, Homo sapiens
atgtgcagttaaaggttgagaaagaaagaataattttagaatcaactccagtttcaaggtgcaacattataccctgattttaaaggatgcccctcagggggaagttggtacctgagctcgaatt

SEQ ID NO: 630808 - DNA, 114 bp, Homo sapiens
agcggaggagctccgtgacggctgcagcgcgggcgggagcggggacgcgatgtagccgccgacgagctccttgcgggccggggctggcgcctccggggtctgagccgtcgtcca

SEQ ID NO: 630809 - DNA, 648 bp, Homo sapiens
  misc_feature (21)..(21): n is a, c, g, or t
  misc_feature (71)..(71): n is a, c, g, or t
  misc_feature (102)..(102): n is a, c, g, or t
  misc_feature (112)..(112): n is a, c, g, or t
  misc_feature (117)..(117): n is a, c, g, or t
  misc_feature (119)..(121): n is a, c, g, or t
  misc_feature (129)..(129): n is a, c, g, or t
  misc_feature (132)..(132): n is a, c, g, or t
  misc_feature (134)..(134): n is a, c, g, or t
  misc_feature (138)..(138): n is a, c, g, or t
  misc_feature (141)..(141): n is a, c, g, or t
  misc_feature (145)..(145): n is a, c, g, or t
  misc_feature (152)..(152): n is a, c, g, or t
  misc_feature (161)..(161): n is a, c, g, or t
  misc_feature (163)..(163): n is a, c, g, or t
  misc_feature (183)..(184): n is a, c, g, or t
  misc_feature (189)..(189): n is a, c, g, or t
  misc_feature (191)..(192): n is a, c, g, or t
  misc_feature (202)..(202): n is a, c, g, or t
  misc_feature (213)..(213): n is a, c, g, or t
  misc_feature (215)..(216): n is a, c, g, or t
  misc_feature (219)..(220): n is a, c, g, or t
  misc_feature (222)..(222): n is a, c, g, or t
  misc_feature (224)..(224): n is a, c, g, or t
  misc_feature (233)..(235): n is a, c, g, or t
  misc_feature (241)..(242): n is a, c, g, or t
  misc_feature (244)..(244): n is a, c, g, or t
  misc_feature (246)..(247): n is a, c, g, or t
  misc_feature (250)..(250): n is a, c, g, or t
  misc_feature (254)..(254): n is a, c, g, or t
  misc_feature (257)..(258): n is a, c, g, or t
  misc_feature (261)..(261): n is a, c, g, or t
  misc_feature (263)..(263): n is a, c, g, or t
  misc_feature (265)..(265): n is a, c, g, or t
  misc_feature (267)..(267): n is a, c, g, or t
  misc_feature (273)..(273): n is a, c, g, or t
  misc_feature (279)..(279): n is a, c, g, or t
  misc_feature (285)..(286): n is a, c, g, or t
  misc_feature (288)..(289): n is a, c, g, or t
  misc_feature (295)..(295): n is a, c, g, or t
  misc_feature (305)..(305): n is a, c, g, or t
  misc_feature (308)..(308): n is a, c, g, or t
  misc_feature (314)..(314): n is a, c, g, or t
  misc_feature (317)..(317): n is a, c, g, or t
  misc_feature (330)..(330): n is a, c, g, or t
  misc_feature (394)..(394): n is a, c, g, or t
  misc_feature (442)..(442): n is a, c, g, or t
  misc_feature (451)..(451): n is a, c, g, or t
  misc_feature (503)..(503): n is a, c, g, or t
  misc_feature (516)..(516): n is a, c, g, or t
  misc_feature (548)..(548): n is a, c, g, or t
  misc_feature (563)..(563): n is a, c, g, or t
  misc_feature (566)..(566): n is a, c, g, or t
  misc_feature (639)..(639): n is a, c, g, or t
aaaaccagtaaaacgtcaggnctggagctgtaataagacagagacaggagcagctcacacgtggcctaggnggggaggacgaggccataaatactgcaggangaagcaaggnagccnannncgaggcgnaancngggngtngggngcaaganggcacgggngntaaagggacaggagggaagnngggcngnngggacctggnacagacaccangnnggnngngnttggtttgnnngggtgnngnannganaccnccnngtngncnangaacangagggnctctanntnnggggtngggtcctggnacngctggnacncggacaccaggtngttcatgttgctctcggcctcggtgaactccatctcgtccatgccctcgcccgtgtaccagtgnaggaagggcttgcgccggaacatgggggtgaactgctcggagatgggnttgaacagntcctggatggccgtgctgttcccgatgaaggtggaggacatcttgagggcgnggggggggatgtnacacacggccaccttcacgttgttggggatanactccacgaagtagntgntgttcttgctctggatggccagcatctgctcgtccacctccttcatggacatgcggccccggaacacggtggncacgtcagt

SEQ ID NO: 630810 - DNA, 134 bp, Homo sapiens
cccagggtcaggactatctgtcgtgcaagaacggacgctaagaaagtggtgaatcccctgtttgagaaaaggcctaagagttttggcattggacaggacatccagtcccataagagagacctcacccgcttctg

SEQ ID NO: 630811 - DNA, 418 bp, Homo sapiens
tatcagccggtccggcatactggacttctaccatgattgtaagtttcctgaggcctcctcagctacgtggaactgtgagtcaattaaacttcttttcttttattttatttatttatttagggacagtgtctcgctctgtcacctaggctggagtgcaatggcgtgatcttggctcacttcaatctctacctcctggattcaagcaattctcctgcctcagcctccaaagtagctgggattacaggcatgtaccaccactccggctaatttttgtgtttttaatggagacagggttttaccgtgttggccgggctggtctcgaactcctgacctcagacgatccatctgccttggcctcccaaagtgctgggcttacaggtatgagccaccatacttggcataagaaggtccaggtatg

SEQ ID NO: 630812 - DNA, 160 bp, Homo sapiens
gaagccttataggtagaggcgacaaacctaccgagcctgtgatagctgtctgtccaagatagagtcgtagttcaactttaactttgcccacagaaccctctaactcccctttaaatttaactgttagtccaaagaggaacactctttgacactaggaaaa

SEQ ID NO: 630813 - DNA, 733 bp, Homo sapiens
tggctggtaggcccggggggttgctggccgaatggggcaagttcatgaaaccggggaagggggtgctggtccgggtctgggacgctactcccggacgcaaagtctgtctatcgtgaaaaactattgtatgtatgggccacctcagatcgcccctacagccatgctcgggtggctgggaattggaccgctacccccgcaaagtgacagctgcctaaggggcaagaagaagatcgccaagagatcaaagataaaatctttggtgaaagtgtataactacaatcacctaatgcccacaaggtactcgtggggattacctccccttgggacaaaacgtggtcgtcaatagggatgtctctcagagactccgtgctctataaacgcaaggcccgagcgggaggccaaggttcaagttttgaagagagatacaagacaggcaagaccaaggtggttctcccagaaacgggggtttaagcatgcttggtttggatcctattaacatatttttataaacgaagaaaaagcatacaaaaacaaaaacaaaaaaaaaaatcgcgccggggtctattatgtgcgcgggggggcgaaaacagaggtgtatcagtaagaggcactggggactacatgttgtgtctcagaccccagttttcgtgtgcaacgggggggataagaggggcccccaaagggaggcagtaaaatgcaaaaccgggactgaaagagactgacaggaaaatca

SEQ ID NO: 630814 - DNA, 291 bp, Homo sapiens
aacatatccagcttgtctaacacatcacagattattagttacaaggtgtagattaatgagcttatattgtattcctggatcttttgagttaataccaatggtaccttgtccagaggcctatcatcattcctagtaggtggccacagagtaagagatattaagaagctccctgatgagtcatcatctagcgaggccctgtgtaggctttattataggagtacattgacttctggggcatcaaaggctccctctatcatatctctgtcattgctctcagcacgacacacactt

SEQ ID NO: 630815 - DNA, 781 bp, Homo sapiens
cgcacgcagcgcgagaacgaactacggtaggtacgaggctgcgtttacgcttgtgtccctctttctagctgtcgcgcacgagtcccgacgggccgctccacgcctcgacatgtcgtacaactacgtggtaactggcccagaagcccaccgccgtgaacggctgcgtgacctggacacttaacttcggccgaagacttacacctgttgatttgccaaaaacacgagattagagatctatgtgtgtcaccgcctgagtgggcttctggcccgtcaaagaggtgggcatgtatgggaagattgctggtcatggagcttaaacagtgcccaatggtggtgagagcaatggacctgctgtttatcttgacagcgaagtacaatagcctgacatcctggagtataaacagagtggcgagagcatagacatcattacgcgagcccatggcaatgtaccaggaccgcattggacgcccctcagagaccggcataattggcatcattgaccctgagatgccggatgattggcctgcgtctactatgatgggcttttcaaggttataaccagctaggatcgcgcataataaagaagtcacggccttcaacatcctgcctggcagggatctgcatgtccatagaatgccgagttcctatatggtttgccaagcacctactatactggttatgctaccaggaccctcagggcggcgcgtaaaaacctatgaggtgtctaccgagagacggactccatcagggccttggaaccgtacatttcaatctaggctac

SEQ ID NO: 630816 - DNA, 782 bp, Homo sapiens
  misc_feature (207)..(207): n is a, c, g, or t
  misc_feature (296)..(296): n is a, c, g, or t
  misc_feature (374)..(374): n is a, c, g, or t
  misc_feature (608)..(608): n is a, c, g, or t
  misc_feature (665)..(666): n is a, c, g, or t
  misc_feature (689)..(689): n is a, c, g, or t
  misc_feature (695)..(695): n is a, c, g, or t
  misc_feature (735)..(735): n is a, c, g, or t
  misc_feature (742)..(742): n is a, c, g, or t
  misc_feature (751)..(751): n is a, c, g, or t
  misc_feature (761)..(761): n is a, c, g, or t
ccccggagagcgacccctcccccggccctcgggcccgggggagggattgggcgtttcatcacaaccacattcttgcccaggaccaaatagaccccagccgctttggtcaaaaagtgggacttggacgtgaggagtgtccttccgtcagaagagttgagccaggttcgagtgcacggagcgtcccttccatcaggagaggtgcagagnccaagccgtttttgcccaagaaggagaaaatgaagctgaggcgtgagcaatggttgcagaaaatcgaagccataaatctggttgagcanaagcacagggaggaccgaaggcgaagggccccggtggtggtgggggacctgcaccctctcaggaatgccctgcccaanttgttggggtttaaggttggcagcgggggccaagcccccagcagggaaagcaacaagccccggccctcaaagttcagccggatgagcgcagcccaaagacagcagtttttcgaggaaaaaaggacccggtttcaggagttgttggccagtccggcctacagagcaagcccccctggtggccattgggcaaacgttggcccggcaaatgcagttggaaaatggcggccagttttnaccagggcagggggcatgccccaactcctcaggacacatgtgggccaagtaaaaagnnccggcccctcaaggaccatggcntgagcntggtggacgcccttccctttggtcggttgtggggctcaanaaatggntttgtgaanttcccctgcnctgccagggccgttcccatga

SEQ ID NO: 630817 - DNA, 793 bp, Homo sapiens
  misc_feature (11)..(11): n is a, c, g, or t
  misc_feature (68)..(68): n is a, c, g, or t
  misc_feature (70)..(70): n is a, c, g, or t
  misc_feature (98)..(99): n is a, c, g, or t
  misc_feature (107)..(107): n is a, c, g, or t
  misc_feature (114)..(114): n is a, c, g, or t
  misc_feature (117)..(117): n is a, c, g, or t
  misc_feature (120)..(120): n is a, c, g, or t
  misc_feature (126)..(126): n is a, c, g, or t
  misc_feature (138)..(138): n is a, c, g, or t
  misc_feature (141)..(141): n is a, c, g, or t
  misc_feature (219)..(219): n is a, c, g, or t
  misc_feature (239)..(239): n is a, c, g, or t
  misc_feature (248)..(249): n is a, c, g, or t
  misc_feature (268)..(268): n is a, c, g, or t
  misc_feature (279)..(279): n is a, c, g, or t
  misc_feature (285)..(285): n is a, c, g, or t
  misc_feature (287)..(287): n is a, c, g, or t
  misc_feature (290)..(290): n is a, c, g, or t
  misc_feature (293)..(293): n is a, c, g, or t
  misc_feature (296)..(296): n is a, c, g, or t
  misc_feature (300)..(300): n is a, c, g, or t
  misc_feature (304)..(304): n is a, c, g, or t
  misc_feature (308)..(308): n is a, c, g, or t
  misc_feature (324)..(325): n is a, c, g, or t
  misc_feature (329)..(329): n is a, c, g, or t
  misc_feature (333)..(333): n is a, c, g, or t
  misc_feature (340)..(340): n is a, c, g, or t
  misc_feature (342)..(342): n is a, c, g, or t
  misc_feature (347)..(347): n is a, c, g, or t
  misc_feature (368)..(368): n is a, c, g, or t
  misc_feature (371)..(371): n is a, c, g, or t
  misc_feature (407)..(407): n is a, c, g, or t
  misc_feature (449)..(449): n is a, c, g, or t
  misc_feature (455)..(455): n is a, c, g, or t
  misc_feature (470)..(470): n is a, c, g, or t
  misc_feature (509)..(509): n is a, c, g, or t
  misc_feature (525)..(525): n is a, c, g, or t
  misc_feature (527)..(527): n is a, c, g, or t
  misc_feature (600)..(600): n is a, c, g, or t
  misc_feature (779)..(779): n is a, c, g, or t
ccattaaaaantactgtttttaaaaactaataacttaaaactgcctctcgctaataagaaaaccaaantngtccacaaaactttctcctttccttctnnaggttttncgttgcnttnttntctttnaccagtcttttnctnctaaacttatttggccatttgaaacaaacagttctgagaccgttcttccaccactgtttaagggtggggtggcaggtnttagggttttttttcttttngccttctgnnctttctgggctgtcttggngtccttgcctnctcctncngcnttnttntccnctgntttnttgtcacccaccgcgnntgtntgtntcttttntngttcngcaatgcgtcccaaaggtggntantctgagatgctctcaacacacatgggcttgccaggnaccttatcaacaatggcagcttcaccagtcttcaagattttngggccntcttccagctttttnccagaacggcgttcattcttttccttctgctctgcaaanttgcttgctttgtgtncngtgtggcaatccaatacaggggcatagccggcgcttatttggcctggttggttcaggttaatcacctgggcantgtagccagctgcttccattggtgggtcatttttgctgtcaccagcaacgttgccacgacgaacatccttggcagacacattcttgacattgaagcccacattgtccccaggaagagcttcactcaaagcttcatggtgcatttcgacagattttacttccgttgtaacgttgactggngcaaaggtgaccac

SEQ ID NO: 630818 - DNA, 92 bp, Homo sapiens
ccccccccccgtccccccccccccccaaacacagcatttgggttcttttaacctgggccccaggtgccccccaataaaatcctttgttgaga

SEQ ID NO: 630819 - DNA, 178 bp, Homo sapiens
  misc_feature (138)..(138): n is a, c, g, or t
ctcaccgtgggtggacactttcctccttaacagaactttgttccagccactgacccattctaactcttccccctctgactctcctgcgcagggtctgttcctggtttcccacgctgcataacaggaagacatatcccntcccctgtggcagcaacggctacaactgggacgggacggg

SEQ ID NO: 630820 - DNA, 962 bp, Homo sapiens
  misc_feature (590)..(590): n is a, c, g, or t
attgagtgttggtgaaccccagagtgggttataggggagaaatgggcaatagagcccaaattctttttggccacatagatgtaggcaacaaattattggggaaggattttgcattccagtcttccaatgtttaacaatggggggatataggatttataatatcctggggcgcgatgcgaatgccccccaagtttcccgacctcattaggattccttcttcggttcatgggattcgttcggggtccctatggagtttttttcagggctagaagtattcatgagaatgaaactgccgggcttatctgatgggttagagggccttttgagaaagaaaatccagggggataactcgggatattgctccccggtcaatagaagtttttaaaaggctgtgacccaatcctgctaataatggaaatagtgggaaaagaatagaagagcacgccagttcaaagagaataatctagtggagaaaaaccacggagagccgtattgaagctttggaactagaaatttctttcttggtgattaaaagaggaccacaagtgttattcaccacgagattttttgttgcctcgctggcctcattngctataaccacatagattgttgagtggcactattttcttgtttagtttttcattgaaaataatattgccataattctacacactataatatgccaataaaatggagttattgttttgacaaccctctcttaacactatttttggaagatgacactttctgagttttcagagaattaacatataaatccacgaagcacagagttccgtaaactcgagaacttctggaacacgttgaatcagctttaacctatggtggctttgcctttaaactagaggtgtgtgatggtagattatttcagataagtatgtaaaactgtttcctgaacaaataagatgtatgaacggagcagaaataaatactttttctaatta

SEQ ID NO: 630821 - DNA, 680 bp, Homo sapiens
ggcgaggcgaggcaatggcttttcggacccacggagcgacagagcgagcggccctacggccgtcggctggcctggcggcctgagatgtatcttgggaagaaggcggcagcccgcggcggctggcgtgctgcagcgtgcagcaacccgggacggagtgctggccctgggacagcatggctgtgctcctgaagaactgggtcttgagtgtgggcctgctgcagccaccgcgggtgcctagtcagggcccagcctgaggtctgggcctggttgtgctgtgtgtgggggatgcagcacagccctgaaagaaaatgagcctccctggtgggcctcgcacccccctgtgtgggccctggcgggaacctgccgggggtccaggaggggctcaggtgccaggccctactgtcgtgccatgggtctgcgaccccatggaaacctgaatagcagagactccggagggggcgtcggaccagaccggacgcaagcgggcgaaggtcagagtacagagatgatggattgaaagctttggtcgcaacctctacagaagatgagtcatcactctccgacagaaagagcagaaactgccaaaagacagcagaaaggaacaaagatagcttccgccccaaacaaccacacataaaagagccacagtgcagcacacaacatgaaagtgacgcctgaag

SEQ ID NO: 630822 - DNA, 312 bp, Homo sapiens
acaaaaaggggagtatgtggtatggtaccctgcagtcattattgcgcacaagccttatttacccttcctttttacaatttagatactaatttcagtccattgtagaagagcactttgctataacctctcaagacataaaactgcagttttttggaactatgtgaactgtactgtatcatgtggtccaaatgaattgttcacttggggaataggatatgcttgtgttcacacccgctcaggtcctctttggattccagcacgacgcctcaaatcattccatgacgtgactgggacccgacctatacatgctcg

SEQ ID NO: 630823 - DNA, 378 bp, Homo sapiens
atttacctaaatagattatggtgattttgttgaaccaatatttaataagcatctgtatccccagccctggcaatacaaagatgaataagcagagtttgctcataaatcagtcagaagttgctgtatgttttctagcatataattcattgtcttctcctcagtttttacctattagcattaaatctctgatttccaggaacaaagtttctgagttgccttcaaatgtattttaattttgaaactagaacaataatacatctagtcaagaagttataagatgatggttgaatataacaaaatattttggtgctagaactcagccttacactgttttgtatatatacaaataaattatgtccccaacctgaaaaaaaaaaa

SEQ ID NO: 630824 - DNA, 316 bp, Homo sapiens
aaccctaataacggacgtacaccacagctcacggcaacggtggatccttaacccactgagcgaggccagggaccgaacccgcaacctcatggttcctagttggattcgttaaccactgcaccacaacgggaactccttattttcacttttttaaactaaagaacatcacagtcgaattactcagcagttagtagccaaattcattaaactttacatcccttaacatttatttttaaagccatttttattaaactttggaactgtttgtatatatttttatacgtaattaggtttcgggatcctctagatcacctcg

SEQ ID NO: 630825 - DNA, 1200 bp, Homo sapiens
gcctgcggtccggacggacagtgcgtgccccgagctctccgactccccccgcccgccattgccgaggcagctcgatgcccaattcgcgtccccagtatgacatcgcctgagagcatgccccagatagccgagcgtccatcggcaccgtgagttgtgaaatactcccatacaatctgcacaagcctacatgtcaggaacagggatccatgctcaaggacaggctggccctagtcgtgcggcttatctacatggcacatctgtccgctccggtacttcggtgccagtctgtcctcgcctggtcaacaacagttctgtcaactatcacgcccagctgcattgtggtgcgttgcttctgggtgtagggctacacagcacccggctccacacgattctgcctccggtggaaattgcgagtcgtcgaacgactttgcgccgtgtcccctcataaattgttacgcgtagtatccttgtgcacctctacttgccttgcaaacgcagtaggtcgaaaattatcgactatgggcaatctattccgtaacccgaagcatctagctgggtagcgggccaccccggaccattccgaatagttaccaccatgtaccaccccaagaacatcgccaagaaactgcctcagttccctcgcttagaatagggctaaagcaaacggtgtccgacaagttcggtctccgcatcgaaccaaggacacattcgttcattgaagactgtggtctccccgagcctttccgggcgcttccccaaggttaccgtgcagccctcggttcttgttctcgcctttccccccatttcaccgcggcgttccggcccagcagctttttaggggaccgcccttttctcgtctcctcgaattaccaaccaccggcacaagacgcaactttttcacgtcttgggctcggcgggactaacttttaacccccccgggttacccccctgttttacctttcgtccttgtgccccaagaatattcctagccccttgggggacctttgggtagttgggcgcccacggggggtgcttgcggatttgcgtacctatgtaacctggcgctttacgtcccccttatgccccattttattacctcctttcgcccggcgtgttgattgcgcgatgtggcgatagacccccgtatgtggtggctactctccaaatgggaggggcgtttcatatgtcgatgtgtttcca

SEQ ID NO: 630826 - DNA, 205 bp, Homo sapiens
  misc_feature (13)..(13): n is a, c, g, or t
  misc_feature (20)..(20): n is a, c, g, or t
  misc_feature (23)..(23): n is a, c, g, or t
  misc_feature (47)..(47): n is a, c, g, or t
  misc_feature (60)..(60): n is a, c, g, or t
  misc_feature (75)..(75): n is a, c, g, or t
  misc_feature (82)..(82): n is a, c, g, or t
  misc_feature (88)..(88): n is a, c, g, or t
  misc_feature (101)..(101): n is a, c, g, or t
  misc_feature (136)..(136): n is a, c, g, or t
  misc_feature (138)..(138): n is a, c, g, or t
  misc_feature (162)..(162): n is a, c, g, or t
  misc_feature (166)..(167): n is a, c, g, or t
  misc_feature (171)..(172): n is a, c, g, or t
  misc_feature (188)..(188): n is a, c, g, or t
  misc_feature (200)..(200): n is a, c, g, or t
gttatcactaacntgttatnttnaagagatgttaaatatttatatgntttgttgactagntgaaatgtgcattcntgttagngttgantaaagaatctggnagttgcttaattgcggcaattaaacaatttatggntntattttgtaaaacaaactactggnaatnncttnntaatacctattttcantctgattacctnttttt

SEQ ID NO: 630827 - DNA, 275 bp, Homo sapiens
tgtgcctgctctggttcgccaatggcaggcgccctgcagtgcatcccctgtgatgcctacaccatgaaggagctcatagatgtgtgcccgtgatgagtctctgcagaaggtctcccactgtcctggtctgcgctccaggtctgttgatcctgtggcacccaggcctttcatcacagtcatccagcgctcgtgtctcggtatcatttgctgacctctgacaccaccaatcatgcttcgccagctgctggtcacggctcaactcgctgagtggtact

SEQ ID NO: 630828 - DNA, 468 bp, Homo sapiens
cagttcctctggaagaggaaaagcacagaccccatgaatagcccttttgcactcattgggtagagtcaatgaaaagctgctggtgagaaaacttttgaaaacacttcttggtcaggcacggtggctcacacctgtaatcccagcactttgggaggccgagctgggctgatcacttgaggtcaagctttccagaccagcctcaccaacatggtgaaaccccatctctactaaaactacaaaaattacctgggcgtggtggtggccgcctgtaatcccagctactcaggaggctgaggcaggagaatcacttgaacccaggaggtggaggttgcagtgaacccagatcatgccactgcactccagcctgggtgacaagagagactccatctcaagacaaacaaacaaacaaacaaacacacacaaacacttcttaatttagaaaacaacaagaacaccaaaaaaaaaaaa

SEQ ID NO: 630829 - DNA, 736 bp, Homo sapiens
agcggagtcctgttacacctcccgcggcgcgcacagcggcaacccgggcgtgcgggggcgcgccgccggtcaggaggggcctgcggaggcgcgaggcccccggaagcgccttcccggaaggcagggaggcaacgccggctccggaggcggcctgggcgatggcggcggagttctggccataacgtgcgcaacgcgcaagtaggaggatgcctcactcgggctgccggcatggcggagcagcgttgggggctgcagcgggcaccgggcccgcggggccgccgctgccgcccttacgtcctctctggggcccgtgcttccccttgccggcgggcactctctactcattggcaggcgcaacaagcgcgtccgttggacaggcccgcttcccctttcctctccacctcctgcccggcttggacctcaatcgtgccattccgatactgccgcaaaggggtcggcgacaccctgcccgcacgtttgcgtggcacagtgaccgatattcctcaacatacgacatacagtacattggggtgcccggagagcctgttcatattggacggcaatggttacaagcaccgcatttgaccagaatgttcagacggcagacatgcacactgcgcaatgtatgaagcccagagtcccactggcagccgcataagaatcctacattccccgattgacggtcacatgggcaccacaagacagggcattgaccacccttatcctcagccagaat

SEQ ID NO: 630830 - DNA, 1182 bp, Homo sapiens
  misc_feature (1)..(1): n is a, c, g, or t
  misc_feature (61)..(61): n is a, c, g, or t
  misc_feature (408)..(408): n is a, c, g, or t
  misc_feature (528)..(528): n is a, c, g, or t
  misc_feature (535)..(535): n is a, c, g, or t
  misc_feature (540)..(540): n is a, c, g, or t
  misc_feature (632)..(632): n is a, c, g, or t
  misc_feature (703)..(703): n is a, c, g, or t
  misc_feature (755)..(755): n is a, c, g, or t
  misc_feature (757)..(757): n is a, c, g, or t
  misc_feature (763)..(763): n is a, c, g, or t
  misc_feature (767)..(767): n is a, c, g, or t
  misc_feature (769)..(769): n is a, c, g, or t
  misc_feature (793)..(793): n is a, c, g, or t
  misc_feature (796)..(796): n is a, c, g, or t
  misc_feature (798)..(798): n is a, c, g, or t
  misc_feature (808)..(808): n is a, c, g, or t
  misc_feature (856)..(856): n is a, c, g, or t
  misc_feature (873)..(873): n is a, c, g, or t
  misc_feature (876)..(876): n is a, c, g, or t
  misc_feature (903)..(903): n is a, c, g, or t
  misc_feature (914)..(914): n is a, c, g, or t
  misc_feature (943)..(943): n is a, c, g, or t
  misc_feature (946)..(946): n is a, c, g, or t
  misc_feature (957)..(957): n is a, c, g, or t
  misc_feature (1006)..(1006): n is a, c, g, or t
  misc_feature (1031)..(1031): n is a, c, g, or t
  misc_feature (1063)..(1063): n is a, c, g, or t
  misc_feature (1065)..(1065): n is a, c, g, or t
  misc_feature (1069)..(1069): n is a, c, g, or t
  misc_feature (1078)..(1078): n is a, c, g, or t
  misc_feature (1080)..(1080): n is a, c, g, or t
  misc_feature (1085)..(1085): n is a, c, g, or t
  misc_feature (1090)..(1090): n is a, c, g, or t
  misc_feature (1098)..(1098): n is a, c, g, or t
  misc_feature (1102)..(1102): n is a, c, g, or t
  misc_feature (1106)..(1106): n is a, c, g, or t
  misc_feature (1147)..(1147): n is a, c, g, or t
ngagagagggaggacctccatgagtcctccaagggcagtgcctctgcaactgctgggggtncaggggaagcagggagtgcatggggctcctccagcaaagatgagcgccagggctgcgtggatgtgcccaccggtggcctgcagggccgcagctcagctcaacgtcctggatgcccatgtcacgtagctgcggcagcgggggctgccactggctctgaaggctgggctgcccagaggcctgaagggcatgcggtagggcttggctgaagagatcattggtgaagggcgttcctgaatggacaccagaggacaatggtgagggccctgaggaatgaccctgggtgccaggagttggtgtgtgagaacagcactccggagtgctggccagggccaaggcggtggccagcncactctgggtgaggggccggggcccagcagcgccactgttccccagggaggctgggcgggagcggggagtgctgctagagggtgtggacctggtgtttgggtgaaagttatcctcatcanctgagancactncaaacaggaagccacctggcatatcccggtatgagctggagggcatgctccgggaagaggagttagttccaggcattggggcactgcctgcnacggagtgcagaaccaggacaatggcatttacgagggccgggtgagccggcaccaacgtatcaagcatatngggatcagcgaagacagaaaagaggtccttgttctggagaaccccaagagcnanagggtnactncngaggcctggggtggccacaatganctnanccagaaactncttattgctgagcatcttaaagaccgccttcctgttagaggagccgcngtgcagggcagtgtgcnaanccgggaactctcttaagggagccactntgtccacaggntccggtttctgaacaggttcaggccaggnctntcgcagaacanggacagttgacccagggtgaatgccacacaaagttaagtgtcttggcancttttagcttccgaccacagttgancagaccaatcagcccagggtctggacagactncngggngtttgccancnataancgccncagaaatnaaanctanagccccccagcgagtttctcccagttctgtttttggaacgnagaataaactttggagtaattggtgggcaacaagc

SEQ ID NO: 630831 - DNA, 105 bp, Homo sapiens
gttcaaagcagtgccgctgtcgggttctgggtgtttgaccctcagcggtacgattccaaaacactgctacgtgtgtctaaagtgattgtttcccatcgacagtaa

SEQ ID NO: 630832 - DNA, 547 bp, Homo sapiens
tgctttgtctgttgtagaattttagataaagctattaatggcaatatttttttgctaaacgtttttgttttttactgtcactagggcaataaaatttatactcaaccatataataacattttttaactactaaaggagtagtttttattttaaagtcttagcaatttctattacaacttttcttagacttaacacttatgataaatgactaacatagtaacagaatctttatgaaatatgaccttttctgaaaatacatacttttacatttctactttattgagacctattagatgtaagtgctagtagaatataagataaaagagggctgagagattaccatacaagggtgattacaacatgtaaagacaatttaatctcttgtttcactgtgttctggtcaaataatgtgtgtaccaaaagagataaaatatataaagcagagaatggtattatctatccccatcttgaaaacaccctatagttatgtgacaatgtgcactcctgtacgaatagagcttaataatgatatattaaatacatcaga

SEQ ID NO: 630833 - DNA, 363 bp, Homo sapiens
  misc_feature (173)..(173): n is a, c, g, or t
  misc_feature (195)..(195): n is a, c, g, or t
  misc_feature (261)..(261): n is a, c, g, or t
  misc_feature (282)..(283): n is a, c, g, or t
  misc_feature (285)..(285): n is a, c, g, or t
  misc_feature (290)..(290): n is a, c, g, or t
  misc_feature (343)..(343): n is a, c, g, or t
tggccagtgtgggaccgggacgggaaggaagaaggaggctagagagcagggggaaaaggtgcacttggccagtgcgcctgccaggaatgagtccatgcgttgtctgccaacccctaccacagtgtttgtgccttcagctgagggggcacctatgggccctgaaccctgctggngctccacgaccctgagagaagnggtgagaagaatcatctctgcacctcgggtctctgccagaggaagacttaagcatccctgcgaccncacattctagacagagatganntncaggnttggcccatgctacaaacacaaaatttgcaatagaaaagataagaccaaaaantcataagaaaagcaaaaaaa

SEQ ID NO: 630834 - DNA, 722 bp, Homo sapiens
  misc_feature (258)..(258): n is a, c, g, or t
  misc_feature (261)..(261): n is a, c, g, or t
  misc_feature (271)..(271): n is a, c, g, or t
  misc_feature (274)..(274): n is a, c, g, or t
gtggaagtgcccggaaattggtatgcaaggtaatggccctttccctccacttcttcctggctgggcggcaagcacggccagtacaggaacggctccaggtttctgacttggaggcacaggctttaggacaaggaaaagctggaaaaggaactgtccccaaagggtcgggagtgtttgaccctgctctctcagcggctgggctctcaaaagtttttctttggagaagcccccgcctccttggaagcctttgttttcagntanttggccctgntgntgcaggcaaaactgcccagtgggaaactgcaggtccccctgggtggggtgcacaacctttgtgcctattgtacccacattttcagtttttaattcccctgggatggaggtgagggacccccgcaacgccaaacaccagcaggcccaaagatttaggaggagccataccggggccggaaccaaatcctatttgtgttggcaggaatggcaaccatggtggggtaccccttgctcaacggcattgtttccatccaaggggcaaagcctggttgggccccaggcacccggaccctggggatgggttaggaggattaaaaggaattatttgtcctcccgctcccaaaaatggtttttttatttttatgcatttcaaaggcccccgggcctccttgttgttgggacaaccggacacggggggttgccccccaaaataaaacccctccccctta

SEQ ID NO: 630835 - DNA, 248 bp, Homo sapiens
tctaagcgacttatatccttcagatactctttaagtgtagtgagtattctaatgtctccagagtgtgagtacgacatatgatcattgtcaatccatggcatttgtctgtcatacagtttagaaccacgtgttgtagtgcaatagagtacaattgaaacaggttacattctgagatccttgagtgcaagggccatgcattatgttcgaacagttccactcgccgctagtatacatgaacaataatgcgt

SEQ ID NO: 630836 - DNA, 376 bp, Homo sapiens
  misc_feature (173)..(173): n is a, c, g, or t
  misc_feature (195)..(195): n is a, c, g, or t
  misc_feature (261)..(261): n is a, c, g, or t
  misc_feature (282)..(283): n is a, c, g, or t
  misc_feature (285)..(285): n is a, c, g, or t
  misc_feature (290)..(290): n is a, c, g, or t
  misc_feature (307)..(307): n is a, c, g, or t
  misc_feature (318)..(318): n is a, c, g, or t
  misc_feature (326)..(326): n is a, c, g, or t
  misc_feature (352)..(352): n is a, c, g, or t
tggccagtgtgggaccgggacgggaaggaagaaggaggctagagagcagggggaaaaggtgcacttggccagtgcgcctgccaggaatgagtccatgcgttgtctgccaacccctaccacagtgtttgtgccttcagctgagggggcacctatgggccctgaaccctgctggngctccacgaccctgagagaagnggtgagaagaatcatctctgcacctcgggtctctgccagaggaagacttaagcatccctgcgaccncacattctagacagagatganntncaggnttggcccatgcatgccnttcttcacaantttgcaantagactgtaaaataggaccaataaanccttttggaagagccaaaaaaaaa

SEQ ID NO: 630837 - DNA, 1188 bp, Homo sapiens
tatttttcttatgtaatttcttaatgatattactattatgttttctattttaattattgttgtgttcttgaattgttttatattagatacaactcttcttagagtgggtgatgaaaaagaaataataaccacagaacatacataacaacagataatcggacataacaaacacagagatgaacaatgaacacgaatcacaacatacacatcataataagcaagagagacggtggtgcgtgcctactaattacacgcacgcttacgggtacgagtcacggtaatggcgtgacgcaccctcgctttgggtgcccaggacagtgcggctggaattgtagcgtgtgttaacatttcatagagtgtaacgttgactggagccagatgattcagatatgacgtcatagtttggtaaccgtatatgacaatgatatgggttcgtgagctgaatggtatcaaagtaaatacatcaagagatttgcgagtagcagacaaactaacggcagaggcttatatatgcatcaattcttgtgcatttagctatgtctaatacaaagggcaactattggttatataaaggcaacatggtaactaacgggcagaagatagtatggcttaaatagataagtagagaggagaagcaataaacaaaaggtatcggatgtaggacaattattactgacgcagtctgattcgaacaaaaaacaccaaggaggggatacatatacaggagcctcgagatggggggtcaaaagccgtgtgcacattaacaactcaacgagttccaattaatatagtacgacagtcaagtaggcccactagcagacgtcttactagggatcatataaccctgtggggagcaaacgaattcaattcaaccggtccccatcatcacttctaaaaaacattcaaacaccagtttgcccgcatggttaccaccattgggggaaggtacagcaagtccattaacgggcggggaaaacttctcaagtcccggttacactctaaaagttacgcctttttagtcaacacagtctcacttagcaaccttttggttctaaggacaataaccttaagcaaatgttgcgctaagtgaaagaccaactagacaggtattagcaataaactgggataacaaggtcctggtatctcacacaaaactacagcgggacatgaccaacatcggacacggtt

SEQ ID NO: 630838 - DNA, 417 bp, Homo sapiens
ataggcgcgttctgcgtgcggaggagctgcagcgtgttggcgcaggcacacaccacggtggacgagctcgcacggcgggaagacgtgcgccactacctgcagggcctgcagcagtatctgcagggctgttgctgaaggccaccaatgagaagctgagtgtttacgccgccctgcagaggcagctgctgagtcccggcacggtcctcatcctgctggaggcgcaggcgtgctcaggcttcctgctggaccctgtgcggaaccggtggctgacctgtcaacgaggctgtgaaggagggttgtggtgagccccgagctgcaccacaagctgctgtcggccgagcgcgccgtcacttggctacaaggacccctacactggccagcagatctctctcttccaagccacgcagaaagcgccta

SEQ ID NO: 630839 - DNA, 140 bp, Homo sapiens
  misc_feature (8)..(8): n is a, c, g, or t
  misc_feature (14)..(14): n is a, c, g, or t
  misc_feature (42)..(42): n is a, c, g, or t
  misc_feature (85)..(85): n is a, c, g, or t
  misc_feature (100)..(100): n is a, c, g, or t
ctgtctgncacagnaccgcctccatcccatgtcccgcccagncccgcccccaacccaaggtgctgagagatctccagctgcaacnacgcaccccccaagngtggccgctgttacagaaacaataaaccctgatgggcatg

SEQ ID NO: 630840 - DNA, 613 bp, Homo sapiens
acagggatacttaaagatgcaggagtaaacaacctaaccatacaagtggaaaaggaggcatactttcagcatatgtccggcctgagtactggatttcatgatgttctggctatgacgaagcagatggaatccctgaaatactgcaaagatggcacttacatcatgtgagacgcagccctgcggcaatgaacagtgaacagcggaggtcggatgaggtgataatgtcagagcagagtgaaagttgcacataattgtacgaaaactttttaagctccctactgttagattaaggagtctgttttaaaagaaaattgagatgcagaatgaagcattcattgaataagaaaattgtcgctctgtttgaattatgtgcttgaaaggaatcttgcattggaatgaacatgatgtaaccgtacacatcatcttcaggaatggacgcataatgatggattctggtgaagaccaaaatttcttctgtgcatttactctcagtcaggaagcatccccactgtaaatatgtatttacatgtttattacaaagactcagatgaagtttttagtcgattttttgcatatctgaaggacaaaatgagaataaaattctatatttatg

SEQ ID NO: 630841 - DNA, 347 bp, Homo sapiens
cgactacagcagctatgcaagggcgttaacgatctctcaaaactgatcagtttgtgcaaagtaaaccagttcttttaagagaagactggtgcactagcccagggtcagggatattaaaatctagcacataaagcccatgactagaaggtagaaatacaggcaatatactatgagggcaacaaccatcaattacagttaggaatttttctgtaacaacgaaatggataatcaaatattgcaacgactcaagtattacggagcaaagtgcatttctacagtatgcagtgtggctattcagtattctaacttagaacagcctatgataaggggcagccgagaaggacaca

SEQ ID NO: 630842 - DNA, 502 bp, Homo sapiens
  misc_feature (38)..(38): n is a, c, g, or t
  misc_feature (477)..(477): n is a, c, g, or t
  misc_feature (483)..(483): n is a, c, g, or t
tagcactctgttgcccaggcctggagtgcaatggcaanatctcggctcgctatagcctgtgcctcctgggttcaggcaattctcctgcctcagcctcccgagtagctggaattacaagtgtgcaccaccatgtccagctagtttttgtatttttagtagagattgggttttgccccattggtcaggctggtctcgaactcctgacctcaagtgatccgcctgcctcggccttccaaagtgctgtgattatagacatgagccactgtgcctggtcttggatgagatttaaatgggaggacttggagtaaagcagattaccctccataatgtgtgtggggcttcgtccagttcagttgaaggccttcctaacgtcaaagggctggacctccccctggaggcagggaaggggatgcttgccagcagggggggcattttgggatgggggattagccattcctcccccgcatttttccagcnttcccntcctaccttgttcagattt

SEQ ID NO: 630843 - DNA, 83 bp, Homo sapiens
ttactggaaagactgaagaccacaaatctttttggacattttggctgtataaagcatatcatttattaccatgaaccctggaa

SEQ ID NO: 630844 - DNA, 107 bp, Homo sapiens
tagtcggtacctgatgcatgttgcgcggcggattgaccaccgaccgtatccgcgacgagaaggtgaaggtactgcgttcgctgcgccgcattgatcagaccaatgta

SEQ ID NO: 630845 - DNA, 614 bp, Homo sapiens
ggctgcggcagatggcgacagttggcggtcggcgccatggcagggcttgcaggactcctgctgccttggtgatccctgggctgacagccatgagagcacagcggctcagttcctgtagagtgagggttgaagtaaagcggagtggcagccgctgtcgcccgctggctcccattaggtcggttactctgcagcggtgctcgtgcagccttggtgaaggccctgcccggcagacgatctatgtattgcctccagtggactgcttgctctcgtccttctcttcgatccttcagagcctccttcgaactctcgcgcccctgttgggtttcgatggcctatcgtcctactggtttcactgcggacttcgttactcttgtcttcaagcgtatcccttacccttggaataccggggaaggcctttttgtgggcaactttttgttgccctttgggctttttctctggggcaggctcccttgtttccttgtattctgccttataagcctcgcgtgtggggtaaaacttgttttctctcgatgactcattgcttcccggattcccgcgggttcccagcaatccgtgggctttgatcccggcttttgtgtgcaccttaacggcca

SEQ ID NO: 630846 - DNA, 269 bp, Homo sapiens
  misc_feature (215)..(215): n is a, c, g, or t
  misc_feature (246)..(246): n is a, c, g, or t
  misc_feature (267)..(267): n is a, c, g, or t
cagcctgctctcagcggtctgcctgagaatacatcaggggcctctgaagaggactgagccgccgtgcagccagcctcgggggtcatggttttaaaaccaggtgtaccttacgttgggtgtcctgcaggttactataccttgagtttaaagtcgacttcctcttacatttctcccctgctttggatctgctttgtgcttggctgctgagagagcanacagggctaagacagtgtattcttccaaggntttttggccttttaaacgggncg

SEQ ID NO: 630847 - DNA, 528 bp, Homo sapiens
gcggatatgagccagcggataaatattctcagccgcctgtgcagtcagacaattctgggaagcattagatatcctacctccgctaagtgcctttctattgactttggcttcgtgtcgcgctaggcagacttgcgcaactcctgcatcctggagccaaacgccaaatgaactactgcactcaagttgaataaactctaaagatctgctctcagggaagcccaaacttccatgattccatttatagatggcttcaaaacaagtaaaacctatctatggtgatacaagtcagaagagtggctaggataaccagtggtggtaatgatggcagagagatttctggagtgctggttatgttccacatcctgatcagagtggtgtttcaactggcatgtatacttggtaaatcttcatcaagctgtatgcttaagatgtgtccattatatagtatataagtgttttaactttagaaattaaggatgtaggtgtcaggtggtacagagattcccataagaaaaaagtgggctagta

SEQ ID NO: 630848 - DNA, 1266 bp, Homo sapiens
ggttgactcccaacggtgacggctcccttcccacactcctatggcgaccagctctcctcccccgtgtactcccaacttctcgcgccgacttggcgccaggcagtggcataccatctaacggtgctctttagaaacgactaatgctatccctcgtgggcgcagaacacccatcctcacgttctctgaccctgagctggtgggctcgagcccctaaatgtcctacaccgtcgtagtcccgttgaggccttagacgaggatggtgatctgattggttgcgcatgggtgtgggctcaggagatatgatccgctgtgattttaaagatcccattccccatgctactgtgtaccttcgtgtcatttaggggcccttaaggacccataacatctcagggggaccaaataggcacgctcgccaagcgcggtccacagacatcgtgcgaggatcgcttactccgtcaagcgtgccatcggggcagtatgtgggtcgtccatcgtgccctacacacgggtgccgtagccttgatcaggtcttttgcaatcccacggcggaatcaggaggtgccaggtatgcggcactcttggccgtgcagcgactatgaggaacaggattggttcgtcctttgtccagtgtaccccgtgcccataccgcaaaagcttcctgagtcgtcatgacaagtcccaagctcccttttttccaatgactctgttaaagcttgacctgtccagtcctctatacctaccagaggaacgaggaccttgctgaatcaacacttgtgttgccacgcatacgtccttgcccacccaatgcaagatttcaggcgacgagaacccctggtggccatgggtaaaacccattaataagcaggggacaccgaagcaagctcgacggcattgagcaagacagtagggcgcacaaaccaccgataaagtgattcccgatattggatggcgcaattgatactcccaagtcacgccgttggaattgggccaagggccatcccccgatttgcttagagccagattggccaggctttcaatctcctttgttggagacaatgttggggcctccacgtcccaattctttccattccttaggaacccaaggtagacacccgcgcagagcaccccctggaaaattcatttgccttcccgtcattagtactgccccctaacttgtgaagacattccgaagttaaacttttgggcgcaggcatcatagatgcgcgccacgagggagtccaccattttacacactataccccatag

SEQ ID NO: 630849 - DNA, 604 bp, Homo sapiens
  misc_feature (430)..(430): n is a, c, g, or t
gatgcagtagctgaacaagtaccgtctgcggactaactgcaaaaatgctggtccgtgcacgttgctgcggcgtggtccgcagcccttcctcgtcggggctggactggtctccagaacatgcttaggcgcttcatcattgtcatctcgcttgcagagtggaaggttccaatgccctcgtacaacacgtcagtcttcaaacatgacatggggaactgcttgagtatgtccgtctattctgtgcaatgagcggtattcgttgagaagcatgagtacctctgttgatctagaagaaacgtgggcgtgtcttccaatctattggtgatggtatagcccgctgtatagtggcgcgtgaagacaaatgtgttcaatgccacccaataatagtggatataaagtaatacgtctcacgtgctgtaatagtgggctatgntctcgttggaaacctgttcgaggaacccttgggaaacaaggttgttggagatgattcgctctgatcgtaatcgtcaagaatgaatatcacctaaattagaccgaaagggaggagtgtaggatggagatcgacaatagccaatgtgcccattgccatgtgctgaggagcacaggg

SEQ ID NO: 630850 - DNA, 114 bp, Homo sapiens
gaggattactgatcttccgtcccagaaaaatgcacacacacagacacaccgcattttgcatactttaagaaattcacaggctgggcgcggtggctcacccctgtaatcccagca

SEQ ID NO: 630851 - DNA, 135 bp, Homo sapiens
tactctacataggctcctctagctctggctctgtctctgtctctgaccgtgggaatgtgatgactagtctcactctcctcccgtaccctggaggcccgcctcatctcctgcaggcttagtaagacctcgtacata

SEQ ID NO: 630852 - DNA, 169 bp, Homo sapiens
tcatccacagtaggtcgagggtatctctcccacggctacatgaaggctgcagcgattatggcatgcgtgcagatgctatgaaatctaaaagagccagattaatttaatgtcttacagatttctcttatagactgtgtgtttcatactgttactcaaaaaaaatacatat

SEQ ID NO: 630853 - DNA, 216 bp, Homo sapiens
ggcaccttgatcttggacttgttgatttattaaataattccacattctcctgagatcaaggaaaatacttttcagagtggctttcttggtgtctaacatttctgctttattgcagcgaagacacaaataaaatcctgatcctttaccagccccctcctcacctccaccctcaacccatcttcctagtgtttgtgaaataaacttggtatttgtctg

SEQ ID NO: 630854 - DNA, 358 bp, Homo sapiens
aaaggctggggaacatagtgacatcccatctttacataaaatttttaaaaaattaacaaggcatgggggggcacacctgtagtctcagctacttggctgagggaggatccctggagtctgagggttcaaggctgcagtgagctgtgatttgtgccactgcaccccagcctgggggggtggcagagtgagaccctgtctataacggcaccccatataataaattcttcgtcttcgcggcccgcgaattctagttagtagttggacctcggtaaatttccggaacacggtattcactgctagcgctgttactctatgtttttccaccttttcatctgtggtcaccttagcatagatcggg

SEQ ID NO: 630855 - DNA, 551 bp, Homo sapiens
cccaaaacgaggagtagcattactgtgggcatatctacacaccacactatcctgtagaatacgtgactatgctcccagattatgtgtgacagagcaggatttcttcacgatactagccttatcctctatgaggaagtaaaaccgaatataacagagagaatacaggactatgacgtgtctctatgataaagcccttgatgaactaatggatggtgccatcatagtatttcagaaggatgacccctgaaaatgataaccgtgaattacccaccgcaacggagtatttccgagatctctaccaccgcgtagatgtcctttactgtgataaaacaatccctaatgatcctggatttgtggttacgttatcaaaatagaatgaattatttatcaggttgcaaagacagttgaacagaggctcaacacagatccaatgttgctgcagtttatcaagtctcaaggttatagggctggcccaagtcatcctcttagacctaattatgcaggtcctttaagagatcttctacagttataacagcctagacaaactaagc

SEQ ID NO: 630856 - DNA, 759 bp, Homo sapiens
cgccgcgagttcccacttaggatgggtagcacagactttgaatggtcgctgatcccgatttgtgcactagttagcactggtcagggtccctgtatttccgtgcactgggggagataaatggtttgctcctaattctctttgaaaactgggcctccctgctctgtgattggataaatgatgttcccctcccccccccctccccccccatattgctccaccaggggagagccccatatgggggagccaaatttgaccaaatgggaattagaggagtgccagttttaaaaggaaaagttgctgtcatccaaatggccagccctttcccccagctactgtttttggggcccagatggctgccctagccagccaatcactgcccagggccagatcatggcttttggagggaggtgagtttagggagggccacggaccactcctcctacccctcataccctccccgcatataccaaaggggaggttttagacacggctccctgagatgttataccccacgaggagtcactccttcattcctcctctgtctctttgcactgttttttggtcttggccccaagcctgagtgacgaatttcctactggatgtacccagttcccatttttaagggggggaaaggtttcaaatggggaaaaacacaccaaaaaaaatcactaaaattccccccaatcttgtttctggcactttagaaaactgccaacaaaatacgtaataaagaatacatatatatatatctacacacca

SEQ ID NO: 630857 - DNA, 983 bp, Homo sapiens
tgaaccgcagaaggcggtggaccatacgcgccagctcttctgggagaagaagctgatgcgggctgaactgccttcgacattgctgaggagctggtcaagaccatggacctccccaaggggcctgcagggggtgggacctggctgcactggatgagactgctgctgtctggcacatctgccagctgcccttgcacatatagcaccatgcccatcaacgggacagctctacgggacgccgttggagaagaacccctggcgtatggctcaacaccacgcagcccctgtgcaaagccttcatggtgacccgacgaggacactcaggaagcaggaacgagctggtgcacgcacggtgcggacacccggcctggcaggaggctgctgatggccgacatgctggcgcaccgtggaggacgcttggcccgtgacggggagcgcgccgcctggaaccaaggcctgcagctgaggacgacgacgaggaagcacgacgcaggaggaggagcgaggagcccgacccggcaccggagcatggagcacgtcaagggcacgaggccctcccgacgacgcccgcgcgcgcctgcatggcagaccagacatgccgaaccggcggaaccttcggagcccccaacgttcaaaccagggatcaagacggcagaacagaccaacgcccacgagatgcacaagcccaaggacggacacgtgcccgcgacccaccaatggcaccccgctccctacgggcacagtccaccaacatcaccacgtgggtgcgcaaccagtgtcggccaacaacaatactctagggcaccatgcagccacccaacaccagaactaagaatcccgcttccactgacatcggtctacctgcttcaccataagcatacacgagatactcgcgcaaagattgcaccgggcatgatcacttttctcgccccttggccgtggcgattgccccacagcaccgtttcggtcagcacacatagcgaccc

SEQ ID NO: 630858 - DNA, 247 bp, Homo sapiens
catatcgaatcgagccggtaccctatgtctcgatcgttaataacacataaaatcctgtatcccagcactttgagaggttgaggtgggcagattgcctgaggtcgggagttcgagactagcctgtgcgacatggtgaaacctcgtttctgctaaaaaatacaaaaaattagccgggcgtggtggcgggtgcctgaggtcccggctactcgggaggctgaggctggagaatcacttgaacctggaggcg

SEQ ID NO: 630859 - DNA, 125 bp, Homo sapiens
  misc_feature (39)..(39): n is a, c, g, or t
  misc_feature (115)..(115): n is a, c, g, or t
tcagaccccaactctaagaagagcaagtgttccaaatangctgcattgtagagtttaggcgcagtgacctttccataatgggtaggagtggtcactgcgcctaaactctacaatnacttatttgg

SEQ ID NO: 630860 - DNA, 426 bp, Homo sapiens
  misc_feature (18)..(18): n is a, c, g, or t
ctcaactctgttgccccnggatggagtgcagtggccacaaccttggcctcactgtaaacttcaccctcccgggtttcaagcaattcctcatgcctcagccctccccaagtagccgggactacaagcgtacccacccatgccccaggatgtacagccctcccagcacggtgctcgcttccctaatgccattccacagtatttgttgcagagaaggaagcagcatgcccaggacagatggagacaggactaatttggcttgaggtatgtaattttgaacttgagcctctctctgggactgtaaaactccaaatcaaagtcttaatctgagaatacatacatctgaaagagtgattagggactggtaaacatctattaatattcaactctgatacaaagtacaagttgtttattcttaccacgcaaggc

SEQ ID NO: 630861 - DNA, 1143 bp, Homo sapiens
  misc_feature (435)..(435): n is a, c, g, or t
ggagaaggtggaggagaaggcaagccggaaagagcgaaagaaagaacgtggtggaggagagaggagacacggggctgaggaagaagaagaagataagtggcgatggatggagaggaggaagatgaatggggaatgagatggaagatgaggaagaggaagaaggaggatgatgagtgggcccggcggctgaagagagcgtggcagaagaggaggatgaagcggatcgctagagtggcaagagagacgatgaaaatggggtcatcggtgggttgaggctccatggcaatgaggcatggggtttgaggaggcgcttcttcgtgagcggtaggagggtagggggtgagtgggccagcccagagttccacgctctagtcgtatctatcctggacgtcctcctggcgtcttggtgcctctctgtcgacccaggagccatgntcgaccccgtcgtttctgttgctccctcgagccgttctacatgtccggcatcgtcgcggagacgactagccgcccacatccttagctcgtccacatcttggcgcaatctgttgtctcacctctcgtgtgaacttgcgtcgctatccgtgcacgctcatctcatagcttggcctccgctaacttagcatcacgtgctgcgtcgtctgtatgcgtctccctattctcctcgtcctccatactcatagtcgtcgattctgtcgctcgcgggtatgccttcatctcccaccttacatgctctggtcatcacactcctagacacttctatgagtcctggccccatttcacccttaatcccttgccagtgaatcacgcgtggggaatcgtgctcttcaatgaatccccacatctttcatcaagcatggagaagtccaaggggaacgggggcgatgggtgaccggagcggttttggagagggcctgtaggagccccaacaaagagttgggacacaaccaattacaccagatccccaattattatcggacataacgtctacacctaagaagggaaaagtgggtccgaaggaaagcactgggtactccagaaagagacgagaacgcacatacacacagcggggcgcgcacgcccccaatagaagtgataaccccagggacggggggggacacaagagtatagggcggataccacagg

SEQ ID NO: 630862 - DNA, 160 bp, Homo sapiens
tcgctggatagtaggtagggacatgtgggaatctgcagagagcgcagtcagtgagccagtgatgaaccctcctttctcatctacacaccagcagtgcccagtcccagctgtgtcactgcacagtgctcccaaccttccaaactgcatcacactgtgggca

SEQ ID NO: 630863 - DNA, 1568 bp, Homo sapiens
  misc_feature (284)..(284): n is a, c, g, or t
  misc_feature (872)..(872): n is a, c, g, or t
gcgggacgaggcatcagatcgggctgataggagcgtgggtgtctcctctctccgaccatggtcgatggtagctcgcccactgatatacgagggatactccgagagacggtggggaggtcactctgagccacacagagagtgtcgctattggcctgctagtaattcaaggcctcctaatatcgactcagactattagtggtaaccttagtacacacgggaatcgttgctcgcaatagaactaacgaggatcacgcgcctattgctttgtcgaggtggatagttanagcgaaggtcaattgcacgacttgaggtggcgatgagtcttgtgtgccggtacgtgggtccagtagcgctgtggagctcgtagaattcccaagacgtatcggagtgtgtgggatgagggactgtcacctgctatcttggaccagagggattgcgatctcttcgggaagacacgtgatagtcagatgggagagcgcgaaagaggtattggcatgcaaagcaaaagataccgtgggcggcctgaattgagcggctccagttagaatgtgggagactaggcaacaccaaagcacagcgaatgaacgtccccctgcgttgttcgttgcaccgagtgtttagcgctcgaggcgccctaaccgatgcgactttgtgtccagtagtcctaaccaagtgttctaatacgttatatggagggcaacgatatcccttgaacaactttaccatatatggctcacgtcgtggaacatgaattcacacaccggtcgtggaagaggcggcttaaccacaccgacagcggaccccacaaggggaaacagggctgtgcttctttgtggcgtacacctttgaagggaaacacctttgaagacagncccttgggacactcgaagttatcccaagacggagggggtacataaatatgccccattcgttcaacgccgcaaacttgacgcatggcttgtggacaaacatggggcaacaaacattggaggaaaaaccccggtcggcccgcttatttccaagacggcaagaggagggaccccggatgtccttccaattcctatattaattggacgcgcattaacgtgtgtattcattcaaagagggcctttccggaaaaccaattccccgtggccaattaacattcattgggctgtacaccggtgtatagggacacacacgctggcacacaattttatggacagggcctggcgtcccctgtggttggagagctgtgtgtgagacggcttacactgggccttgtgggacctgagacaacggggtaaaccccggagacaggtcaggagtgacattgcgctcagggacagcatgtgggggtaaagaccggagtgccgcagaggagcgaccacacgacgactacccgaggcaagacgagacactaagaagtaacgcacacacgcttgcaaacgccgcagaacacaaagacgacgtgcagacccgaccaaggaaaaccacgcaggcgcctaacgacaccacagacagagaagagcgaggaaaccaccataacaaccgacaaacgtagcggagacagcgcgaaaagagaggta

SEQ ID NO: 630864 - DNA, 807 bp, Homo sapiens
ggagagagagagaactagtctcgagttatatttttattgattaaacctcccccaccctttgtcctgaaacgcttggtatcccaccttggtatggggtcatcggggtcgaggaggtagtcattcattcctatgggtcgtgtgcgtggagtctgtgtgttcgtcgggtttgtttggcggtcccagagctgaagtgcctactcttgtcggcgtcagacgcctccagagccgtagatttgccaatcgcctcccactactgacgaattagtcaccacaggcgagtccgcaatgtgaaactcatctacctttgcaactttccagatgttccagtggtgtggaaaatgtctcttcctggtaaaatagtgggaatgctatctcatttacaccttgacccagagcctaccctattgaaggacttcctaattatctcagggctaattaggaacgcatgaacctcattgaacttggccaagctagagtatcaaggggcttgatggaatcagctctgaacctggggaggacctcttgacctctgactatgcccctctccagacaacttctttgtggtgatggagcactgtcttgaaccatggcttgacagctaaagaaaacttttctcggacaaaataaatccttcggggggcctctagaactggtagaaaacgcttgtcccaaaagccgcagagataacagcaagtgtaaagatctcccaggacttaagaccccagtaggtagaggaagagcctgccttccgtgggcataagtggcaaagaactcccagaatatatgaacgtctgatcactaagaaac

SEQ ID NO: 630865 - DNA, 613 bp, Homo sapiens
tctagcctcgccatgtggtgggactacaggcacgtgcaccatgcccatgctaattttttgtatttttagtagaaacaggtttcatcatgttagcctggaggtctcaatcttctgaccttgtgatctacctgcctcggcctcccaaactgctgggatttcaggcatgagccaccgcgcctggccgtatagtttttttttgagacagagtctgactttatcacccaggctggagtgcagtgatgtgatcatgacttactgcagcctcaacttcctgggatcaatgatcctcccacctcagcttcccaagtagctgggaccacaggcatgtgccaccatgccctgctaatttttgtattttttggtagagacagggtctcgccacgttgcccaggctggttgggaattcctgggctcaagcgatccacttgctttgacctcccaaagtgctgggagtacagatgtgagccaccgcacccagcatgtatttcaaatgttttataatgaacacatattacttttacaatcaggataagacaaaactaaaaaaaccttgtttatgtataaaaggcatagctgagaacgtgaacatgatgcaggatactcactccgacct

SEQ ID NO: 630866 - DNA, 377 bp, Homo sapiens
agacttcgggctccagtaatcctccccactcagccttctgagtagctgggaccacagcgcaccaccacggctggctaacttttgtatttttgggtagagacagggtttcaccatgctgcccaagctggttttgaactcctgtgctcaagtgatccacccaccttggcctcctaaagtgctggaattacaggcatgagccactaagaccggccaagaacaaaaacttttttttttggttggttggtaggatttttggagacagagtctccctctgtcacccaggtgggagtgcagtgcacagtctcggctcgctgcaagctccacctctcgggttcatgccattctcctgcctcagcctcccaagtagcggggacggt

SEQ ID NO: 630867 - DNA, 111 bp, Homo sapiens
accatacttatcaggacggcagctgatcagaccgctatctcttcccaccagcagagaaactgactttaaataatttaagtgaaaatatgatttatcaccccaacgctatct

SEQ ID NO: 630868 - DNA, 1675 bp, Homo sapiens
tgtgcggtcttcctgtcgtcgtttatggtcttagtctcggagggtgcggcgtgctgtgttgcggtgagtagctgtcgtgtgcacgtgttgctccgttgcgtcgtctcgtcgcagtgtggttgttggttgctcgttgtggtatttgtgctcgcgttctcttagtagttggtgcctgcttggtggtcgtgctcttgttgcgggtgcgtgctcgccgctgttgctcgcgtgtcgttgttttcgcttgcgtggtctccgcgcttcgtcgctatggtgctggtgtgcccttgttgcctgtgttgtctcgtcctccgctttcgtgagttgatgccgtggtgcttgcgttgtacgggggtggtgctgcatgcggtggttgtggaggtggtggcttgatcaggtgtgggctgctgttcttgtgtgcccatgtgtgttgtgtggtggtgttggatgggggtggtggctgccccgtggggtgccgttgttgagtgtgcgcgggggtgcgggggctcgtcgatgcttttgttgcgaggtggtgttgtctctgtggtggcgctgcgcgtgtggtgctccgtgccggtcgcgtgggtgtgcgttgggtgtcgcttggtgtggttgtctgttcttggatgcattgtcttcctcgggatcattggttgaccgtgtatgaacttgggctggttgtggtcgctccattgtttcctcgcccgttgtccaggggtccattgcacggtttgtttggtgtgttccccttttgttgtgtgcgtatggctgctttcttcggatcgtctccccctgcttttgattgctggcgatcgccatctgtgggtcgggatagtctgtgggcctcctactggtttccatctggggtcttggtgtgggtgcgtgcctgtgtctatcgatcgcgctagtgtcacggtcttgttgtctgcctacctactgtgtatgtctctgccgttgcggtgagtgatgccctgctttcttggggctgctgtgttgggtttcgggttggtggcccacgaccttgcccagttgatcgcctttgggcgctttgtctcgttggtgccgttcgtttcccccgttgtggtggttgtgtggtgtcgcttggtctcgcacggtggatcggggatccgggggggtgcagcccgagcaggccgtcgcctgccagttgctgcgcacgtcctgtgagcacgtttcaggcgtagcatgtcttgacgctcgtgcgatcaggggttggtttctggtctgcactgaggagtacgatacacacagaagcgagtaaaataagaacgcgtattgttcacttgtggtacggcgtgagagctgaacttatccaaccaggcgaatgtgggaccttgggcctatgccatttctcgttgctagttctgggcgcagtgtcaggggacctgtgtggggtgtgaacccaaggcactactgcccacctgccacagtaaacgcatctgcacttgactcaatgctgcccgagccctcccttccccctatccaacctgggtaggtggatatggggccacagttgcccggatgctcttatatacgagagtaggttgatgtgatctttacatgcttcttgagtctaatgcttggacaacttaatcacctagcagtttctaaaccaataaatcaaactgctggggaacgagcatacgtgcgtggtccgcca

SEQ ID NO: 630869 - DNA, 206 bp, Homo sapiens
gagatcacaggtcgggaatctgcacagagcaggatagctgagtgagtcggggagctttgtgctgggccggcatcttccttgaaggcgggactgttcatctacttcaggaatcagaaaggacactctggacttcagccaaccaggattcctgacgctgaacagtgcagattaccacccttcgacctgggggctcctcgtagacgtcg

SEQ ID NO: 630870 - DNA, 287 bp, Homo sapiens
agaccaattccagatggataaaagatttaaacgaaaacagaaaagaactaaaatatgtgggtaaatatttcctttatcttggggtagggaaaacctctctaaatatatcatgaaaagaagaaactattaaaaaattgacgattttggctacacaaaaattaagatctatacagcaaaagaaatcataaataaggttaaaagacatatggtaaccctaagaaaaatatgttttgtaatatttctcacaagcaaagagaaaatatccttattatacaaagagttctcat

SEQ ID NO: 630871 - DNA, 290 bp, Homo sapiens
tattgatgccgaacttagtgcggacacccgatcggcatagcgcactacagcccagaactcctggactcaagcgatcctccagagacaaaggttgcagtgagccaagattgtgccactgcactccatccagcctgggtgacagagtgagactcttgctcaaaatataataggctgggcacagtggctcacacctgtaatcccagcactttgggaggccgaggtggatggatcacttgaggtcaggagttcgagagcagcctggccaatatggtgaacctggtcttctactt

SEQ ID NO: 630872 - DNA, 149 bp, Homo sapiens
acaaagaggaatatgggagctacaactcaagatgagatttggttggagacacagccaaaccatatcctacttattttcctatcctagcattattgagtccgggggataacttgcttcatggagtggtctccccaggactcaataatgca

SEQ ID NO: 630873 - DNA, 327 bp, Homo sapiens
agggtggtgctggtgttgcgggaacgctggcatttttgccgggacggccgggtgctgctgggctcgagggccctgagggagcggcccctaggcctgatgggcttccagctcctgccgcttccctttgagggaatggaggtcccagagagggcctgcccccgctcaagagcttccttaggcaaaagctcccggccctgggcctgcgctgggggcctgaagggggcttaggggattatgtggggttccggatggcccccccctggggggggggtgatttgccctttggttccctgggttttggtttttccttaaagttcctttccttca

SEQ ID NO: 630874 - DNA, 133 bp, Homo sapiens
ccttgttgtgtgaattagctctgaacctctctactaccagtaatgcatttgtcccacatttcattctgatagaaccatgaacaccatagcaccaaacaaaaatccgaggcgttagatgatgtctcggattaaa

SEQ ID NO: 630875 - DNA, 105 bp, Homo sapiens
gcagctttcttccagcagagaaagacaagcaatcgccaaatgaacaagcaaaatatatagtacatacagctaggtgctacagaaacttaaagcagtgaaggggcg

SEQ ID NO: 630876 - DNA, 411 bp, Homo sapiens
  misc_feature (71)..(71): n is a, c, g, or t
  misc_feature (369)..(369): n is a, c, g, or t
  misc_feature (399)..(399): n is a, c, g, or t
tccttttcatttgcttggtaaatattcctccatccctttattttgagcctgtgtgtgtctttgcatgtganatgggtctcctgaatacagtacaccaatgggtcttgagtctttttccaacttgccagtctgtgtctttttactggggcatttagcccagttacatttaaggttaatattgttacatgtgaaatttatcctgtcatgatgttgttaggtgtttatttttcccattagttaaggcagtttctttatagtgtcgatggtcattacaatttggtatgtttttgcagtggctcatactgtttgtccctttccatgtttagtgcttccttcaggagctcttgtaaggtaagaatgtggatttanttcttgtaaggcaaatatgtggatttacanctgggtgctgta

SEQ ID NO: 630877 - DNA, 191 bp, Homo sapiens
cagcgagtgtggcacatatcacgcacgatcactgccaaatctaagggcacgcactatatcagaatctgggccgtctgcaggtcacgtgatgggcagggtgtggaggaatttattgtaatgatcgttaaacatcaagcgatccttattttttttgatcttgacagatttgacaccccttctgtcgtcttctc

SEQ ID NO: 630878 - DNA, 218 bp, Homo sapiens
aaatccggggcggttccgaattggtcgaatttggtgtgtgttaatacgcgtcaggtaattggtgaagggtgtataatccaataggaatattgtttcaggtttgtatggggaaaatgttgctaacatttcttgtcccagtctgcaaagaagcacaattctattgctttgtcttgcttatagtcattaaatcattacttttacataaaaaaaagtcgacg

SEQ ID NO: 630879 - DNA, 624 bp, Homo sapiens
  misc_feature (69)..(69): n is a, c, g, or t
  misc_feature (434)..(434): n is a, c, g, or t
acacacataatacttagtacatttccttatatgtaaataattagtaatgtaacacatcgtgtgaatganattgtgattagcaaagtatgacagctaaaaacaaaggaaattttgtatagtttaagtttttgtacagcagaaggtaatggaaaatatttgcaacatatgacagtgtttttaatgtcttaagtatatgaagaatttgtttcaattggtaagaaaagaccaactgaaaaataggcaaaacataccaaatttcgattcacaaaaagatacaaatggccaacaaaacatgaaacaccttgaaccccattggttacaaaaaatacaaataaaaacaatgctgactgacaataaaaataatgcacatcttgctattagcagagttgtggggaaatcctgtcatattttggtgaatagatatatgagttggntatatcatcttttaggggcgccattgtggcaaatatcaaaacacccttgaaactgtaaggtataacacttctagttgtgttcgatatacaccgtgtcacttcacaatattgagtcgccatacatatgtcctataatacttggaatacacacttaatcaaatgctctataagaagtactaaaataaaaaat

SEQ ID NO: 630880 - DNA, 160 bp, Homo sapiens
cttacactccaatctagcccctaccccaacttaggaaggcactggcccgctacaggcattagcccgttaaatcccctagaagtcccactccgtaagacacatcgtattactcgcatcaggagtataatcacctgagctcaccatagtctatatgcaatca

SEQ ID NO: 630881 - DNA, 888 bp, Homo sapiens
agcgtgtgtgtgtgtgtatgtgtgtgtgtgtgtgtgtgtgtgtacttaaaggtctggtcccatagcttcatcagatgcttagagatccaagacctggcatattacagtcatggcccaaactgaagatccacatatacttcatccacttaataccaaatttattgcgacccttcactcagtcttacgtacttgtacatagaactcagtctacttatttgttctattaagtgttctaacctgtcatcactattaaatagtggaatttgaatttcttggttttttaaacaaatgtgtagggggcagattctcttttcttgggtttttcttacaacttagtaaggccttggcataatgaatcgcacatttatagatgtaaaaattacttaactatgaaagcatgcagtggggtcgagttctccagcacatagcggacttggaaatttaagccaaaaaggcagttgggtaattggctactccagttacatgttttaactccttgaggttgtatggtttatccacatggcgtggttggcaacattctgcaaattatgtttagtttatgatagtatccaaacacataaaagtagtgtaaatgttaacatttttggctcagttagtgtgactttggcaggaatactgcgaaaattaggaccgcccgttccgtcagcatctgaaataaaatgttcaattctaatggaacttaagatgtcgttccacgctggagacatattttttgtaacatgactacccaggtaatccttcacttggactagaagctttgctccccctcttttggcggacaattctccggacaaccactaaagtctccccggcacccaacgtaaaacgggaaccccacatggacacaacgcccgtcaaacccgaaat

SEQ ID NO: 630882 - DNA, 234 bp, Homo sapiens
gtcactcatttacaccaatacacccaactatctattaacctagaacatgagcatggccttatgagcgggcgcagtgaatatgggcttgcgctctaagattaaaaatgccctagcccacttcttaccacaaggcagacctacaccccttatccccatactagtaattatcgcgaccatcagactactcattcaaccacttggcctgggcggacgcctaaccggtaacattactgc

SEQ ID NO: 630883 - DNA, 141 bp, Homo sapiens
gaatgtgcattataggaatagtaaaacatcaagcaagaacagcgtcattcacaagtcacaagcagtttatagtttagacatattctatctagaatcctgtgtgtcaggcacatcttaccaatgggagatccgtctagagat

SEQ ID NO: 630884 - DNA, 204 bp, Homo sapiens
gggagagagagagagagagagagagagagagagagagagagagagagagacagccacccagtaggctctcatgacttgtggtagggggcgcagtcagagaggtccccctagagggaggcaggagagtctgcaggggagagagaaaaagagagtctggagacgcaacacaagacgtctcctccagcacagcgggagatggcctgt

SEQ ID NO: 630885 - DNA, 779 bp, Homo sapiens
tgatgcggcctgggtcagactcaagtcagatacaaccctgattttgaccttgcccttggcaggccccacatcctcttattcctacatccctttctcccttccctcctctgctcctcaagtaagaggtgcagagatgaggtccttctggactaacaagccaaaaaagagaaagaaaaaaataatttattcttttctgttgtattgtgcgtaagttaagaaatggggagggggaaagtcgtccctacttcctcctccctgcttcctctcctcccctgtacgtgccccagcattctggggttatttaacaatagcaatagttctagtgaatgtgtgaaaccaagaaacactctgtactgtgtgcggacccgcagctgacggccagtaaagtggacttaactcccaaggtgtgtcgcgccggacaccgggccctggacatgctgcttccatgtgcagtcccttccctgcttctcgctgtctgtccttgttcccacctcccagccccgcaggttgcagagttgttgtctgcagtccagtgtgggtagagcgatcggtgtacggggttcctgcgctccttgtctcttctcccaaatcttttcccttcaaggaaacaaatatgttcagaggtcctgtcttctgtccccatctttctggcgatagtatccgctgtatgatgtggatgccctcactgctgagttccagcctttttggacctccgtgcggggagaggcagaagggacgggctccagatgctccacttttccacgccttgggggctcaga

SEQ ID NO: 630886 - DNA, 800 bp, Homo sapiens
  misc_feature (415)..(415): n is a, c, g, or t
ttgccaagtagaccctcactgaggggcctgagcagccccagcaacttgtccaagccaaactggcagccccccggtgggcctcatcaagggagaagacaagatactatggccctgttgctgagtgagtggagcggggtggggctctgggaggatggcaggagggattagagcaagccgtgaagatttactgtactttctctcacagacaagtaaagaaatcaacgttgaaccctaatgctaaggagttcaatcctacaaagcctctgctgtctgtggtgagctgggacaggagaatgtggactttggtttctgtggggagacttgggcagtgcttatagatgaatagggggaggaacacttcacttccaggaccacttgcctggcaggcagtgtgaggagatgtcataaaaatgtnaggatggcacctttggggctggcttggggaaaatggactcaggtctctaggtttgggtgatcaggggatcagggatcccagtgagtctgatgaggggttaacaggcttttctttggttcttggcatttggctgagggagtattggagtggggtagtcatgaacagaggccagctgacttggcttgagcccctgtatttggaaggtttgtgatcttgggacggcacttacattctctgcctcacctggaactttaaaatactcatctcctcataagggttaatgtgaggctttatcaagaaaaagtgcagaaaatgtttgggatgcagcatttcacgaatggtaattattaccactctagcctgggcaggagtagagggaaaaatc

SEQ ID NO: 630887 - DNA, 240 bp, Homo sapiens
gagaggttaaatagcagtactattgacccagcgatgagggctctgacagtgggctttagtggagtcataatgtggatgtctgtaaagaggtatctttacgtataaaatgctatttgttgtaacgctaggtcatattcaagttgtttggctcatggagctttgatatgctccttgggcatgtgatgatgtgagtatgtacaatgtgaagggggtaggctactgtgtttgtgtcagggggcg

SEQ ID NO: 630888 - DNA, 623 bp, Homo sapiens
  misc_feature (15)..(15): n is a, c, g, or t
  misc_feature (61)..(61): n is a, c, g, or t
  misc_feature (77)..(77): n is a, c, g, or t
  misc_feature (91)..(91): n is a, c, g, or t
  misc_feature (105)..(105): n is a, c, g, or t
  misc_feature (136)..(136): n is a, c, g, or t
  misc_feature (172)..(172): n is a, c, g, or t
  misc_feature (179)..(179): n is a, c, g, or t
cggcttccaggtaanccccggtggctatcccatagggggtgtgtctggaccggggaggggncctgctccccttgggncataattagtccgngcactaccaattangtaccattcaaacctggattattttaaatangatcttccagctgtactgtaaatggagtactgcatngtagtcnccatatgtttattatttcctataatatttaaggaattgcctaaacatatacaaaatgtaccagttactaaaacagctaattatttctttcttcccctatgaaaggaaggggctttgctgttcttacatggctagaaccataataaacaatgtacttgcaattgtaacataagtattacaatgttattagtaataatcttgaagccttgttttttgaagtccattttattttaatcagtatattgcactaattattttaggtattttcattatatgaaatctaccatgtgtcagatgatttaatctatttaagtgttgatctgctagcagaacttgtacattttacagtaactcaaaactagtaaggagaacagttcaccggtgtttagttttatattgaggtgctcaggttggaataaagtgatgtaaaaagcaaaaaaaaaaa

SEQ ID NO: 630889 - DNA, 613 bp, Homo sapiens
  misc_feature (2)..(2): n is a, c, g, or t
  misc_feature (102)..(102): n is a, c, g, or t
  misc_feature (108)..(109): n is a, c, g, or t
  misc_feature (143)..(143): n is a, c, g, or t
  misc_feature (151)..(151): n is a, c, g, or t
  misc_feature (176)..(176): n is a, c, g, or t
  misc_feature (212)..(212): n is a, c, g, or t
  misc_feature (343)..(343): n is a, c, g, or t
  misc_feature (445)..(445): n is a, c, g, or t
  misc_feature (464)..(464): n is a, c, g, or t
  misc_feature (474)..(475): n is a, c, g, or t
  misc_feature (479)..(479): n is a, c, g, or t
  misc_feature (483)..(483): n is a, c, g, or t
  misc_feature (501)..(501): n is a, c, g, or t
  misc_feature (504)..(504): n is a, c, g, or t
  misc_feature (520)..(520): n is a, c, g, or t
  misc_feature (564)..(564): n is a, c, g, or t
gncatacacagacagatggagaggctagagactgggaggtgggggtgtggaagctgggccaccagttcctgagggggcaggggagatgagtgaaggagcgcnaaggtnncgcgagaagaatggagcaggcttccccagggggncgcgctgnggcttgggcacccctgcctcctggnccagcgtgctttgcttccgcgagcccgctcgctgcnaagcgcagagagagctaaggtgagcagacgagcatcttccccgagagaaccctggctgggtgggtagcgttctctggaagggtagcctggattgggggactcttcgcttgaagaaaggtggcaggtgtgcnatggcccctcggcaggtgggggctggcactgcccatgtctggttcctcagctgggggctcagtggctggcgctgcccctcgcggactgttcgctcacacagngcactctgtttggattttnaaggctcgcnnaggngacntttgcaggctggggaatnggngggccaggggagccgncagagggcccacgcatgggatgggccgtgcggcgtcctgtcccngatcgggacccccaagggcgtccctccgtccccgccgtcgccctcctcc

SEQ ID NO: 630890 - DNA, 433 bp, Homo sapiens
tgaaaagctaagtatctaatttttccaactggcttgatcatcaagtatttttatttcttagttaataaattacattggtgtttatttttaaagttatatatgcacgtggattgaagaaacaaataattcaagtctttttatttaaaagaaaaaaaagcacactaccctcactttcccctagatgaccactacctagaaagcacactcttattacctcccacccctgacctccactatttcttgctctttacatggacatacttttagctcttttaggtgattggatatttgctccagtattttgaaactacatgcttttcttgctgtttttaaatttttctgaactaggttgacccaaaaggttaaaataacagccactatagatttaagtcaaagttaattttattctgagccaagtttgaggactatagat

SEQ ID NO: 630891 - DNA, 203 bp, Homo sapiens
cattatgtgggccgggctgcgctccctccggggcccagggaggcccttgactaggcctagcttctgaataggtcctgcatgtcacttgacttgtggcactgcaatcttcacatcccatgtctccatctctccttctgccctcctcttcttagcctgcatgggattgcagtataagagcccccttgggtaaatccagtgataca

SEQ ID NO: 630892 - DNA, 1248 bp, Homo sapiens
  misc_feature (1248)..(1248): n is a, c, g, or t
ggacgcgtgggcggccgggagcgagacgcccgggagctcgtggaacagatgcggcgcccgcggcggcctgggggtctcggggtggatccgggggtcttccggctgcgtcctctggcctccctgcgtgcgtgagcatggccgcaccgtgcggtgtgctagctatgctgcaccgttcaatgttgcctcatccggtccttgtcatacttattgagcctggcgtggtgctcgtgctgctcaccttggcaaggtcttgtattcacggatggcttggtttgggcatgttgccagtgtgggaccgtggcgggaaggcccaggacgccattctagcaacgtccaccatcgctctcagttcatcgctagagcggcgtgtagcacacggttgttggctacctgaaacacaacgtcgagtgcttccccagagggattagttcccttgtgccaactgcaatggacccatctatcctcacgcataattgttgcattgctacttcgagggacttgactggaggacggcaatcctccataggacttctgcccgcacgccaaagatggcacccgttgcacatagaggagaccaggtgtactgggctttggtgcacacgcaaaagacgacccttggatacctagacttggtaggacgactgctatttaccattgtgaacagtacccacaatagagggcagccaggaccgctcgttggctatagcgccaaaggcaagttcctgggcggaattcccaccaaacactaccaccaggatgagtggcaaatatggagcttaggaagccttagtgtgcgcagcaggcttgccttcatactggccaacacccgtcatgggaaagaggctatggaagcgtggcgctcgcctggtaccttacctactgtgtgagaaggccagcgcaatgccttgacatagggccccgcaacaagtcgctaaccacccaaaaccctgtcaagagtgggattgaaacctggaaagcataggatcggtaaggctagggaggggccataaccctgggttgccacgcaaacgaacaggacttccccgcttgaatgggagcccaggaagagccccaagaaatggaggaacaccaccaggagacgtaggacaagagagtataggcacgccgcagtacaggagttggagcgccctaggcaccactaagaaagagaaaacgtggcaccacgggggctcacaatcggcgagaccaccatagacagcacgaacacagagacaggacgagagtacn

SEQ ID NO: 630893 - DNA, 274 bp, Homo sapiens
tccgagctctgtacctacaattagaagagacgagatcacgtccatgtgcagcacgagggtggctcggagcccctcaccctgagattgggttgaaaaggagggagctgctctcagtgctagtgttcagcaaacagtgcccagggctctgatgagtctctcatcgcttgtaaagcctgagacagctgcctgtgttgtgactgagattgcaggatttcttcacacctctcctttgtgacttcaagaggctctgggcatctctttctaccaagtggat

SEQ ID NO: 630894 - DNA, 387 bp, Homo sapiens
ttaatgacagagacgggttctgggaaacttcacatcattaggcgaccttgtcattgtgctggccgagtgcacgcacacacttctggaaggcacagcctgccacacgcctgcactgacgggagagcccaatgcttataggctacaaacctggacagcacagtactgtcccagacactctaagccactgtaacacaatggcaagtagatgtctcaacacacagaagggaagtaaaaacacagtctgatcatcttagcggaccaccagtatgtatggtccgtcgtgaacagaaacatcgtgaggcagcccgacagcaggaccactgctgcaccggcggcctagagacatctgctgagcaaaggagcaattcctgccggatccctgagagt

SEQ ID NO: 630895 - DNA, 731 bp, Homo sapiens
ctctgtagtacaccagagacgtgagatgaaccatccaccaagaacctgaaggacctaggttaggagatgcgctcctgtacttggtgggcacctaattgtgtgccatcagtgcagtcgccttagccacccccatgggaagatcgctagtggtgcctcaacacaccacgaacaccgagggtgataaaaagcactgggatgtgtgcagatctcatgaacaatataggtgacctatacacatacacatgctattgctacaccttggcgcataatttaacacgagcttgatccgctattgagagtgagtgccttgagacagattgtggacaactctctgccaccacagattgtgtgacagcgagacccgacacaggggcttcggcggagatcactgtgatactgcgctatgcgcagagctgtgacaccagccctacatccctatgagactgcggataaacaccgtccgctaccacttgctctgtatcactcttgagatagatctcgagcgcatgagtgatgcgtactaagaatcttccagcagactgctgtgatactagttctgttagagcgggctatttgaggactgttcgcacctgaactccatgtgcacgcaagtactactgactctgttgaatatccccatgtgactgggaggctacttcttcttacaggaactggactctagagcggcccgggcccataacaccataacagtttatacgtctggcctgctt

SEQ ID NO: 630896 - DNA, 241 bp, Homo sapiens
ctggactacccacttgagtgaatatagatagaagaatataaatatatatacatatatacataatatacataaatattcataaatatatatacacataatatataaatatatatatacataaatatgtatattaatatattaaatatgtacacaaaatctatacataaatattaatatatatacataaatatgaatatatatacacacattaatgaaaggtattaccctgggtagtcacaga

SEQ ID NO: 630897 - DNA, 233 bp, Homo sapiens
  misc_feature (73)..(73): n is a, c, g, or t
  misc_feature (86)..(86): n is a, c, g, or t
  misc_feature (89)..(89): n is a, c, g, or t
ctagtttagggaggcagaggcgcagtgtatgagatcgtgccattgcactccagcctgaacaacaagagggaanatcatctcaaaanaanaaaaaaaaagtatttgcaggatctgcgtctgaaactaggaccgttcacgcttcagaggcagaaagaaacctgtgcagaaaaccggtgtgcgagtctcccacacggactgggggcgccttccgtggggggggggtctccctaaga

SEQ ID NO: 630898 - DNA, 1062 bp, Homo sapiens
ggcccatcctccggaagatacgagaccttcctgaaccattacctctgtgagagagttcatggactcgctccctagaactcccggctgcacgagatgatgacaatccttgtcccttgggacaaaggactcatggggcctctgagtgaccctatcacaggcgaagtccctatgtgtcccctgcttggaagcaggaggcaggtacgtctcagccaggaggtctgctagcaactgtggcaggccggcgagggccggtctggcagtgaggccacacaccagataactgtggaacccacaatcgaggacacgcataccgtcaacgcacattgaagccacgcaagccaggatggtggtccatcgtcgtggggaccacgggctgtgtggacagaccgacgcgcaatcgccccaggctgattgcatggagcgccttatgtgacccgagggtgaccgatgagttgaacgcgacatgcaattgtataatgagtcgagcctcaagcctcgagctcgggattctcgtggcgtgatggtcttgataggcaagcatacagggtggtatagcccagaccgaaaactgggagcccccatcggccttgcagcccgtgagatgttggggcttgcccaggctgacaggattgcgcaacaaggtaaaggacagccccagtcccacagaaaggacgcggggacaccttgattcctttactggcaacttggagaggggtactcacatgcctagagcgtacagctttcacaggaagcggaaaccccaagggcttggagaagtggcggttgacgcacaaccgatccactcagtggggactgaagtgtagccattgaagccggtgggaacggtaggaaccaaccaaggaagttattgctcggacctcgaaattccacttgcgtttcaaagggcgatccctattaccacacgagggtgtcaacaatcccggaggcggccatgaccgggcgtgggtggtggcataaattgtcaagtggactgaaaagtgacgtacataatggaagacgcaccatataaccagaataaagtatagagtaggaatagaccat

SEQ ID NO: 630899 - DNA, 1003 bp, Homo sapiens
  misc_feature (721)..(721): n is a, c, g, or t
gtctccgcgccttatctgccaaagctgcgtgctctgtgactgcccagcctgcggctgtatcccggatcacttcctgggtagtgctccacgggcacgagcctctgattgggctacctgtagattggggtacttccggtgtgcaggtgctgggtccttcggcaggaggaggaagatggagcccagcaccgcggcccgggcttgggccctcttttggttgctgctgcccttgcttggcgcggtttgcgccagcggaccccgcaccttagtgctgctggacaacctcaacgtgcgggagactcattcgcttttcttccggagcctgaaggaccggggctttgagctcacattcaagaccgctgatgaccccagcctgtctctcataaagtatggggaattcctctatgacaatctcatcattttctccccttcggtagaagattttggaggcaacatcaacgtggagaccatcagtgcctttattgacggtggaggcagtgtgctggtagctgccagctccgacattggtgaccctcttcgagagctgggcagtgagtgcgggattgagtttgacgaggagaaaacggctgtcattgaccatcacaactatgacatctcagaccttggccagcatacgctcatcgtggctgacactgagaacctgctgaaggccccaaccatcgttgggaaatcatctctaaatcccatcctctttcgaggtgtngggatggtggccgatcctgataacccttttggtgctggacatcctgagcgggctcttccacctcttactcctttcttcccggacaagcctatcacccagtatccacatgcggctgtggaagtaacacccctcctcattgctgggctcaggccatggaaccaatgcccgagtcaccttcagcggctccctctgagtacttccagcgaactccttcttcaactcagcagtgcagaaggcggcgccgtgtccagaggtattccagaacaggctactatgaactag

SEQ ID NO: 630900 - DNA, 308 bp, Homo sapiens
ccggttttttttttccggggcccccaccgttttttggccccggttggtattgcttgcccttaattttattttggggggggggcccccccttaattttttttcccttgggggtttctttttttgggaacttgccaaattttccttttttttccgccttgggggggggggttaaataaaatttgggtccttggggttttttttccccatttaggggttaaccctttttttcccatttggggggtgggctgtttaaattttgactccctgttttaaacccccggggataaaagaacttttcccccctttta

SEQ ID NO: 630901 - DNA, 916 bp, Homo sapiens
  misc_feature (634)..(634): n is a, c, g, or t
gtctccgcgccttatctgccaaagctgcgtgctctgtgactgcccagcctgcggctgtatcccggatcacttcctgggtagtgctccacgggcacgagcctctgattgggctacctgtagattggggtacttccggtgtgcaggtgctgggtccttcggcaggaggaggaagatggagcccagcaccgcggcccgggcttgggccctcttttggttgctgctgcccttgcttggcgcggtttgcgccagcggaccccgcaccttagtgctgctggacaacctcaacgtgcgggagactcattcgcttttcttccggagcctgaaggaccggggctttgagctcacattcaagaccgctgatgaccccagcctgtctctcataaagtatggggaattcctctatgacaatctcatcattttctccccttcggtagaaggtgaccctcttcgagagctgggcagtgagtgcgggattgagtttgacgaggagaaaacggctgtcattgaccatcacaactatgacatctcagaccttggccagcatacgctcatcgtggctgacactgagaacctgctgaaggccccaaccatcgttgggaaatcatctctaaatcccatcctctttcgaggtgtngggatggtggccgatcctgataacccttttggtgctggacatcctgagcgggctcttccacctcttactcctttcttcccggacaagcctatcacccagtatccacatgcggctgtggaagtaacacccctcctcattgctgggctcaggccatggaaccaatgcccgagtcaccttcagcggctccctctgagtacttccagcgaactccttcttcaactcagcagtgcagaaggcggcgccgtgtccagaggtattccagaacaggctactatgaactag

SEQ ID NO: 630902 - DNA, 1027 bp, Homo sapiens
tttttttttcctgtttctcttgttggctgtcttgtaataggttgcgtgtttgtcactgtttgttattttattttgtctcgtttgatattccttctttttgtgtgttgtttgtcgttatctctgtctcggtatttttagtgtccttatctgtctttcttgtcctacttttctttctccttctctctcttgtttgtttgttttttctttctttgtgttcctattttttctcctgtcctttttttctgcattcagtcttttgttatggtgcatcttttgtctcgtgcgtttcttttgttcttgtttcttcttctttttcttctgttctttgattatttttgtcatattgccggttttctattcttgtgttctcgttcgatcctcttcttgctgtggttccatgctttcttctattgttcctttccgattttctcttctccttggttgtccttctgtgttcttctttctctcctgccgagtggctctctctcttatgtgcttttttttttttatttcttgtttccttgttgcaattctttttatttttcatttttgtatttatttgttttttttctgttttatctttgtcttttctttctgctgtcactttttctatggtgtcgtgtctttgtattttttgtccctattgtctcatatcttgtttatcatcatatgtctatcgtcttgtaatacatttgatttgtatatttctttctctcacggtttaatcagtaagatgcttatgtgttttcgatgtgcagggtatgttgactatatctctctggattcacctgaaaatattgtgaataacacgtgactcacactcaggcatcttctgggtcacgtcctatgctgcgctggggccgagtggctgccacatgcccccctcatttgcatggctcatcccccactcaagcaatagggccccgcccataggaagacccccagagagagggtcagcaggggggccccagcatgcgccttcccctccaatagcccatggtggggcaggctgttactaccagctccc

SEQ ID NO: 630903 - DNA, 197 bp, Homo sapiens
tcaagcttctaacgatgtacggggacatgcctggctcgtttttaaattttttgtggacatcgggtctcactgtgtttcccaggctggtctcaaactcctgtgcttaagtgatccttttgccttggcctcccaaaagtgttgggattacagggtatgagccactactcctgacctcagattctttttaaaagaaaaaa

SEQ ID NO: 630904 - DNA, 332 bp, Homo sapiens
cgtcttatggcggcaggcacctgtaatcccagctaccaggaggctgagtcaggagaattgcttgaccccagagggcggaggttgcagtgggccaagattacaccactgcactccagcctgggcaatgaagcgagaccctgtctctaaaatcactgaattaaaaatttttaaagccatgcgcgatggctcacgcctgtaatcccagcacttggggaggtcaaggcgggcagatcacctgaggtcaggagttcgagaccagcctggccaagagatgatgaaaccccgtctctactaaaaatagaaaaaattagctggccatggagtaaatggca

SEQ ID NO: 630905 - DNA, 837 bp, Homo sapiens
  misc_feature (1)..(1): n is a, c, g, or t
  misc_feature (304)..(304): n is a, c, g, or t
  misc_feature (308)..(308): n is a, c, g, or t
  misc_feature (312)..(312): n is a, c, g, or t
  misc_feature (328)..(328): n is a, c, g, or t
  misc_feature (338)..(338): n is a, c, g, or t
  misc_feature (351)..(351): n is a, c, g, or t
  misc_feature (363)..(363): n is a, c, g, or t
  misc_feature (365)..(367): n is a, c, g, or t
  misc_feature (377)..(377): n is a, c, g, or t
  misc_feature (392)..(393): n is a, c, g, or t
  misc_feature (400)..(402): n is a, c, g, or t
  misc_feature (404)..(404): n is a, c, g, or t
  misc_feature (413)..(413): n is a, c, g, or t
  misc_feature (416)..(416): n is a, c, g, or t
  misc_feature (418)..(418): n is a, c, g, or t
  misc_feature (425)..(429): n is a, c, g, or t
  misc_feature (433)..(433): n is a, c, g, or t
  misc_feature (440)..(440): n is a, c, g, or t
  misc_feature (452)..(452): n is a, c, g, or t
  misc_feature (454)..(454): n is a, c, g, or t
  misc_feature (456)..(456): n is a, c, g, or t
  misc_feature (458)..(458): n is a, c, g, or t
  misc_feature (460)..(460): n is a, c, g, or t
  misc_feature (462)..(462): n is a, c, g, or t
  misc_feature (469)..(470): n is a, c, g, or t
  misc_feature (473)..(473): n is a, c, g, or t
  misc_feature (475)..(475): n is a, c, g, or t
  misc_feature (481)..(481): n is a, c, g, or t
  misc_feature (488)..(488): n is a, c, g, or t
  misc_feature (710)..(710): n is a, c, g, or t
  misc_feature (716)..(716): n is a, c, g, or t
  misc_feature (732)..(732): n is a, c, g, or t
  misc_feature (749)..(749): n is a, c, g, or t
  misc_feature (752)..(752): n is a, c, g, or t
  misc_feature (760)..(760): n is a, c, g, or t
  misc_feature (765)..(765): n is a, c, g, or t
  misc_feature (770)..(770): n is a, c, g, or t
  misc_feature (773)..(773): n is a, c, g, or t
  misc_feature (820)..(820): n is a, c, g, or t
nataaacaaacattcactttatgcctgatgacagcaacactgtgatggggtggcactgtgccccacggacaggtccacaactgaacacatggctctatctctccttttgggcttaaagtttagtgttattttattttacaaatatttacagtcattttgtaaaaaggcagtttttagtagcagaaaattcttctgttttatagtatggtatcacagttactagcgtatctccaatgtcaaaccaagataaacagcatcacaagatgtcacagactaatacaacttccctttggccaggggaaangatntgtntctttttttttttttnttcaaaagtntaacctctaaggngaccggtttctntnnncctcaatatntacaaattcactttnntgttttnnntnttatttttnttnantgtttannnnnattngtttttnttttcccttttntntngntntnttttttnngtntnattttngtttttngtaataatttaccacattataatctatttaacataactaccctcagtaaatatttcataaaatactttattctttttacatttttcttttaaccttctcatttatttttttttttttacaaaatttatctaatcttttatttcaatcttcaattatttacattaacaaccttacaaacctttaacatattatatatatccccttctctatcctttcaaattnttcttnatatatataaaatttnaccacttcacttctatnatnatttaatnataantcaancanacttatcatccacatttataactatctctccctatttaaacttaaanactcttttcatcttcca

SEQ ID NO: 630906 - DNA, 102 bp, Homo sapiens
ggatggtgccctacagttcccgtgccaaggcataggcacgtcagagttcatgtgtaggcgcaatcaggcaacatcatccattcgggcttgcatgtggggcag

SEQ ID NO: 630907 - DNA, 186 bp, Homo sapiens
ctgccccggaacgagaggatccccagcactttgggagagcgaggtcagtgtatcacttgaggtcaggagttagaaaccagcctgacctcaagtgatccgcctgccttggctgccagagtgctgggtttacaggcatgagcctccccgcccggatagtcttgtcattttcttcagcctcagatgtca

SEQ ID NO: 630908 - DNA, 258 bp, Homo sapiens
gattgtaagccgaggcgcgattcattagtccggggccgtgtggtagagggggtgcgcgtcttgctcgtccgctgcccttagtccaccgcggatccctcccgcttgtcaggtgtcggccagcgggtaagccgactggcggaaatgctgagagaggagaagggaaatgttgaatgggctaaaagtggtgcaaacatgagaggagtgcgtgatcccagcaacctgacactagggatcagtctcccactcagcaaatgcaga

SEQ ID NO: 630909 - DNA, 818 bp, Homo sapiens
  misc_feature (18)..(18): n is a, c, g, or t
  misc_feature (135)..(135): n is a, c, g, or t
  misc_feature (142)..(143): n is a, c, g, or t
  misc_feature (147)..(147): n is a, c, g, or t
  misc_feature (150)..(150): n is a, c, g, or t
  misc_feature (217)..(217): n is a, c, g, or t
  misc_feature (226)..(226): n is a, c, g, or t
  misc_feature (272)..(272): n is a, c, g, or t
  misc_feature (296)..(296): n is a, c, g, or t
  misc_feature (301)..(301): n is a, c, g, or t
  misc_feature (372)..(372): n is a, c, g, or t
  misc_feature (453)..(453): n is a, c, g, or t
  misc_feature (513)..(513): n is a, c, g, or t
  misc_feature (515)..(515): n is a, c, g, or t
  misc_feature (526)..(526): n is a, c, g, or t
  misc_feature (532)..(532): n is a, c, g, or t
  misc_feature (541)..(541): n is a, c, g, or t
  misc_feature (552)..(552): n is a, c, g, or t
  misc_feature (586)..(586): n is a, c, g, or t
  misc_feature (598)..(598): n is a, c, g, or t
  misc_feature (607)..(607): n is a, c, g, or t
  misc_feature (632)..(632): n is a, c, g, or t
  misc_feature (664)..(664): n is a, c, g, or t
  misc_feature (680)..(680): n is a, c, g, or t
  misc_feature (692)..(692): n is a, c, g, or t
  misc_feature (702)..(702): n is a, c, g, or t
  misc_feature (747)..(747): n is a, c, g, or t
  misc_feature (754)..(754): n is a, c, g, or t
  misc_feature (769)..(769): n is a, c, g, or t
gaaaagggaagagtgagngggggagatggggagatccggctcccaaggatttcaggaaacacagtggggcacctgatctagcacacattcagagggtagggaggggaagggatctagctatactctgggcatggngcagggnnggtngtncttgctatggaggaaaggagagaggaaggacagaggaagagtggtcccccatctcatctcgacaatntcaaaaganaggagtatatggggacctagctaccagggagggatggatgcaagangggattccaggatctaacagatcnttganactctggatttattcttaagaaacaacctccctcagagaatctggatctgggggaaatggtggtgtcagcnaatctcctttagagactccaaagcaacaccagtttggggttccctgacacctacacaaaatgtggaaatgaagagtttggnaatggtgagtagatccctttgggaagttggtaatgtccctgttctacttaattagactgntntgaagtagagnttgttnactagcggncattcgcaggntcaaagggtaagttgtggcatgcagcacaaagcngtattagagccnccagtaganactagagggaatatggggtttatcncatagataaaattccttaaaaagtttccctgncacaggatgcccttanaccttccatggnggtctaaagnttgacagcaagcaagagtgtgcttctctagataaatgtatgagcnatctaancaagaagtctggcancagatcagacttcctgtttgggaaagtatccagagcccaatttaggaga

SEQ ID NO: 630910 - DNA, 1226 bp, Homo sapiens
actagtactagatcggagggccgccctttttgttttatttttaaaatgaaatcctttttttgcttgggcaactaagtagcttacagaagtaaataagggattcacatttaagaaagaaaaacgagaccgacaagaagcacaaaacaaaaaacaaacagacaacacctaaccaaagaacacaaaaagaaacaacaaacaaccaaagaaatacagacagataacgcccagcgctatcccccgaaggcgcccacatccacgagcgcgcccgcaaccacaacacacacgacacacaggaaccacaaacacaacacactaccaaacacctacaacccacacccagaacacaacaaccaccagcacactccacacacgacaccacaaagacaaagaaaaaaaaccagacaccaacccacaccatagaccagccacaatcagcagcaccacacaatctggatcgagacgcgcggcgcgccgcgcacacgcgcgccgacccgcgcgacagaacgcggaccgagacgcaacgcaacaaccacgcgacgaccagggtagcacactaaaaagctaaacacaacacaccaacgaaaaccgcaggacaacacagaggacagacgagcaagctcgaatcaaaacacagcaacaccccgcaaaaagacaccaaacgagcgcagcccacccaagcagaccagacgcaccagcaacacgcaccccccgaagggaacccaaacgaaccatagcaagaaagaacgccgagcagcagcaggcatgcacgccgccgcaacaacacaagagaaaggacgacagagcggagagagagaacacgacacccacgacgcgagaagacggagcgcacacacgcagcccgacccgacaccgcaagcgcgcatgagaccacgacacaacctaacgcacacgacacgcgcaccaccgagcacgaggcatgaaccaggctaacgcaagacgaccgcgaagaacacaacggataggcagataacagagcccaacccacacgcacacacagcgcacatcacacgacaaacatagaccgcaaggacacctccacgatcgccgcgccgaaccaacccagcaccagcccgagcgcacgagagcgaacacgaacatcaagcaccacccacgagcctacacacaccgacgcgcgaaacaaacatagagagcgaccagacagcgaccagccggaagcggagcctcgcgaccacgacccgcagacc

SEQ ID NO: 630911 - DNA, 428 bp, Homo sapiens
  misc_feature (355)..(355): n is a, c, g, or t
  misc_feature (378)..(378): n is a, c, g, or t
  misc_feature (415)..(415): n is a, c, g, or t
gcaacagagttttgctcttgttgcccagggaacaactagagcataaataattccaatatgatggagaaaatgatagtattaaatgactttgcccaatgccacacagagagaattaaccccaatttcctggcttctaatccaatctctctctctctctctctccacacacacacacacacacacactcacacgcgccacataaacacacacacaatctgtctctctctctgcctctcccctgcacacacacactctctcactcgctcgctttctgtttccctctctctttcccctactctctctctctttctctctctttctctcttcagccctttctttcctccttagggatcancttggcttctgtggcacacagtnggaagggcaagcacctttttggtctttttcacaactnttccagactggag

SEQ ID NO: 630912 - DNA, 124 bp, Homo sapiens
atagagctgagcaggatccccgatcaggcgcattacttgtacccaccctctggtgggccctgacctcggggtctcacctgggctcttccttctttgggtgagctatcatgaaaaccgcgtgatc

SEQ ID NO: 630913 - DNA, 396 bp, Homo sapiens
ctccacccgacggggtgcaggggggctatctcagctcactgcagaactccgcctcccaggtccaagcgattctcctgacctcagcctcccaagtagctgagactacacggcacgtgccaccacacccagcttatttttgtgtttttagtagagacaggctttcactattttggccgggatggtctcgatctcttgacctcgtgatctgtccacctcggcctccccaagtgctgggattacagggattacgggcatgagccaccgctcctggccaagagattatatctgaagtgtaaagtgaacttgcactagatgacttggtgtcctttcctgagagaggaagagggccttttatgttctgtactcttctcccgagtcccaccccgtcgggtggag

SEQ ID NO: 630914 - DNA, 362 bp, Homo sapiens
agttgaatgtggtttgtaatgtgtatatgctgtgtgctgtgaggtatgtggtgtgtgttaaatgtgtgtggtgtgtgtgtgtatactgtgtgttgtgtgtggttgtatatgtggtgtgtgtagtgtgtggtatgtgtatagtgattgtgttgtgtgttgtgtgtaatgtgtgtgttatgtataggtatgtgtgtagtgtgtgatgttggtgtgcatgtgtgtgttcagtgtgtatagagtgtattgtgtggcatatgtatgtgtagtgtgcatgtatttgtgcggtgtgtaatatgtgtggtatgtatgtctgtgtatggtgtatggtgtgtgtatgtggtgtgtggtgtggaggtagcact

SEQ ID NO: 630915 - DNA, 502 bp, Homo sapiens
tcaaattccacaaaatccacaggggggcggacgggtaatacccactatgggaaaacatcccgtaaaccggccggtggccaggccatgggagtgacggaacgggtgacatcggttggagcatgcttggtgtggcgggtaggatgccaccgtggtgcatacacttggtacatcgggggtgaggggagggtttcctaagaataatggggggagggtaaaatggggatttttgggtggtccctttttggagggggtgggggggtatagtactcagcttatgccctaaaatactatgtataaaacccccgaaagtatggtgtgggtgtgtacgtgtagagtgtgtgtgggtatccgtcgggcagtaaaagcttggtctccgggaccttagggaatcctttcctcttttccctccagaagtattggtcacaggattggtaattaagagctctactaagtgggttaccatgaccatgtggcagcaacccttatgcttctaatccctaca

SEQ ID NO: 630916 - DNA, 202 bp, Homo sapiens
  misc_feature (5)..(5): n is a, c, g, or t
  misc_feature (18)..(19): n is a, c, g, or t
  misc_feature (24)..(24): n is a, c, g, or t
  misc_feature (57)..(57): n is a, c, g, or t
  misc_feature (78)..(78): n is a, c, g, or t
  misc_feature (114)..(114): n is a, c, g, or t
  misc_feature (123)..(123): n is a, c, g, or t
  misc_feature (147)..(147): n is a, c, g, or t
  misc_feature (150)..(150): n is a, c, g, or t
  misc_feature (170)..(170): n is a, c, g, or t
  misc_feature (178)..(178): n is a, c, g, or t
  misc_feature (188)..(188): n is a, c, g, or t
gctgncccctggtttggnnccttncctgcaagttatcttccaccttttcacttatgnccttcccatttcaaattagancctaaagtccttcaatcactttcttgcctcaatggnttacacctnccttgacaaccacaaccctgcgcnttntggctcaatataatcactgncttgatgncctccaactnacctatggatatct

SEQ ID NO: 630917 - DNA, 386 bp, Homo sapiens
gaccgtctacagaggaaagccctgggatcgattatgtacaagttggttttcctcctttgcttagtattgtaagcagaatgaatcagacaaccattactagtgtcttggaatatctaagtaattggtttggagaaagagactttactccagaattgggaagatggttttatgctttgttggcttgtcttgaaaagcctttattacctgaggctcattcactaatccgacagcttgcaagaagatgttctgaagtgaggctgctggtgggcagtaaagatgacgaaagagtcccagctttgaatctgctgatctgcttagttagcaggtattttgatcaacgcgatttagctgatgagccatcttgatggcgccttacctcctaggga

SEQ ID NO: 630918 - DNA, 752 bp, Homo sapiens
  misc_feature (345)..(345): n is a, c, g, or t
  misc_feature (389)..(389): n is a, c, g, or t
cttcatagctggtagtcaatgatgtatcggacagatgtggtgagggctaggaaaagagtttgttgggaaccctgggttatcggcctcgtcatcttcatatccctgattgtcctggcagtagtgcattggcactcactgtacattcatgtgagatagtaatcaaagagaagacctacaattactatacgcacattgtcatttacaactgacaaactatatgctgagtttggcacgagaggcttctaacaattttacagaaatgagcctagagacttgtaatcaatgggtgaaagaatgccatttctatcaacaagtctcccacttaagcgcgaagcaattctgtcnaagtctctaggttgatccaagttccagtcaacaccaccagagcnatggaagtgttgcgttccatatgctgttgatcttgtagcatttcactctactgaggatcctgaaactgtagcatacacacattgtctcaactttgtttctcacatgacaaagctgcacagatgcgtgtaggagcccctaaagtagatcctcactcagttcaaaattagtaccaatcatgaagacagaaactagacagctatctaaaccattgctgctggtaacacgaagcaagtaaaactctaggtcagagtctcaggatcgtaggtgggacagaagtagaagagggtgcatggccctgggaggctagcctgcagtgggatgggagtcatcgctgtggagcaagcttaattaatgccacatgg

SEQ ID NO: 630919 - DNA, 405 bp, Homo sapiens
gaccagcgtaacaaccaagtagttcgtgccttcgcgggcatgtataggaagacctgtatgggaaggacctatagcgaagaggcattgcgtcgcccaaagacgatagtttgctggcatgtatcagcacaccgtgttaggctcaggagaatgatccatcactagcaaccgatagaaccgtcgacatggtgaccatggactatttgtgccactccattcatctattattggcgagacacgtcactttttgaacaatcgtgctctgtgatgcacgtgagctcataaaactggcttctcgtatatggttcgcttatgagaaaatgtacatcgaaaatctagtgggcgtataacagccccctttgaaagggaaaggtccttttttcaatcatgtttcagcttacgccacag

SEQ ID NO: 630920 - DNA, 608 bp, Homo sapiens
  misc_feature (13)..(14): n is a, c, g, or t
  misc_feature (101)..(101): n is a, c, g, or t
  misc_feature (171)..(171): n is a, c, g, or t
  misc_feature (480)..(480): n is a, c, g, or t
agcctttcagtcnnggacgggcgcggaagaacgccttcctggaaggaacgccgcgatggctgcgcagggagagccccaggtccagttcaaactgtgtatgnggatgtcgggtcgaaatgggttggtaccgtggaaaaaacgacctttggtgaaaagcgtccattgtgaccntggtgtgaaattttggaggaaaggacaagttcatgtgttagcccaaccttgtgggggtgttgttgcggagggtttcatcccccttagttgttccacacccaacagaggaccctattagttcaactgttatgggacacaagccgggccatggagacaattcggggtggaacctgagcagattgcgctaattttaattaatttcccaaagggcccccagtttgtttgccaattcattcaattgttttgagtgtacacattcggagaggttaaccttaacagggacatgttgttggctcttaaatcgtgggncaattaggaagagattccgtgggtaaccggaagcgtgttggtgcacaaacattcccccatgtgtcgttgtgtgtgcgcaaacaaagggtggatacttaagggaccgaggaacagctgaagcgcgaaac

SEQ ID NO: 630921 - DNA, 575 bp, Homo sapiens
  misc_feature (17)..(17): n is a, c, g, or t
  misc_feature (28)..(28): n is a, c, g, or t
  misc_feature (218)..(218): n is a, c, g, or t
  misc_feature (230)..(230): n is a, c, g, or t
  misc_feature (250)..(250): n is a, c, g, or t
  misc_feature (281)..(281): n is a, c, g, or t
  misc_feature (423)..(423): n is a, c, g, or t
  misc_feature (509)..(509): n is a, c, g, or t
  misc_feature (519)..(519): n is a, c, g, or t
  misc_feature (533)..(533): n is a, c, g, or t
  misc_feature (571)..(571): n is a, c, g, or t
tcccagcagccaaggtngcgcccctggntctaagaaagatccagtctctgtaagctgtgtatgggctcaggcctaaacctgtgtgaacccaacaacaaagagggatactacggttacacaggcgctttcaggtgtctggttgagaagggagatgtggccttggtgaaacaccagactgtcccacagaacactgggggaaaaacccctgatccatgggntaagaatctgantgaaaaagattatgagttgntgtgccttgatggtaccaggaaacctgtggnggagtatgcgaactgccacctggccagagccccgaatcacgctgtggtcacacggaaagataaggaagcttgcgtccacaagatattacgtcaacagcagcacctatttggaagcaacgtaactgactgctcgggcaacttngggtttggtccggtcgggaaaccaaggaccttcttgttcagagatgaacagtttgtttgggccaacttcatgacaagaaacacatnttgaaaattncttaggagaagatntgtcaaggttgtgggtaaccctgagaaattctccaccncatc

SEQ ID NO: 630922 - DNA, 390 bp, Homo sapiens
gtttgtacgtctacacgtcctggtgtgagaagttggcagagatcatctggcagaaccggcagcagatccgcagcgatagcacctctgcaagcagctgcctatcccggcccagtgaaggagatgctggcggaaggcaacgccaccatcagggacattatctcagccctggtgaccggcacgttcatcattgagaagcagcctcctcaggtcctgaagaccccagaccaagtttgcagccactgtgcgcctgtggatgagcgggaagctagaacgttcacattgaaccccccccagggtaaaggccaccattcatcaggtgagcagcaggccaagttctctgctcaagaacgagaacacccgccgtcattcaggggtaccgagctcggaatc

SEQ ID NO: 630923 - DNA, 481 bp, Homo sapiens
agacatctcaaaaaaaaagaaaaaaaaaaagtagcggggcgtggtggtgggtgccggtgatcccagctactcgggaggctgaatgaggaaatctctggaactcagaaggcggaggtggcagtgagccgagatggccctacggcactccacccggggtgacagagcgagactctatctcaaataaaacaaaacaaaaaaattattttggacggtagtcacccggtggtgctgtcaaatagtaggtcttattaattctatttttggtacccattaatcatccccactttcctccaaccccccagaactggttcatcttataagtgaaagtgtgtacccttggaacaacatcttcccaatcccttcagggcccagcttcgggtaaccacggtcctacgctcggcttccatgagttggactttttttagattccacattggagatcacgcagtattggtctttcggtgtcgggcttatttcactg

SEQ ID NO: 630924 - DNA, 386 bp, Homo sapiens
gactcctcaggcggggagagaggggcgattcctccagcggccgggacaggtgcaatgcctcaggaagtgggcttggtcaattaaagcttgtgaaggtgtagataagggtgttagctccttcatcagtctgagggtagcaaggacagttccactgcagaagcagtggcagagaggctttcagttgcccctggaggctctgtccagggagtggctgagttgctactggctcgacagctctggcaggggggttaggtagaggcccaggcctgcaagacttgcctagtgagaagatacaggaatgggaacccaggtaacagtctggccacttttccatagggccgctgcagtatgcccagggcccacttcagtctctagtagcctcagat

SEQ ID NO: 630925 - DNA, 86 bp, Homo sapiens
ggattcagttgacattcaggttgacttttgttacaaagaatttagagggggccaggtgcggtggctcacacctgtaatcccagcac

SEQ ID NO: 630926 - DNA, 140 bp, Homo sapiens
taggggaaacaagattcatgttttattcccccagagaaaactcaaaagtaggaagctcctccttccgggaaaactggtcacaggtgactttcaggtctcaccaaagggaggaggtacagaaagagtgcgtgggtgtttgt

SEQ ID NO: 630927 - DNA, 107 bp, Homo sapiens
  misc_feature (3)..(3): n is a, c, g, or t
tantataacttcaggacgtgggttcccattcctacttactcaagccaatccatattggcattacttagatgggactgaccccctcatggggtagagctttggtcgct

SEQ ID NO: 630928 - DNA, 1078 bp, Homo sapiens
ggcgccgtgcgcataggcgaacgtcggtcaaggcgcccggcgcgacggaaggccatgcccgggcctggtgagccagtgggggctccagtgctgcttgtcaacgcaggagacgcggatagtagacacggagtctccgtagacgcggacgctgcgatggtgccagggtgttgtagccactgggtaccgccgggcgggtcgacggactcgatggctgagggatgctgggtagcgatggctacttacatagcctactggatggtgtgaaacctgtggcgctccacctggtgagccatcctgcacgtgcatcccaaatcgcgtccaaatgacccgaaacgtggtctggacgtagtgcagatctcatgaacagctctacttgggctaaagttcccttagtatcaggtgcctggattaccagtaattgggctatggcattggattgcgccgtgagtgttgacctttagttgttgctctgcccgttctttgcctgtcttatacttgcctcccattaaattccatggttgccatatcggtccgcctttgtgacgttcggatgccaaaggtattcctctcgcgtgcaaaagacagggcggcgtcggccctgcgcccttgtccccctgaactctcgtccttggatgaactcccagacgggttgtggcaacggaatccctgctggtccccggttcaagacctactcggtccctgggctccagcttcaaaattcaccaggtcctgtcggtccgacccattatttttttggccgaggaggagagatcacccacggcagagtacatcactggcgcacttcacattttcacccaggggacttagggtccgcctagcaaggaagacttgcccaccatcctgagtaccgtgtggaatgcttcctcgcgttgcacctgccctttggcttcgaactagggtatccttctgcctgattgaccacttggacacttgtcattcccgttgccacctatattctaaggcggcctacatttgctacactcacaaaagtcggtcgcgtgcggccgacaccgtgggcctattagcacctacccgttccgtctacacctgcccgcct

SEQ ID NO: 630929 - DNA, 1819 bp, Homo sapiens
  misc_feature (1819)..(1819): n is a, c, g, or t
ggttggctccgtggtgcagtgccgagactgcgcggagggctcgtccgatcagcggcgtgcgtgctgtgcatgtggggaggcctgcatgctgccatgtgtgtgggtgctgttagacatgtgctgctgtgcgtgcctgaggctgatggtgtgctgtgcatgcaggtttatcttgtgtcctgctggctgaccgttcgtgcctgtggccctggtgggttggtgaagtgcctggtggcagtgggtgtctgtcccgtgtggtttgcactggtgtgcctgctgtgtgtgcgtgtggctcgcctggcctgatcggtggttcgcacgtgatgtggccttggtgcccggcttgaaatgtgagaatgtgctgcctgtcaggtcagcccagtgcccttgcctgcctgggtgccagctttttgacctgacatgatcggcttccacctgactggagggtgcccccagccttagagtgaacgagacgggcagagcagggcagagatgtgcggcgaagagcccgcaggaggaagggccctgcaggggaccggaattcggacgagagcagcgaacaggggacggcagaattcgtcgccagcatgtcgcaacagaatggtcattacccaatgtgaaatgtcaacctgagtagcccctggaactgcacaccctttggattatccttccccaagatctttggtgaaatcgaagatccaacgcttgcctttaggacaccaggacaggcgcagatacacaagtgtcaacagacaagtcatagcttttgtctcgcctctgggaagtctctagctgatggggaacgcggatgtggcaggggttggcgccctgagaccggacagcacatcccctgggatgagaagacaagcgcaccaagcaacggagaatgtgcctatgggcggatgaaacaccatatcatttacaccgcaggagaacagccattctgagggacagcacgccaggcgcatagttgtatgcaccccaaagacttcaattatcaagaaagaaacatggagagttaggtgatacacggcgacatagccccacgaggtaaagtatttgcaatagatacgctattggaggatacagccgtatggatgcagaaagaaagtagacgcacagagaccgaacgccgtgacgtatgtaacacgataaaggtattatcttatccagaacggaacacagtaaccagaatagcaacataccacctcagattacgacaggagaaagcagatattgcgtaggtaacgtctgtggcgaacttatatacgagaactgttaggctatataacttaaagggagaagggcaaacgtacgaagagaatagagtaactatgaagcagttgaggtctatcaacaaacacgacgagaacaagcaaacctacatctacgtacgaaacaaacacaattcgaatactcaaaagatacactttgtctgtgtccaaacagtgattctcacataactaaacgaacactcgatcaaactactgcccccgcatcatcatgcttccgatgagagtgccacactgacagcggccatacatacagcgccatgctccgctcgtcatggaacagcgatgtggtctgacaccgatcagagagcagacagactgcgaaggacacatcgcacaaagacgagtacaaatcgggaagacgagcacaagcacgtctagtacagatcaggcggacgcgactatcaaatcgatcggaacggtaacaaaatcaaatagcagcgataagtgcgagaaatcactgtagcagtaaagaatcaagagaccaatcaattaatcatattattttcatttagtcatgcatcgagtgn

SEQ ID NO: 630930 - DNA, 162 bp, Homo sapiens
gaatatcatggtaccatagcacccaacagtgatggcacatggtaggcactcaaatactgggtctcttccactttctatggtttattcgtgttcctttttacatgcaaaggctccctttctcttagtttggtttagtttctgagcacaggatctcatctctgt

SEQ ID NO: 630931 - DNA, 214 bp, Homo sapiens
ccaccggtcaggtagtactggagagagtacaaatatatttgaggttgcattgtggatgtcactttgagtgctcttaatttggttattgtgaaaaaaaaaaaaggtcgggagagaaaaggcctttctgggaacggactggataatactatgcctacatcacctagggccccaaacatagctagcagaaatctagataagatatacaaataatcta

SEQ ID NO: 630932 - DNA, 307 bp, Homo sapiens
atccccggctgtaagcatggctcctgcgggtgacagaacttctgggatctggctgcgctattactccctggagcggtagccacagacatgtacctgggaataccgggacctgagcaccgcaggctgctgctcacccagatgctaccgagacatgtgtgcccggcaccgcgcccgagcccactccattcagatcatgaaggttgaggagatcgcggccagcaagtgccggctgtcgggtgtcatgctgtccatgactcccagatcatgttcccgctgcccgaccgggtcctgcgccgtcgcctacgca

SEQ ID NO: 630933 - DNA, 91 bp, Homo sapiens
gttcactttctacacttctcacattaatttgctgtagagaaaagaatttttttccattccttcctggttgccacagtatcttctcccatac

SEQ ID NO: 630934 - DNA, 864 bp, Homo sapiens
ggcgcgggaaggcgcttgtcgtggcggcagccccctctcccgaaaacgcttcctctgacgcggatcgggccgctgggagacttccccaggcgtccgcgactcctggatctggctggagagagggtaacatggcagggagctgagaggttgtcatctttgggaagtggcacggtggcgttactttgggaaaacagcgccttgagggccttgcaggaggcccgacctgggaaggctggcgaacgctaaccggagggtttttcttccagacttgattccgggatgttgagatctttattcgaaatagactagcattcgagtcgcctgtgatggagggagttcctgcaccgtaggcctggcctcatttattctgcaaatgtttattgggtccttgccctttacaagatcctgtgctgtgagcaggatcagggctttcatgtggaaataagtcggcctttggttgaccaactgaaactcctctgaatggaaaatcaagaaattttcggaaaacttagtacaatgttcaatgagttgcatataagtattccttgtctaggtagcctgaactttgtgaacttgagattcctgcaatattgttgacaattctagcttcaattttatcaggcctgtttaaaatctctgatgactgtcagattgtcggtcaattattactccctttgggctctcagtaaatgttcctgaaatccgcggtagaggttatcttcctgaaacatttaccacagagaccaggtcttaccagtgggactccctgggggatcccagtttacaaccaatgttaaatctaataggaatgtgttttcaaattcatccttactatctctcacctgggccactgggtgctgtcct

SEQ ID NO: 630935 - DNA, 437 bp, Homo sapiens
gcattcagttttaagaatggaatcatccaaaggaattcctttttttgaggttggatgttgcagctagtaaaggatattttgctctgttcagattaatgtataggcagttgtatttatggaagaaggagtcattaatcattcagtatgattatgtgaaaatttattaagatttgattagatgttgtaattataagctaatatataggtggacatacagtattatggtagaatagggatcaatgtatgtatagtactatagatatatatttctgttaaagtagtttattctatttaattagattcattctatacatgatacatttagttatgattgttatagattttacatgaatttcaataaaaaaagattttctataatattagtttgataatgttgtattgatattgtatgtactaagaattatagataatggaag

SEQ ID NO: 630936 - DNA, 356 bp, Homo sapiens
tatgcgtgtgactcgcgcggatgtgcccaaggaaaggcagggtggggcgaggaagcgggcctcctctctctgtctgggcccgagctcatgcctctcctatcccttatctccaataccccatggctcttcgtcctcagttcagcctcgtgttgccccatctcccccctctatatccacctctcattctccatggctgtgtctgtttccctagggttctctggtcgacccctatttctcccttgtcacctcagtcgctatatccagctttgggggatccgtctagcagtcgaccctgcacggcgtttgcaagcgttgagcactggcctgatcgttggacaacagtccgtagacctggg

SEQ ID NO: 630937 - DNA, 139 bp, Homo sapiens
taagttgaccgcacatatcaatatactaacgaccccaatgtatgcccatgcagcatgtgacaagggccaggtgcttgtgtttacctgtacttattcaggcactccggtcaacttgtctggagtacggtcaacttgtctt

SEQ ID NO: 630938 - DNA, 364 bp, Homo sapiens
cagttcacttcatcctaaatgatgtcatgtcttaactctaggctaagagaagtttgaaataggtgatggccaggcgcggtcgtcacgcctgtaatcccagcactttggaacgccgaggcaggcagatcacctgaggtcagcagttcgagaccagcctggctaacatggtgaaaccccatctctactaaaaatacaaaaattagccaggcatggtggtgggtgtctgtgatcccagctgcttggaggctgaggcgggagaattgcttgagaattgctgagaattgctgaggcggaggttgcagtgagccgagatttgccactgcactccagcctgggcgacagagtgagaatctgtctcaaaaaa

SEQ ID NO: 630939 - DNA, 1306 bp, Homo sapiens
acacataataaaactacccacttgttctcaggcgtgtttctcgggggggtctcgtcaaatagatcgctggctgaatgacctcttacttatagtaacctaatctgtgaagaaccaatctggcaagaagactatgcatgtaaagttgtagtctggtcactagcaatactggcgactagatgctagtgagtacaacagcagtagatgcacatgttgtgtaagactgaggtcatcatagcaatgctcataagaatgaccattaggcaatgtgacgcattttgattctgcgagagtttaatactttatggattatacctttagtccttcgctccttcctttacaaaagttgtgattcgcgcaattgtggggatctgtggcacctcgcgcgcatattgtatagccagcctcccaagtgtgtaagggagtagcaaaatcgtttaggaatatccagatgttcttagcaatgtgtgacagagacttcccgaagtttggtgggcgagtgtagaacattctatgggcgtccctgagatcaccctaacaaaccttcggaaaaccccccaaagcacgtaccgcagagcgcatatcgggggaaatctggggcacacttgggggccttccgcgaggagaaaagaggtgtccctctttgtccaaagacaccgctcccactttgaagcacatacaagctcgctaacaggggcggtcttcatctcaaagagaagatttctaatttgttgctgggacaatcttcgacgcgccatctgccacgaccatagcgagggcaaaaaaaaacaccagagcgcgggggcaaaccatagcagacgacgaacaccccaaaaattcgggccgaatcgcgcacgacacggggcaggctacacacagaggatacagacaagcacgaagaagaggcgcaagcgaccaacactccgggccacagcgagagcaaccatcagtcggaccagaggccggagtgacaaaacaaacggccgctccagttggcgacaaacagccccaccacttggcgggaacgacgcacaaaaaaagtgggggcaggagcccactaccaacaggaggacgagccaaccctctagacagcgaaagataacacccaataggtaccgaaaacagccgacgatgaacaaccaacaacgcgccgcagatactgatcacaggcaaactatcaacgaatcaactgcgtggccacgaaagacgtcgtcaggcccccaaaacggccgagcggtgcacagacaacacacaacgccaggccgagccgaagcaagcacaccgcacgccacaacgcatggcacacatg

SEQ ID NO: 630940 - DNA, 186 bp, Homo sapiens
tctgtggccgtaacaaggctacgtccgccatggacagcatttctgaggagcggtccatggcggcgattcgacaggttgcgtcagacagcattttgatcatcgtgtcgcataagttgaagacgttggcaacagcggacgagatcatcgtcttggagtccggacagcttactgaacgtggcccactag

SEQ ID NO: 630941 - DNA, 167 bp, Homo sapiens
ggtctacagcaactattagcacaagaacgcgggcaatgtggcctggaacaactccagcttcgcctaagagccgcagggacccacgctgtctgggctggctccacccgggaaccagccgcacgctgtgttctagggccgcccacccaaaccttctggtggggagaaaa

SEQ ID NO: 630942 - DNA, 221 bp, Homo sapiens
catgcagactgtgagtgcgttcgtacattagagtttgctaggcagaatagtaatgaggatgtaagtccgtgggcgattatgagaatgactgcgccggttaaacaacagggggtttggatgagaatggctgttactacgagggctatgtggctgattgaagagtatgcaatgagcgattttaggtctgtttgtcgtaggcagatggagcttgttataattat

SEQ ID NO: 630943 - DNA, 684 bp, Homo sapiens
atttaattctccctggggtatgccaagaagggttgaaatattccaggcgtccttcttttgaccaagaaacccggtggtaccttttccaagccctgcttaaagagaatataagtgaagccacctgcctagttaggccggtatctttagaaattcttaaaggctcatcctctgaatcccaaaaccagccttgatttgttaaagcacacacttgcacaaaaaccagtgatggtggcattaccatttcctgggtcccaaaaaaaaatttccaaaaagcaaggacttcgctttttgccaaagcttttgagaagttactggatcataggaagcttataacaagaatggaagattcttaaataactcactttctttggtatccagtaacagtagatgttcaaaatatgtagctgattaataccagcattgtgaacgctgtacaaccttgtggttattactaagcaagttactactagcttctgaaaagtagcttcataattaatgttatttatacactgccttccatgacttttactttgcccaagctaatctccaaaatctgaaatgctactccaatatcagaaaaaaagggggaggtggaattatatttcctgtgattttaagagatcatgcacatctctgattagttcatatatgtctagtgtgtaataaaagtcaatgaactctcaa

SEQ ID NO: 630944 - DNA, 781 bp, Homo sapiens
ctaccggcgagcacagctagcacagagggactcggccagttggctacaggccgccccgcggccaacagagaggctctcctccgtgcacatctcagcgcctggggagaagaggaggattgctcacgtacccaacccccgactggctgccgcccccacaggtgccaagagggcgctctctgccagcaggcagccaggcgtcccacggccccgaacctggcagccagccactgaagacacgcacattgtcagggatggcatctaagacaaccaccaccgtcacccccaagcgcatcgcccacagcccatcactccagagtctaaagaagcctgttatcccaaaagaatttggcggcaaggttcccactgtggtccgccagcgctatctcaacctgttcattgaggagtgtctcaagttctgttcgtccaaccaggaggccatcgagaaggccctgaatgaggaaaaggtggcgtatgaccgcagtcccagcaagaacatatacctgaacgtggcgtgaacacccttaagaagctaaggggcctggtccccaacaccgtgcccaacctcagcaaagccagtggccgcagggttgtgtctcatgaggttgtactggggggcaaatttggcagcaaaaccagcttctcattgagccgcccagcagtccgcgggtagaggagctgaaagcactgacacaccagtgccctgcgggactgcctgtacagcgctcagggaatgtcctggttcactcagagcccttaagggatgggttccctttccccacaa

SEQ ID NO: 630945 - DNA, 391 bp, Homo sapiens
aagttccggatcatgttcactggcagcctcacgccctagatccaaaaccacaacaagacagcagaacactgtgtaaccgcattgatggcaactagctagatattaacaaaggaggaaactgatttttttttctttttttcctctgaaatcagttaaagctaattaagggaaagtgaattttgaatgtccaaatagaaagaagctagtgatcattaggctccttcattctctaaatttgccaaagttgatggtaaaaagaaaaagaaattgtagatattctatatccttttactcttagtctcttgggagaatgagagactgagaccctctttatttcactttgcaagattgtttttaacatcctagataggagaatgtttgttctagtaaa

SEQ ID NO: 630946 - DNA, 181 bp, Homo sapiens
ggggcaccctttttccaaaatgggaaaaaaaaccccggtgggcgggggcccctttccccttcccccgggccctcccccccccactttggggccccctttttggggggggttcccccccgccccgggggccaaaaaccttttttttttttaaaaaaaatttttttaaaaatcccgggtttta

SEQ ID NO: 630947 - DNA, 111 bp, Homo sapiens
ccagcggcgcgttgctggttgaagtggtgtattcctggcccggcattggccgtttgatgtatgacgcgctggcccagcgtgactacggcgtgttgatgggtggttttctgg

SEQ ID NO: 630948 - DNA, 184 bp, Homo sapiens
  misc_feature (37)..(37): n is a, c, g, or t
  misc_feature (47)..(48): n is a, c, g, or t
  misc_feature (109)..(109): n is a, c, g, or t
  misc_feature (180)..(180): n is a, c, g, or t
gcgtcatggtccgtctgctccggagccgtgacgcagnactcgttggnntcctgtggttcgtctcagtcactacaggaccctggggggctgttgccacctccgccggggnagcgagtcgcttaagtgcgaggacctcaaagtgggacaatatatttgtaaagatccaaaaataaatgacgntaac

SEQ ID NO: 630949 - DNA, 235 bp, Homo sapiens
tccggaaggggtttttgcttggggccccccccccggggggcccccccccccttttttttttcccccttgggtttaaaagggggaaaagggggggggggggcccttttttggggcccctccccctttcccccttggggggaaaacccccttttagaaaacccccccccccccccccccttttttttttggggttttttttgggggggggccccccaaaaaaaaaaaaaatttccca

SEQ ID NO: 630950 - DNA, 139 bp, Homo sapiens
agaaaccatcttatggttgcagaatggtggcataaatagatacaaaaaaagctactatggaattcatgacaagcagatttcttctgactatagagtattctataaaggcttcccagatatggtagcatttgttctaaga

SEQ ID NO: 630951 - DNA, 1370 bp, Homo sapiens
gcggcacgcgctgggcgcagctattctgtgaaagtttttctaagcacttagtgaacgaactgaacggagtcctgcactctttcttctttctctctatcttgctctctgctcttacacaaacgccacacacttccctcgtgcctctcactagcgctgctccctgcactttgcaggtgctacgctgaacactctttgtgccctgtctcaccgagcactgctaagtgctcttctagctctccctctagcacacatcacgcggcttggcggagcggcggcaacgggtcgttgtcacaacacactacaccatctgtgcacacacttctgtgaaacaccatgccacgcctagcacggtgacggtggaactatcttactatcttctcagctcatattgtgctgtgcgcgtggctatctacaacagacaattcacccccccagtgtgtacactttactgtggctgaaaacagcccctgtggactctgaggatggactcaacgtgtgtagacccacttgatgggaggtgtgtgtggcaacagcgggcagcgcacaacagttacaccaaaatagttcccaccagtgtttccctgtgtgaccactctgtgtcgtctccaaggaagcacagagtgtgtggccaggaaagtgtgtacaacgtgcgcctcctatatgtgcgtagacgcaaaagcgtgtattatagtgcagtcttttatacaaatattacacatcttctacgggttgacagcctattaatctatctgtggcgtggcatccaatatcttcttttttcatcaaagggaccacaaggcctccaaatttttctaaaacacatctgtgtgctggtgctatagaaaattcttctccccccaacaagtcccaaaacaccccccgctataaatcagctaaagacaacacactgtaataaggtttatctaaatatattgttacacaaacggctctccccatcctattgacgttgggagaacacccaaattaataaaaacgggatgggcaaatctatccattgaggatgtgcgacacacattttagatgcgcgataaaacactataaaccttttgtgggccaaaacaagctattttaaacgtatatccatggagcgagaactatccccatcgtgtacacatgggggtgattggggcaagaggcttctaaaaattaggtacctggcgtgcaaacgacaaatgtttcccgagctacaatataaccatatatatttcaaagtgggcttgcagaatataacagtaacgaccgagtggggcggaacatatctagataaggatagtaaagtgatactattctggcacatactaggtcatgtggtcacccccactatactgataatatgtctcacaaccaag

SEQ ID NO: 630952 - DNA, 870 bp, Homo sapiens
cgggggcgctaaagtcgcaggtgcaggccgggaaggaagatccggtgcggggcacaggatccgtgagctggatgcccccagaagtttacccactgtaaaaaaccgagcaagtctggataagtgaggctggctccatgtatccagaatcaacgacgtgtgctcccctggctctgtgctctcgctgctggcagacgggctcccccgggatgatctacagtactcggtatgggagtcccaaaatgacagctccagttttacagtgaacctgtgtgcaatgtcttggcctgctgggtctcctgcctgggacttggaacatgggtgaccttcggaggccagatcaccgatgagatggcagagcagctcatgaccttggcctatgataatggcatcaacctcttcgatacagcagaagtctacgcagccggcaaggctgacagtgtgtactgtggacaacatcacttcacgaccgaaaggatggatgcgcggtccagcctcgtcatcaccaccaagatcttctgggcgcggaaaggctggagactggagacggggcctgtccaggaacgcacataatcgaaggtctgaaagcttccctggagcgactgcagctggagtacgtggatgtggagtaagccaaccgtccggagccacaacaccgccgatgcgacagagaccgtccgcagccatgacccaaagttcatcaaccgacgggacggccatgtacatgcagggcaacatcaacgcatctgaagcaaccaaggaagaaccatgggaggccctaacaccagaaggaccaggcaaccacaaccctgaacccgccccaatatgccaccaaagcaagaagacaacccacatgacccagcgctgagacca

SEQ ID NO: 630953 - DNA, 368 bp, Homo sapiens
tcattttctaagtgtgtcaagttgttttgttttttttatttgcttgtgtgtttgttttttgagactgagtctccctctgtcgccaggctggagtgcagggtgtgagctcggctcactgcaacttccaacttgctggttcaagtgattctcctgcctcagcctcccaagtagctggaattacaggcatgtgcccctacgctcggctaattttttttttttttttgtatttttagtatagaccgagtttcaccacgttggccaggatggtctcctcctgacctcgtgatccacccgcctcggcctcccaaagtgctgggattataggcgtgagccaccatgcacagcaattaaaccattttagagtacac

SEQ ID NO: 630954 - DNA, 338 bp, Homo sapiens
ttgggactcattcaggatactacatacagcaaaggctcaagaatcaagctttgatgggccatcttaaaccatagggggagagcagtaagccagtgggctcagatccaaatcacgggccgggagtggggtgcaccgtctctggaccaagagcggaaggtgggatcccccagggaaatcaggacatttggccggaaggaggaggagcagaggctatggagacagagtcaggtgctcactataccaagaaacgaatcagacccggggtgcggacatcttcggtgggtaggagagatctctctcttcctttctcgagggcccctcgtgccttgaaatgcaac

SEQ ID NO: 630955 - DNA, 466 bp, Homo sapiens
  misc_feature (1)..(1): n is a, c, g, or t
  misc_feature (119)..(119): n is a, c, g, or t
  misc_feature (132)..(132): n is a, c, g, or t
  misc_feature (151)..(151): n is a, c, g, or t
  misc_feature (159)..(159): n is a, c, g, or t
  misc_feature (165)..(165): n is a, c, g, or t
  misc_feature (194)..(194): n is a, c, g, or t
  misc_feature (202)..(202): n is a, c, g, or t
  misc_feature (206)..(206): n is a, c, g, or t
  misc_feature (209)..(209): n is a, c, g, or t
  misc_feature (217)..(217): n is a, c, g, or t
  misc_feature (221)..(221): n is a, c, g, or t
  misc_feature (239)..(240): n is a, c, g, or t
  misc_feature (244)..(244): n is a, c, g, or t
  misc_feature (247)..(247): n is a, c, g, or t
  misc_feature (253)..(253): n is a, c, g, or t
  misc_feature (255)..(255): n is a, c, g, or t
  misc_feature (263)..(263): n is a, c, g, or t
  misc_feature (270)..(270): n is a, c, g, or t
  misc_feature (294)..(294): n is a, c, g, or t
  misc_feature (298)..(298): n is a, c, g, or t
  misc_feature (312)..(312): n is a, c, g, or t
  misc_feature (314)..(315): n is a, c, g, or t
  misc_feature (337)..(337): n is a, c, g, or t
  misc_feature (412)..(412): n is a, c, g, or t
  misc_feature (434)..(434): n is a, c, g, or t
  misc_feature (441)..(441): n is a, c, g, or t
  misc_feature (445)..(445): n is a, c, g, or t
  misc_feature (449)..(450): n is a, c, g, or t
ngtggtgtcacgtgggtaatggctaaatacgttctgcatatgaactgaaaaaaagttacagtctacacacatacaaatgtgaagcacttaaaatgtgattttaactgataataaaaganaatgtccattttngggtatagtgttaaaaacntttctgtnataaantcataagaccacataaaaataagctttancatatgcncaangcngttttgtnaaanctactaggtgcccaagtnntaantantttgcnangttgtgtntaaacanttcctattgttcggcatcattgtnaacntcagcacatgtgtnanntgcagcaaagtctgccattacnttttgttttgccaatttggattccttttatccaaaggcggaccagtggggtacgcggccaccattttggcaggtngggtctttaaaattaggggtancggtgcnggtngggnntgcgaggaattcctag

SEQ ID NO: 630956 - DNA, 1308 bp, Homo sapiens
  misc_feature (1100)..(1100): n is a, c, g, or t
  misc_feature (1102)..(1104): n is a, c, g, or t
caataaatgggacgttgtatgaattagaaagcagttttgagtaggtggaaaaacaataagacagatcaagtataaattaaagaaacagaactgtcagattgcagaagaactgtatacagaatgagaaaagatcaggagtctgaaaaagaatagaagttggataggctggcacttgaagtcttagtgggaaatttatttcttaagtgactgcttgctagggaaggttagaaggagatgaattaagataaaccctgataagaagccattggtggaaaccttaaaaacatgaggattgacaggtatagatcgggattctttgtagaacaaatgaatgctattggttgaggactggttgggaatcatgataaggttaacatccagagaataattcagcattcacttattatagagtcagtgggtaaatgatttgtagaatatttacgatatggcagggcagatattcaaagggagttacaaaaggacatagcagtaagtatgatgttaaattggccaagaagttaagaaataatgttaggattggctgaaagttaagcaactgagaagacctgtgtatataaaaaagaaaaaggaaaagggagaggagaagatgcttggttggaggaaaaaaatgtatgacttagtctgggtttggaatatgcaaggtatgaaacagcaaatattattgagaccagaatgaggaattcagatatcaccagctatctgctcatacagcctaaatacttgttaatatgaaaagatttacattatatatacatctcaccatgtacttagaaaatctggtgcagtgagttagcattcttgtgctaacaaaaacttttagcttgcacccaagcctacttgagatggcatatttttgccgtggttcttgtgctgataggctcattccctatgctgaaggatgttaaatgtgtatgcattattcctgtcatcttctccataatatgagcgggacaattcaagcaactcatcaggtggtaagtaaatatttccaaaaaacttcttgtttttatattttatttaaaaatgtatatgcatttgttatttatattgaaaacattccattgttccttgcagtatanannncaaatgcaattatagtctttattatagtaggagaccgattttgtattacacacaaacacgtctgctaatgaactgatgatatgttaaataattaggtcattaccctttaaaatggtgtatattatgaaaaatacttaaaagttttcttttatcatagtgtttaagtgatgactgagaaaataggtagagtttttttaaagggag

SEQ ID NO: 630957 - DNA, 692 bp, Homo sapiens
aagtaggtggaggagagacgaatcaggccgggtagagctctgcttgcagctgtaggcccctggagagccctcggaagagctgccctcggaatttgatgggagcagtaaacactgaaggatgccaattctgcgcttctcagtaactacgagatggagtctcgctctgtcacccaggctggagtacagtggcaccatccaggctcactgcaacctctgcctcccggattcaagtgattctcctgcctcggcctcctgagtagctgggactacaggtatttcaccttactaactgagtctgaaagagcagcgtacaagaacagtggacgggaatagccacagctgctgggcgcatcagtaacttgagatcatctatcacctatgtagaactgttgtacatacgtatcaacaaagcaccatgcaggcgaccagactcctgaaattgtcagtagaatctctcgacagctttgaaatgccgcaagttgaccaaatgctgagaagctaccagtctgtctgaagccaccggcctgtgagctgctgtgcgcatatccctctgatggtgcgaagagacgctgaagagcggctcacgcgaggagccacatcgacagctcttctccacaccgtcaccaaacattctgcctgcacgagccagacgctgagcccaagaacgactacacaaccgccaactgtgccac

SEQ ID NO: 630958 - DNA, 103 bp, Homo sapiens
  misc_feature (3)..(3): n is a, c, g, or t
agngctgatcatccactttcttctcagtcaccatcattttgagctcctttgtgctggtgagcatcaatttcttcataaatagcttctgtagtgacagcaggag

SEQ ID NO: 630959 - DNA, 116 bp, Homo sapiens
tggatccctcacgtggggtggtgtaaaataggcgtatgtagaagtagaggttaaggagggtgcgtggccacacggtgcgttggccaacacggtgcgttggcccaacacggtgcgtt

SEQ ID NO: 630960 - DNA, 544 bp, Homo sapiens
  misc_feature (128)..(128): n is a, c, g, or t
  misc_feature (145)..(145): n is a, c, g, or t
ctttctatcagggggaattgggaattctccgtttttttttatgaccttacccgggggggggggccagagggcccagattttcaggtttttttaatgcagccccaaaaagggttggaattacaaaaaantggggggggggggggtncaccctcccccatttttgggggccgccccccgggggtttttaaaggggagcaccccttcctttttggggtttggggccaacagcccaagttccctgtttttttgggggggggaaatgccccccgggccttaaccccgcggggtcgggttgggggggggggcccctttccccccccagtttttagttgaagccccggtggggccgggtggggtttgggccccccccccctcctgcctaggggggccgctatcccccaaaaggggcccctggggggtgggggagggggccgggtttttttagcccttttccagggccccgccagggtttccaaccccctttttgggggtttttttggtttaggttcccccgcctttataaaaaaaccccgccggcccctga

SEQ ID NO: 630961 - DNA, 1028 bp, Homo sapiens
  misc_feature (1028)..(1028): n is a, c, g, or t
tcgtgcgatcccaggctttgggtgggtcgcgtcgtggactcgtcccgtctctcttcggtgcttgccggacagctggcgtgggcgcgctactggatagagtggacgaacaacttcacgcggtagagtgtagagactctacatgatgggtcctgcaaaccgggattgcacagctgcgtgtgttctactagccgagggtggaaagtctggaccgtcaatccagcatggccatagtaacagaccgtgatgacttatcgtggcacccgtctgatcggcggagaggtgtgaggaaagctgtgtatgttaaggcgtacaggagcagcgtgtctgctgttcagatggagaatacgcgcgaaattccttgaggatcgaagctagattgctctagtccggaggccgaggactttcactcaggtaggtagaggggccaattgtggcagatcgtcacaaaagcccgaaccttggggtccacctaagactggaaggcgtgcgagagcagggctgagactcctggctcagccggaacctgtacactgagtgtcgtcgagtgaccgaatgtgaccattcggtgtgtggccgttcgacgccaattaggaagtacccggttatgcataggagaggtctcagtacgtctcagactgagaacgagggactgagacgctttaacgtggttggctcgaaggacatgcggcgtaggaggttgataaatggggcccaaagaactttatgtaatttagaacacactgtccgctgcttaaggagtgagttcaagaagacactttatgacaggacgaccagcgactcactggaggagaactgggacgccagcccaccatcaggtccagacacctgctggtgcaccgatgcaacgcagtcgcccaggcgctccgacctcgagagtttgcgacgcgccctcaatcggcaactgcattaccgcccgggggatcgcccctcaccaccgcccccgtcccctgcccctccatcccccacacctccgcacacatggccctcgccccacaactctctcaacn

SEQ ID NO: 630962 - DNA, 982 bp, Homo sapiens
gcctgcgccgccccttccgaggctaaatcggcctgcgttcctctcggaaagcgccgtattaaggggtcctggtgatgagtcccgcgttctctccttgaatccactcgccagcccggcacgcccgtcatgacggacgcagccttgcacaccctgcccctctcactgtgccaggaacttgcgtacttaccagctagctcatgctcctaccaagtatccagcacgtgacgcccggagcagaagaaggagctgtctgacatcgctcaccggaatcgtggcacctggccaagggcatcctgggtgcagatgaagtccatcgtgggagcattgccaagcgggtgctagtccattggcaccgagaacaccgaggagaaccggcgcttctaccgtcagctgcgtggtgacatggtgactgaccggcgttgaacccctgctattggggagtgtcactccgtcttccatgatgaacactctatcagaaggcggatgatgggcgtcctttccgcccaaggttagtcaaataccatagggggccggagtaggagggcagtcaaagggtaggaccaaagggcgtggtcacgccatggcatgggaccagacatgggcgaagactcaccaacccgaaggcgttggtgattggagcctgttctggagcccgcttgttggcccacgatagcccctgaagcgacaggcatgctgagcttcggccaaagctgacggttggtgtcgcattgaaagattgggggaacaggagcccgcggtcagaacgctcggaccagtccagtgggacacatggccattggttctggggcaccggatagtggccaagtgagtctgtccagcagaactggcatttggtgccgccatcgtgggaagcctggagatcactccccttatgggggaccatgactttgaaggcactggcagatatgttgaccgagaaagctgcctgggtgctgttcttacaagggatccgtagtgacca

SEQ ID NO: 630963 - DNA, 237 bp, Homo sapiens
cggtgatccgttgtctttgtacagtcagtgggctcccaggaaatgttccttctctttttgttggcatgggcactgtgggatctggtacattccggtagacactctcttttatttggactgtaaggtctgacctctatgaataattacttcagcccctgattgctcccgtgccaagctccttggccaaactttcaccttagcttctggtaaggtcttgggccaagctaagccgcctct

SEQ ID NO: 630964 - DNA, 92 bp, Homo sapiens
gactgtcgaccaggttggggcatcattggagcttaatatatcatatctaatttacaataatttcactgaaataaactccattgcttttacct

SEQ ID NO: 630965 - DNA, 786 bp, Homo sapiens
cagttcaattcaactttcctactctcctttcatgatattcttctgcgtccttgggcatgatgcacatgaggcatatccggacaaagtgatagcgacgtaatcccatctgcagaatatctcccttgattaccatcgagctatctgtctacctagagtcatacctagtaccattacataatcatacagaggcatgttatcctgctaatcagatcaatggacattgctctatcagtcatatatacaggctagtcagtgtattgaattatacagagtttccgaatgaggaagaatgaacttaagtccacctctcatggagtacaatatagatgtgaaatcagcaccctgtagatacttgctttgcctgaaatttagatagaacgatgcggatcctgcaatacccagtgacatcttcaggcagaagtctctttcagtatctccaggaagttaacgagtctactaccgtataccaactatctccctaattgaaaacattttctcgtggtggcatacctgagaaaaagtttttaaaaccacttcgtttagggtcgccgggcccccagaagggcatcaggaacaccctgtggctcaaacgcggtctcccaaggaaaaactccgggccaacaagacaaaggcgcaaggagatctcccccccagttaaacaacggccccgggtgagagaccgggacgtgtcggagaaaaatctcagagggagatacagaaggcccaaagcggagacacagtcacacgaggaagtacaagcagaagggcgactcaagaaattagacc

SEQ ID NO: 630966 - DNA, 1349 bp, Homo sapiens
actaaaaatcaaaaaatgtagccgggtgtggttggtgcacaccttgtaatccacagctactcagggagcgcctgatggcatgtgagaattggcttgaaacctgggagacatggagatgtgcagtgagctgaagatcgtaccactgcactgcaagtctgggtgacaaagcaatgactctgtctcacaaaaagacaaacaaacaacacaaacttttctgaaattggaattggcaatactgttctgcataacatttgggcatgtgggcctggcacagatttcatcctaaatcaagcaaatgtgcaaggctttcatttgttgttggctaattgggagtaattacatgccattactttaaaccagtgcttagatgcctctcctcttcaattaaggaaagcttgcttgagtaggtctcacataatatatatacaccatgatagctacaggaaggacaaacgcagcgaccacgtggacacagctggggcgaacaccactcagcggcccccatgtgcggacacacggacgacaccaagaggacaacacgctacacagccctccgacgaacactccccacagtgtgactcaaacacaaatcaggcgagggcccacaacaaacgtagcacaaagaacagcacgattgggcggcaacaacaataaattttagtcccacactgatggcagccacaacgcgaacagcaacagaggggcccacaacccagcggaagagccaccaaacaccaccaaagaacagcacatatcacagcaccgaacgggtgcccaaccgaaccttcgtcggagctccgacgacgccacacactagtggtggcccgaccaccccacacttttttgttatcccacttaacccaacaataaatttacacactaatttactagttacacccaccactacttcatcaacgataaaaaacacacaaacataactactcctcacataaccatctatctccatcaccactaattataattagttaaccacaacttatatcatacaaaccactactatcataaacccaacttatctaatataaataatacaaatcgaccagacaatcataacatattataacatacaatcatatgtcctcaccccccaccagcgacaacaatattttatatctaccacacaacataataatatggataatcatcttatcagatacacaaccttcaacgaacaactcacataatcattcatcaactacacacaccttctttcagaccaacacacaatatttccactccacacaaagacacaaaactacatatagtgtctggcacaaaaacattaaataccactacaaataaacagtttctaagacaaagagaacata

SEQ ID NO: 630967 - DNA, 816 bp, Homo sapiens
cacggtggctctcgcctgcaatctcagcactttgggaggccgaggcaggcggatcgcatggtcaggagtttgacaccagcctgaccaacatgatggaacaccgtctctactaaaaatacaaaacttaagccaggcacagtggctcacacctgtaatcctagcactttgggaggccaagcaggtggatcacctgaggtcaggagttcatgaccagcctggccaacatggcgaaaccctgtctctactaaaaatacaaaaattagccagacgtggtggcgacgtggtggcacacgcctgtaatcccagctactcgggaggctgaggaaggagaatcacttaatcgcttgaaactgggaggtggaggttgcagtgagctgagatcacaccactgcactccagcctgcccgacgggagcaagattccatccaaaaaaaaaaattagctggggatggtagcccaacctgtaatcccagccactcgggaggctgaagcaggagaattgcttgattgaacccgggaggcggaggatgcagtgagccaagactgcgccattacactccacagagcaagactctgtctccaaattacccacacgaaaaacaaagatactcaaacccacttcccaatgattgtggaattgccttatctagaatcaaattcttcattaatttttcctttaccaatgggacatatcctctccagctggattcatataacggcatttcaaacatattttcagaaaatttcagaaacaaccatcaggttctttccttcctaagccccaattaaacccaatacactgcttttcaagaatta

SEQ ID NO: 630968 - DNA, 441 bp, Homo sapiens
cagaggtagcccaattgattccaacccaaaactccttcccctttttaaaatgatttttgttttaaagccatagatcaaaggcctcagaaaccattgtgtgtttcctctttgaagcaaagacaagccctttactttcccggtgggttttgtttttttttaatgctgtggaacctcttttggaggacgttaaaggggggttttacctgtttttttaaaagggtgggaagggggttttgtagattttttgacagggctgtaaaacagacggcaatgccatagcctatttaaagaccctacgtgatttgattgagaaggacataggttttttttttaccaaaactgaattattttattttttatgttaacatgagaaatgtatgcccaaagattagttgatggatgttttttaatttaatatttaaataaaaaatttggaaggga

SEQ ID NO: 630969 - DNA, 521 bp, Homo sapiens
  misc_feature (7)..(7): n is a, c, g, or t
  misc_feature (18)..(18): n is a, c, g, or t
  misc_feature (34)..(34): n is a, c, g, or t
  misc_feature (56)..(56): n is a, c, g, or t
  misc_feature (69)..(69): n is a, c, g, or t
  misc_feature (99)..(99): n is a, c, g, or t
  misc_feature (123)..(123): n is a, c, g, or t
  misc_feature (316)..(316): n is a, c, g, or t
cctatanggcaagtcccnggacccaatccccggngaacccccaggggcccagtgtncatcctgaaaacnaaaaacctgaaacctagccccgggtatgcntcaacacgagatatcccaagcaanctgcagtttataccatataacagaagacaattcaacaatgagaaaaaggaataaacctgctgacacacacaataacacagataactctcagaaacaatgctaaattaaagaagccagacacagaaaagtatatactatatgattccatttttatgaagtatagaagaagtcaaagtaatctttactgcaaaanaaaaaaaaaatcagaagaatgactgcctctaatagaagaaaatggtgtgtgaaattagctgaaaaggtgtgaaggagatttctgagttggtaataatggtctgtatttttacaagaatttgcattaaataggtgtgtgcatttgtcaaaactcaccagcggtacacttcagatctgtgcatttcattgcatgcaaatttaatctt

SEQ ID NO: 630970 - DNA, 266 bp, Homo sapiens
gtgaagagaggctcgacgagaggaggaggagaacaggaggaggctgaggatgaggccggaagaagaaggctttgtccaacatgatgcattttgggggtacatccagaagacagaccgaaaagtggaagagcagactgagcggaaaagagaagaagattctgcctagagaggaaggtctgccattgacacctaatgagatcagctaggagaggccagagctgtgcagacatctatacttgatgcagaagtcgacctcagagagtcag

SEQ ID NO: 630971 - DNA, 140 bp, Homo sapiens
tagtgatgtatcccacacatcggagcccacactgtggtgatgaagggccagaagatctagacgtgcagtctatctctcacgcagagcagcctgatgagagctgaagacgctttcagaaacgcctattgggagctgggggg

SEQ ID NO: 630972 - DNA, 186 bp, Homo sapiens
ggggcgggtgagtgaaaaggtggcaatcccgtggtaccttgcctggtggttacacagtttaagcataggccaattttaggggcctcggaagtatctttctacaaagcgcagacacagctccactgacccgctatacctgccgaggatgctcaatgtccacgtgtcacaattccctttcacgcaaac

SEQ ID NO: 630973 - DNA, 342 bp, Homo sapiens
  misc_feature (161)..(161): n is a, c, g, or t
  misc_feature (248)..(248): n is a, c, g, or t
  misc_feature (273)..(273): n is a, c, g, or t
cctcccgggttcaggcgattctccggcctcagcctcccgagtaactgggattacaggccggtgccagccaccacaccgggctaatttggtatcttgggtagagacggggtttcaccatgtgtgggccaggctagtctccatctccggacctcgtgatcggnccgcctcgacctcccaaggttgctgaggttgcaggcgcgagcgacggtgcctggccgacaaaggggggttccttaaagggggtcggnttaacacctacttgtgcctgaggtntttgctaaacacaatcaagggtctggttctctgctttctgttcgattggaaaggggcagttgggtaaac

SEQ ID NO: 630974 - DNA, 221 bp, Homo sapiens
tatacatgcaggagagtggagggacagggaggggagaggctcagaaagcaggagagccaaacatataaatcaagtgggggatgggcacagtggctcacacctgtaatttcagcaatttgggaggccgaggtgggccgatcacttgagtccaggagttcgagaccagcctgggcaacatggcaaaactccatctctactaaaaatacaaaaacttgccaggg

SEQ ID NO: 630975 - DNA, 184 bp, Homo sapiens
gaggattagccggtacgatagaccaatgctgaatagcataacttagtgcggacgacccaatacggatagcgcaatacagacgcagaactcctgaactcaagcgatcctccagaccatcagcctcccgagatagctgggattacaggtgcgtgccaccacactcagactaattttttttattatt

SEQ ID NO: 630976 - DNA, 690 bp, Homo sapiens
ttaggctaggtacgaggccggtggtgaatcggccgagggaaataatcaggtctggaaggactacttccccaaagggcgcacacaggcactacaggcacacacactctggggacagctgcatgaatcaaaggatatatcagccaaaattatcaacaatcacaacttgattttttttttttattttggggatagagtcttgctgtgttgcccaggctggagtgcagtggcacagtctcggctcactgcaacctccgcctccccagttcagacgattctcctgcctcaccctcctgagtagctgggattacagggtgtgagccactgcgcccagagacatatcaccgctttcactgaggtctgtgagtccttgtggcgaattatataaccagagggtagtcttagggttccccaaacttgcaactggtatccaaagtaacggtacgtctgtggactattccctgagtttgggaaatatatatgtaaatacataaagtgtcgcatcacaatattcataactcactgtgagagctggcttgtatggatggggagggcccaacagaactggctagatctacctgcagcaggaacacatgtatcaaaacacaggtgtactttctgaatggcagtccttcaaagacgaataggtttatccaccacgtgaatgcagtccacatgcccccggcaggtgaa

SEQ ID NO: 630977 - DNA, 757 bp, Homo sapiens
ctttgacacgcactataagaccgacttcgacaagaataagatctggttatgagcaccggctcattgatgacattggtggctcaggtcctcaagtcttcgggtggctttgtgtggcgcctgcaagaatctatgacggagatgtgcagctcatgacatcctggaaccacggctttggttcccttggcctgcatgactgtcctgtgccttggtctgccctggatggtgaatgagcggacctgacgcgctgtacgtgccgctcagatgggaccggtcaccctgtccgactatctgcggatgcctccagacagggtccggcccacctgtcaccaacccccatcggccgcgatctttgcctggcccactggtggcctggcagccacccggggcgtcaacgcctgggatggcgcaaccgacagcatctcgatcccagtgctttgccccagcatgctggtcgcaaccgtgtgctcgtggagcacccgtgccgatgagctggcgtccgatgtaccaaaggccacctggcgtggcatgctttccacggctctctagcgacatgttgcccgctgcccgactctcttgcctgagacaccacggactctcctcgatcacccactcaatgagccacctgtgtctcgatgccctggggcaaggcgtcaggggcgtggcgccacccatggctgcagcggaggcggccgcgctgccccggggtctctcctgaacgcgtcagggtgacgcctccgccctcctgcaggcctcctag

SEQ ID NO: 630978 - DNA, 701 bp, Homo sapiens
gcccaggtgacagagtgagattccttctcaaaaaaaaaaaaaaaaatcacacagcaccacagtaagtataataataaggaaaatgttggaaatattgtcagaatggtcaggatgtgagagacaaagtaagcacatgctgtggggaaaaaatggtgttatagatttattcgacatgacattgccacaggacttctacttgtgaaaaatatctgtaaagtgagatgaagcaaagtgaagtaacatgaggtatgtctgtagctgttgctgtagtggtttccaaatggtggttttcttttccttttttttttattcctttatagggtctggctatgggggtcttggctctggttgcctaagggtggtgggagtggcggtggcgccatgatcatggccgtcactaatagcctctgacctcctggggctcaaggcgatcctcccacctggagtctcctggagtacctggggaccccgggcacttcgccataacgcacccactttaattgttttatatcccgataaagccgaggtcctcactagtgtttgcccagacgggtctcaacgcctcatggggctcaagcagttccctccgggcctaaagctcccaaagttgcccggatttaaccgggtgttgagccaccagacccagtcccaaaaaggtgcattttcctaatcccataggtgtctccaaccattccttaacg

SEQ ID NO: 630979 - DNA, 894 bp, Homo sapiens
gggtctgtggtgggcctctgggccctcggcggattcgatccgttcggcccagggaccatccacggatggcttcttccttcatgtagagcaggaccgatgaggacaccgagggaaggttatatgttcgttgtgcaaaaagccccaattcccagcgtattcagagtcgtggactctactctcaggcaggattctggactcgtgatgtggtggacaatagtaggaatgccagagcacgatttcactgaggtgaagggccatccgatgctggttttctaggcaaacagtacttctcgggggatggatagaagtgaggccacctgctgggaaggatcatttacccgctgatggcgaatccctgatgagaacataaagaccgtggcagacggatgggatctcatgcttcgtgtcatggatccttgtggtcctcgagaacttatacgaccgatcaaccatggtgatgtgtgatcagtgctgatgcacagtatacagcggggacgaaggtccactacactacgaggggggggtggaggcttgcgattgtatctactgtcctgggatgtggtacggaacgaggcagatgcgtctgagagctggccagcccctctgacgacgtggagcgcagaagaggggagcagagtgccgaggcagggtggcaacggatcctgacagcctacctgggatcgagagctggtacagctgcacagtgcagctggaggagaagcgcaggggccatcgagggccagaagaagaggatggaggcgctgatcggcaacggaggcggctggaagctcggggaggggagattccctgcatgttggtgggaaaagggcaacgccagggcgtaccaaatctgcagcgagcagaagaaaaggacacctaaggagaagggagccg

SEQ ID NO: 630980 - DNA, 1168 bp, Homo sapiens
gcgggggctgcacgttcgcagtgtgtgtgtgaaacttaccggctgagccatggatacaccgttaacggcgcaagcctgacttggctgggaagtgcctaaaggctccagaatccacccgaggagcctcaccgtcagtttctgcggactgaggacgggccctttgatggacgttcgaagtcggaatcgccagaacgaaactgacgggacgccactgggtcatcactccgatgtgtgcaaggagggacttggccatgagggatcacccacgtaacatggcacgacgatagtgactaagccgcagagagtcacgccctgtcatagcaagcgaggtgtgcgagtgcttgcgagtgcaccccatagggacagccaagagccatggctgcaagcgtccgccccaggcgtcatgcaaggaacgtacatccgtggagctcggacctcaatagaacagcacagcagtacaagtacctgaatccaccacgattgtcagccggaagcctaagtgaggaggcacacaaagatgttctcaggtaccagtggagatacgtaggcctcggcagttggtccagcaataacggaggagcttgacccgtgtgtgtgtgcccaccagcatcagtctagctggcggtcccaggatcacgcagagaccttaccccggtcagcaagctcccggtccggagccctctcaggcactactggagctgacacccagggcacctggtacccaccgagggtcagcatgagccgagtaacgccagctacagatgaggagacggtgacagaggcgttcggggcaaagatgcgaccaggttctcaatccaagacccaagtccaacaactcgcctaaagaaggagtctggtcatcccgagggagaaagccaaattgggagcgagtgttggaacggaccggtctccagaacacattcacagcatgctctcgggcaaagacacccggttggaacaacaacggtacaaggaacagaataacgaaacaaagtgaaagaacagcggggcatgaaaactgaccggacaattatgtctcctaaagtgaatggggcaacagtcgactaaatctacggaatgaaaagaagaaccacggcgaacattaaacaacactacacgaaactacccaccgaaaaggaagaacacgacaactgacactacgtcacgt

SEQ ID NO: 630981 - DNA, 83 bp, Homo sapiens
  misc_feature (58)..(59): n is a, c, g, or t
agagagtgttcagcagtggactgaccacttagaaaatagatcctccctcaccagcttnntgttaacacgctaagctatggtgg

SEQ ID NO: 630982 - DNA, 839 bp, Homo sapiens
catggtggctcacgcctgtaatcccaatactttgggaggccaatggccggcgtccgatgcacttgaggtcaaggagttagagatcagtcctggtcagagatcagcgctggccaagcatgggtgaaaccgcgatctctactaatacattatttcacaacattatctgggtgtggtggtgctcacctgtactcccagctgcttgggagactgaggcatgagaatcacttgaacccaggaggcagaggctgcattgagctgagatcatgccactgcattccagcctaggcgagcagagcgagattccatctcaattaagaaacgaagacatttatggataccttacgatagttgatgtcttcatattacctggtagcacgtactgtgtgagtctctactgtgtttgtccccagggcgtggtggctcgtaagtgtcctggtcctcagagcaatgcgctgctcaccagtagacctcccaaagtggctaggaactatatgggcaagatcctgagcacagccggtccaatttggtccttgtaaaagcatgcttgacatcgagccagtgcgtgcaaattggacatatgtgtaccaattccctgggtactttcgggaggccaaggagagcgcggatacacgtaggtcctgcgagcatttgagaaccatacccttggtcaaaaatgtattgaaatacccgggtctgtaattagaaacttcctgatgttcagtcgcggttgtgtgtgggtgactgcgcttgttgttgcccagcttaatttgggagtgctgtgggcaccgagtgtatcgcttgggaccccccgaggttgaaggttgcagaagtagagatag

SEQ ID NO: 630983 - DNA, 663 bp, Homo sapiens
  misc_feature (75)..(75): n is a, c, g, or t
  misc_feature (132)..(132): n is a, c, g, or t
  misc_feature (152)..(152): n is a, c, g, or t
  misc_feature (178)..(178): n is a, c, g, or t
  misc_feature (180)..(180): n is a, c, g, or t
  misc_feature (222)..(222): n is a, c, g, or t
  misc_feature (295)..(295): n is a, c, g, or t
  misc_feature (320)..(320): n is a, c, g, or t
  misc_feature (338)..(338): n is a, c, g, or t
  misc_feature (348)..(348): n is a, c, g, or t
  misc_feature (360)..(360): n is a, c, g, or t
  misc_feature (370)..(370): n is a, c, g, or t
  misc_feature (373)..(373): n is a, c, g, or t
  misc_feature (414)..(414): n is a, c, g, or t
aggcagcgaactcatctttgccagtacaggagctcgtgccgtggcccacagcccacagcccacagccatgggctnggacctgacggtgaagatgctggcgggcaacgaattccaggtgtccctgagcagctncatgtcggtgtcagagctgnaggcgcagatcacccagaagatcggngntgcacgccttccagcaggttggtgtccaccgagcggtgtggngctgagaagggccccttgcagcagggctgggccggcagcacggtcctgctggtggtggacaaatgcgacgaanctctgaacatcctggtgaggaatancaagggccgcagcagcanctacgaggtncggctgacgcanaccgtggccnacntgaagcagcaagtgagcgggctggagggtgtgcaggacganctgttctggctgaccttcgaggggaagcccctggaggaccagctccctgctggagaggaggtacgtgcgtcaagcgccctgagcaccaggttcatgaagtctgcgcctgcggggaggcggcacagagcctggcgggcggagctaagggcctccaccagacatccgaagcaggatcaagggccggaaataaaggctgttgtacgaggagaaacaagcacaacacaaagacgcacaaacaaaaacagaggg

SEQ ID NO: 630984 - DNA, 525 bp, Homo sapiens
  misc_feature (201)..(201): n is a, c, g, or t
  misc_feature (495)..(495): n is a, c, g, or t
  misc_feature (524)..(524): n is a, c, g, or t
ggcacgagcaatggcgggcgccctcccccagcctcgctgccgccttgcagtttgatctcagactgctgtgctagtaatcaacgagattccgtgggtgtaggaccctccgagccagtgagatgaacccggtacctcagatggaaatgcagaaatcacccgtcttctgcgtcgctcacgctgggagctgtagaccggagtgtntcctatttggccaactttggctcctcctttctgccctgaattttctacagtcaaaaattcatagacgtgactttctcctccttgccttccaccgtgattgtgaggcttccccagccatgtgaaactcttgcaccatgtgtctggaaaagctgcagacactcaacgccagcccaatgaaagcagccaggagggagactgtaccctgcaaagccacaggggcagagctggccaagaccacaggaacccacctcttgcatcagcgtgacccagacatgagacatggagtaaaggagnttattttggagctttagatttgactgccna

SEQ ID NO: 630985 - DNA, 172 bp, Homo sapiens
cacttgggcataagaggaggaagcggctggcaactgagaggctggaacacttgctactggatagtcgtagcttttaatgtggcgcctcttcaggttctgaagggatcctccgtgttgggtcccatttaggtacacgttagggaaaataatctggcagacaacgtagctgtgc

SEQ ID NO: 630986 - DNA, 231 bp, Homo sapiens
ttttttttttttatacaggatctcactctgttgcccaggttggagtgcagtggcataacatagctcattgcagcctcaacctccagggctcaagcggtcctcctgcctcagcctccaagtagctgggaacacaggtacaagcactgtgcctgctaatttgtattttgtagagacaggcttgcatgttgccagctgtctcacactggcctaggaacccactctgattagtta

SEQ ID NO: 630987 - DNA, 317 bp, Homo sapiens
tgggtaaacctggcgttaataaacggccaaagtatccgatgccaaagggcagattttactattcacattcacttccttcccacataagaagaatgtgaagaggagaacattattcacatgctcaaagttttagcaggttagagaaatggttataggggtgattatttataaattattggctatatacgtactgcttaaaatgtatcaaatcaaagtgacttgacaggcagagacaactgcatcaagatacaattaaaaacttatcagtgactcagcctatgttcaatactacaacttggcaaataaagcagttaaac

SEQ ID NO: 630988 - DNA, 877 bp, Homo sapiens
  misc_feature (397)..(397): n is a, c, g, or t
taaaaacccccttcaaaaatgggaaaattaaaaaaattttaaaaccatttttaaaaaaggccttttaagggggggttttaaaacccaagtgtttttgggttttaagggaaaaatttggggggggttagaaaccatcatatggtgggagaaatgttggaccgcaattatatggactttgagaattccgtgggaaacgtggtggttgtttacaaaaatgtgtgttggcgccgaaatattcgccggcgagaataatgggtgaaaaggggaagattcaagaaatacttctggagggtttttgtaggggaggtgtaaattaagaacacccatgaaaatttttgtatataaagcagtggtttgaaaatttagtggggttgcgcggggtggtttccctcataanaacctctgtggtgggtggacacccccgaggagtgaatggaatacactcctctgaagtggcgcagaaaaacacgcggatttgttgttcaacagaagaggggcggcacataccaaggggggatatataacgggcagggggtgaaatcccctggtgggggggggccccaggtgaccccctccataaagtgggggggggcagaagggcaagagcgagtggggtgtggttaaaaggggttccaaaaaaaaatctcttgttggggaaaaagaaaaaacctttttgtcggggggtaataagaacaggaggtattaatcccggagatatttgaagaggggagcttatttgtggggaaacagggtgttgtgtgtatttgtattgtggagccactatagtgaattaatgtatacttaatcagatgaggttattaaaactttcgggaggcccaactctgtttgggtttataattgggcactagagtattat

SEQ ID NO: 630989 - DNA, 1659 bp, Homo sapiens
  misc_feature (692)..(692): n is a, c, g, or t
  misc_feature (1139)..(1139): n is a, c, g, or t
  misc_feature (1145)..(1145): n is a, c, g, or t
  misc_feature (1151)..(1151): n is a, c, g, or t
  misc_feature (1165)..(1165): n is a, c, g, or t
  misc_feature (1192)..(1192): n is a, c, g, or t
  misc_feature (1195)..(1195): n is a, c, g, or t
acttgcgtttagtgaaagactgcgaaaagtgatacaatatgtaagctttcttaatattgaagtttctttgttttgagacagcatggtgatttttaaaattctttaatttgttcttggatattgaaaattcaaattgaagccaagttatttatggcttatccttaaacaaatagcaaggccagtcttttaagactaaaacagatttgtgtctatttgaagacaacaagagtgactttttagggcatttaaatttagcagataaaacacttagaaaatagttttatctgaaaagttttatcagctaagagagcataaatttttacttgttctttgttgtttctaggttagactctgaaggaattgagttgataacaaaatttcttcaggtaagtcagttcttacagtaattgttaaataggttgttaagcctcagcttcttcatgtgtagaatgggctcagtagtacttcctcggtattgttaatgacaaataaaattatctatgcttaaggcacatgtttaagttaaaaaaaaaaaaaacatggtttctcctaatgtgtctgggtctcttgtcacctacaacagtctgaggtagttggttactggcattgatcagctgtgtcaaggccacattctctgcaattgatgctctctatgctctcttatgttctcttttccttatacgtacagcctntggaggatgctctgcctccaaatgccattcatatttccctccaaagcaggaataaggggggacgataagggtagtaccagccacattagtcctcttgaaacttggaagcaaaagctttacagaaacccctacaaggtttctttccaagtcttattggccagaacattaattgtaggaaagactgggaattggggagcagaattgtcataattagccaaaatttaaaacagttatgattcatgattcatctatcagagttgatggacaccttgaacaaacctaggttgtatcatcaaaaaaaaagggaaaggagtatgggataggtcgttaagaatgactgccataaaaatacggggtatatgtccaccagtccttgggtgtccatgaagagaagtaactacacaggtcaaatattttaatttttctttgcttcagaaaatacaagcnatgtanattctngtttaagatccagncttatcttagaaatgtggaactgagangtnattacacaatctcagcagcgactcaaattagagtataactggagtattccgaattgttgattgaaaaatagtcatcatagttaaataatcgagattttttttaagtagctctaaatgctcatttgcccatctcctactttttgcagtaattagagaaaaagctaatgaagcagttctttgctttttcacagtatgaatctaagaaaagggtttcagctgaagaggccatgagacatgtgtactttcgaagtctgggacccagaatacatgctttaccagaaagtaagagaaatcctaaagtgtcttccctgctttatttttatttgtccaaggttagggtctggggtgattggggagatggctattgatttttaagcctaagattctagtcttctctatagttagattagaatttcttgaagggaggtgtgtgtcttatttccctatgattcagttatttcttg

SEQ ID NO: 630990 - DNA, 478 bp, Homo sapiens
aaaaaaagattaggacttgttgtcttacaatgaacgtgcaagaaccatggtatgaacggtctataagatccagatgtttatttcaaaacccaaacccttgtcacctgcaagaatctttacatatttacgtaatacactgtacattatatgcatggcctgtttatactattttcaaaaagagaatatggtgttaaactattaataaaccaaaatttaatttgatagggcagcatcaatctgtattccatccttggtccagggattttccttaaatgatggcatcagtgtcatctatggtccgataccgaatgcctcttcttgagttatacatttggcatccaatgtaaagaatagataaaactcccagcgttaatacaataccaccaacaaagctcccagtatcaaatttggatcctttctttgcttcagaatgcatagttgtggtgatggttactgataaggtgggtcagaacataag

SEQ ID NO: 630991 - DNA, 356 bp, Homo sapiens
  misc_feature (247)..(247): n is a, c, g, or t
gtgttcacatagttctttggatttccgtgttcataattatattctgaaactcattttcaccccagcccataattcacatattatctgtgtaatgcacagttgtatgcatttccgcaaaccagtagtataccctcaggctcttctcacccagagcataggaaacacaggtttggtcacacccattaagaaccaattctatcccacgctatttgccaatgtgtagtctcagtctaaattctcacaatanaatgtatggatatatatctatatctctcatcttgattctcaaaagtagccaaagggagttcttcagagcttagcgttgcctgtctaacgctgaagattgtgtatcttca

SEQ ID NO: 630992 - DNA, 183 bp, Homo sapiens
ggctattgagcctgtgcatacgtcacgaagttctgtgcatggttttcagctccatccaggtcttttaaggtcttctctacactgtttattctagttagccgtggcctaacctttgttcaaggtttttagcttccttgcaatgggttagaacatgctcctttagcccagagaagttagttatta

SEQ ID NO: 630993 - DNA, 537 bp, Homo sapiens
  misc_feature (93)..(93): n is a, c, g, or t
  misc_feature (156)..(157): n is a, c, g, or t
  misc_feature (194)..(194): n is a, c, g, or t
acatgcctgtaatcccagcacttgggaggccaaaacgagtggatcaccaggtcaggagttcaagaacagcctggcccacagagtgaaaccctngtctctactaaaaatacaaaaaaaaattagccggacatggtggcaggtgcctgtagtcccagnnctaccttgggcaggctgaggcaggagaatagcttganacccaggaagtggcgggcgttgcagtagagctgggactgtgtggcccccaacccttgggggcgaatctccaccctgggtgacagggtgaggctccattcaaaaaacagaaaatagagaagaaaagaaacaaagaaaaaccttgtgggcgcgcgcagcgcggacccccccgagaaaacgtttgcaaacacaaacaagtcggggggccgccgggggcccaggaatggtaacagagcgacaccagggggccccaagggggtgcaccccacaagaggggaaaaccggggcgcacagagacccaacaggcgcgggggattaccccacccactaaaaaacgccccgggg

SEQ ID NO: 630994 - DNA, 124 bp, Homo sapiens
  misc_feature (15)..(15): n is a, c, g, or t
  misc_feature (22)..(23): n is a, c, g, or t
  misc_feature (71)..(71): n is a, c, g, or t
  misc_feature (115)..(115): n is a, c, g, or t
acagtgactaaacgngagctgnncagcacagttcataggcgcgaacccaagtagatcgccgcttcggccangctgttagtaatcgccggtcgagctgaagtcggcaagggcaggnacccactcg

SEQ ID NO: 630995 - DNA, 439 bp, Homo sapiens
  misc_feature (381)..(381): n is a, c, g, or t
tgggggaggggctctctgtatcctttatctccggcagggtcaggggcccctccagggcccggtctcgagcgaggacgtgccttccttcaaacttgatcattgagcggtgggtgccctttgttgccaggtgcgccggtgacctttggcagggaagccgcgtgtgttgtgagcaccgccttccacgaagtgcccgccggtgaaagctgtggccgcagatgtgagcggtgcgtggttctcctttgggccacgggagaatgttagggtgtttgatgaagcggcttcgggcttcggagtgaatgttaaaagggtgcgcgcgttcaatcgggtaggcgcctgtgcctccagagctgtgtgctcttgcgcctcctgtgtgcgcggaanagaagcggctcttttccaacagaggggggcgccctgtgtgagacggaaagagaagcaa

SEQ ID NO: 630996 - DNA, 893 bp, Homo sapiens
  misc_feature (512)..(512): n is a, c, g, or t
ggtgttcctgttgtccgccttctatgtctcgttatatcctgtccccttatgagtctcctcgaattcgcctgtaatcccgactgcgtcataagtttccgggggtgcgcagaagagtgggggccaccctcttaggcctcgtgtgccgccctttttttcccccgggtcccccccatatttgtcccctgggctcagagccttatgagtgtttcgaacccccgtagcgatgtccagccccatgggttctatatgggccaccctcgccctggccacggccaggatcaccgggttttcattattatggcccccccccccggggccaataggcgcgataccacaagcccctcgcgacccccatgcccataaagcgattcctctcttggctgaacccttcgtcaccgagtcccccccgcccgaccccgcataggtcccccgaagttcgtcgcctgtgcaactccagaaacctcaaggctccccctcgacggatatttctagaacaaacgaggttacgctgntggtaacgacgattcggggccaaaaagagttgtctcccatcctcgcaaatagtttcaagaggtttctaaggcagcttgcaagaggcgtcgtactatggctgagaaccccctcgagtgtgagcatgcacctcttctgcgccccatccggggtatgtcccccccagatcaaccaaacatgggttcgtggatctctaaaaaggagaaatatacggccgcgatctttaatctgccgttgtctcgcttgccccaggcgatgattgccactagagcaacgacctcctatggctaccactaaaccgcccacgtttttgcacaataaaggacaacctgaagccccttttcgggaaaccctttaacggcccctcccttttcccacaaaaa

SEQ ID NO: 630997 - DNA, 444 bp, Homo sapiens
tcgatcggcggcccctagctagaagtcatagccatctctttctcaaatccaaaaagcagctcttcgaagggctcttatgacatccccaggtccagtggcagggcaagcacagtccttccagcacagataagccatgtcaatgcagtcgtctttctcagcaccatcatcattagccaggtatcccttctccctccctggtcagccttccttccttctctgcaacaggcagcacagtccatcacgttcacagtagcatctcacaactcatttgatatgcacagcgttcacaaaatcttcaaattcatcgcactgtatcagcacacctcatactcaaataagaaaatgcattaaatagtcactggtaattagccactgggtgcaaagctggacggcacagctcaataaccaactaaactcagctatggaacattctaaacatcaggg

SEQ ID NO: 630998 - DNA, 215 bp, Homo sapiens
  misc_feature (29)..(29): n is a, c, g, or t
ccccccttttccggggccctttggattanaatccctccccccccccccggcccccggtttggaatattgggggggggaaggggaaaggggtgggcccccccccccccccccactgaaagggcccccccttttggggccccccccttaaaggggggccggcctggggggggccccaactgttttttcttttgggccataaagctgttttgccccga

SEQ ID NO: 630999 - DNA, 872 bp, Homo sapiens
attgatttcacgtttgaacaaggggttggcatctgcacatccttcctgggcatctcgtgggcactgcgtcgattaccaccaggccttgcacactctgcctcccctccaagcccctcctggtgcctgtgctcctctgtgatctacgtcctgtggaacctgctgctactgtggccccgagctcctagctgtggccctgttctcagccctcttccccagtatgtagccctgcatttcctgggcctgtggctcggtactgctgctctgggttcggcttcacggcacagacttcactgctggaccccagttccgacgtatcctctactttctcctggttcaacgtggctgacggccacgcccgaggccgggtccaccatccacttggctctgcctcctgcaggtgacaggcattctcctgcgtggcctcctgtggtgatcttatagcccctggctgcccgagccggatttccacttgcagcttgtggctgcctgtaggagtgcggatagcttctttctgggcctggcttttagtggctttgtagtgctactgcatggctagcacccgtatgcttggctgctagggtgagctccaagcccgtgaccatgggtggtacatgggacccatggatgttctagctttccgtcaagagccgggttacttctggtctggcccttcatgatgtctcctggtttatcgtgcgtcgaagtaagcctttgttgtgcccccaaaggcgcggtactcggggcttcgctgcgcgttggcgatcccggctcgagctcactcggcggacgaacggggtcggatactctggtcgtatcctcctcctgcagggccttgcgctcccgactctcatgtgccagatcatgaaccaatg

SEQ ID NO: 631000 - DNA, 141 bp, Homo sapiens
actaattcagtaggctgcatctccactttgctcactgagggggtttcttccttgctcactgaggggttttctttcttgacaccaacactaatctcttgtgtcttctgagccatttctttagcatcacccttatactgtgtc

SEQ ID NO: 631001 - DNA, 996 bp, Homo sapiens
cgcggtgcccccggcgggttttttcttgttccgcgggggtattattcttcttgggtcgcctcctcccgggcgccatattttggtccctccggtcgtttcgtcctcccttcgtttttgggggtttcccccaccacggggggccgctccatagcctcgatgcgcacagctttgttcttgcggcctggtcaggcggcaagcaaggactgattgcttctccccccctttttgtgggtcaaaagaccgttggcgagtagatgggcgcccactacattttgtctgtagagatccgtcggtggggattgggtccccccctcttcttgtggaagtattagtggtttcctctgcgccagccacgcccaccacgtgcgggggtttggaggggagactttctctctcacggagcaatttagccacccccctctcttggggtggctccttctttagttgctcgtgttcctggagtgatagtagggaggacaccagaccactctcttcgcgtgggggtgtgtctcatctccataagcccagcactgaggagacaacgaaagagaggtctgtctcggtgaggtctcgtcgacgggtcaccaccacgtgtcttccccccagacaagtggtctagcgagacggggttaaagtgaatattagtctctcaataactctcgccccgccccccctcttgttataacactcgtggtgggagataaaaacgcgtttcacgcaaactctgtgtttttttccacattggcgcccactatgtagggttgtgtatgctaatataaagggaactgggtttatatgaagaaccaacaggcgttcgtcaaccttctcttcagtaaggagaaaggaggaaattttttttggagcccccttgggtttttttttttgggggggcccttttaaatttttttttttttaaaaccactatttttttatggggaccaacgcccccaaaatttttcccgaattttggggcccccttaaaaaatttaatagaga

SEQ ID NO: 631002 - DNA, 719 bp, Homo sapiens
  misc_feature (121)..(121): n is a, c, g, or t
ttttctcttacattcttttttttttcccggtttatactttaaaacaaaataaaattggaaatacttcctgtgcaattatgtggtgcaacttcccaggggtgaacactcaaattagaaaaangtccatctctcgtggttagaagggagtggcttcccgtgtaagtgactatagagttaagaggtggcagcaatcttctccagtgccctttctcagcaggagaggcacagaacagtagcggggacgtgccatctcgtggcaagattcccgaggtaaagacactctctctctttaatttcttaccctatccgtggttctctcgtgaactcagcccatagggtgtttgatgaggtggccactcttaaagagttcacctcagtcatcgagggaatctacgggtctgtgggtccaagggtcaaataaaaacctagtctcctttaattctacttctctattcttagctagaagtgaaactcagcattatatacccttcgggacatacatactatggaatagtaataccttatactagatgcacagaacttttcttatacaacacttaaatcttgtaaaacttcaacaaattcagaatctccgtggaccgtgggtgtcggggtggggcccagggcgatttcacagcaagaacaaaacacatcacgcattcgcggccaacaatagagaatggtaggcggctctaagaacgtttttcccattgggaaat

SEQ ID NO: 631003 - DNA, 726 bp, Homo sapiens
atgagtatccgctgcttacaagttatccccactcatggagtgaacagtgacgcaagcgtcaatagacttcataagtgttcatagaattctacaattctgagtgatcttagaaatcatctctgtgtgttcacaaacaaggaaactgaggtccagaaagagcaagcgacttcgcttaccagctcgcatcagagagctgagggtaagactcaggtgtcctgactcccagctttagtatctttgaattttatttctgtaccatttacaaaacaacataattaaccactatttgtgcaacgtcagtgtttctcgaacacttcagtgctccaataaaaagtggactgcacactacgggaccatcccccagcctgtaagctgtctgtacttactggggcccgtagtatctcggaatctgacggttggaacaatgggagccctgttgagcgtgtcctaaagtgactttacccgcctgcgtgttttgaccacgggaagccacaggacactgcgcacgtttcgaggccctcccattgtgcgtgacatctttgtaaaactccagaggggcgcgtaactgtcacgctgttatcttactcttccaagtccgggagcacaccacacacatcacgtctatcaggaacacgccaattcctcttctgaataatcacatgtctctgactgacaaatatggcccacgtgccctaagcctcgcatttagcccacatcacagctcac

SEQ ID NO: 631004 - DNA, 124 bp, Homo sapiens
acctggaaagacagagcagattgttaatactttggaaaagaagtacatttgtgtggaccttgaaaggggtagatggctcaggtttacacagataattgcaaggtagaaggctctctgttctcgt

SEQ ID NO: 631005 - DNA, 824 bp, Homo sapiens
gaagaaaccaagcggaaggaatcatgaactcctcaagggtctccgagcagagctcaagaaggcccaggagagccagaaggagatgaaactgctgctggatatgtacaagtcatgcgcccaaggagcagcgggataaggtgcatgctcatggcagacggtaacgcaaggctaacggccgaggttgatgagctgcgcgagccgcatccgggaattggaggagagggatcgacagggagagcaagaagatcgcggatgaggatgccctgcggtgcattcggcaggcagaggagcagatagaacacctgcagcgcaagctgggtgccatcaagcaggaggaggaggctctgctctcagagatggactgtgacaggtcacggcttttgaggacttgcaggaacagaacggggcggctgctacagcagttgcgggacacggatgatgccaacctttacacgctaatgtcagagcggatcaaggccaaccagattcacaagctgtctgcgggacggagaagggattgagatttgaggcgagcagggtccgttgaggctcaagttcccaggtggatgcccagcttgctgaccttgtgcagaaggctggaacggacaagggagcgagccttgccagggcagcctcgaggggtgtcgggagacaggacgcttgatcgctgcgccagaccaagccctggagactcaagaaagcggacagggggtagaagccgcccagcttggccgaggacctgaaggtgcagcgtggagcacgtgcaagacttcggctggcgggagatccagccctgctggcacgagagcgggctgccgtgagac

SEQ ID NO: 631006 - DNA, 804 bp, Homo sapiens
gatcgagcaaccctctaaaagcagtttagagtggtaaaaaaaaaaaaaaacacaccaaacgctcgcagccacaaaagggatgaaatttcttctgggacatcctccgggcttctcccgttactgatcgtctgctccctagaagtccttcgtgaagctttttattcctaagaggagaaaatcagtcaccggcggaaatcggtggctggattaacagggagctggggcatgggaattggggagactggactggcctatgaatttggctaaacttaaaagcaagctgggttctctggggatataaataagcatgggactgggaggaaacagctggccaaatgcaagggactggggtgccaagggttcatacctttggtgggtagactggagcaaccgagaagatatttacagctctggcaaagaaggtgaaggcagaaatgggagatgttagtattttagtaaataatggcgggtggtagtctatacatcagattcggtttggctacacaagatcctcagatggaaaagacttttggaagttaatggtactggcacatttctggactacaaaggcatttcttcctggcaatgacgaagaataaccatggcatatgtgtcactgtggcttcggcagctggacatgtctcggtccccttcttactggttactgttcaagcaaagttgctgctgtcggatttcataaacactttgacagatgaactggtgcctttaaaataactgggtcaaaccacatgtctgtgtcctaatttcgtaaccatggtcatcaaatcagtcacgttgggaccc

SEQ ID NO: 631007 - DNA, 204 bp, Homo sapiens
  misc_feature (199)..(199): n is a, c, g, or t
ggaggggctggtgcataatggatgggacgacctgtacgcttctcagtgacatcaccgaggaggacttggaggaggctgggtgtgcaggacccggctcacaagcgcctccgttctggacagccctgcagcgtcagcaagtgatacgcgcgaggcaccacgaactctgctgaacgtcagaggcccgctcctctggataccnaaggt

SEQ ID NO: 631008 - DNA, 1230 bp, Homo sapiens
ggccagaccaggtccactcgttactagccagcaccaccttagcgcaagaccactttaccgcgcaccattaaagtattcgtgcgactaggacacaggttgacaatgcgtgttcgacatgttacgtatatcaggctacgctccacaggtgatacatacttgactacattcataatctgaatgcattaattatggctgagggacttaatgcccgtataccgttcgtgcggtacactcgaagtctcaacgtacggagaagtcaatctgtgtgcaagggagatgccatacagcctatggacccccaaaatgccgagaactgatgcttacacttataggtatgcatgctgtgaagagtagacaagctccgcgcatctcatggtgcgaccaacagatcaaatgagcaagcattgtgatgaaggtgagcagcggcggactaataggctatccgtggccatcgagtgaatgaagctcgtgtgtgattccaactatcagcacatcgttcagggtacattagttgtaacattctgcacactacagtaaaacaccaatcattatattgcccccccattggcttccccgtggtaaattcattggattgaccgttcgcgaaaccaaagagcgagagaccgagagcctcgtgtaaggcgaacaacataatgtgaagccaaagcgttctagtagtgcacgaagacacgtcatattatagactaatgaatttaaaccacaaatttacgtttagggggcccttacacaacggcgggtcccacacgaagattgggatcggacatgaacgagactgattatcccaaccgttactcgaaagccatgcctgaggcataacggccataaaacattatacatttcgcacgaaagggcgtgtttacttgggaaacgtcgtaaccaagcattccacttttccaaacgatgtgccctaaaattgtgtggcatcccgaatatgccataagtccaacccccgtaaagttaagaacgagggaacacctttacaaagttggatgccaagggtaattcacagggtcaaaacccacttgggcaaacagaccctatttccattacccgtcccgggcacattaaaaggaccctttggacgtgtcacgggactttacacaaagaactttgcacaaccgtggaagccaaaggttcaaacccggcaccgaaggtacattggtaccaaaactcaacacggcagccacacgggtcattcagttgaaccct

SEQ ID NO: 631009 - DNA, 676 bp, Homo sapiens
  misc_feature (5)..(5): n is a, c, g, or t
  misc_feature (143)..(143): n is a, c, g, or t
  misc_feature (191)..(191): n is a, c, g, or t
  misc_feature (242)..(242): n is a, c, g, or t
  misc_feature (521)..(521): n is a, c, g, or t
tttcnttttttcccctatccaaaggtttcaagtctcaatgccgcacaatccttctgaacacagaatctggggggcccactgttcaaacagttgggacagacaggtccctgcaaaggctactgcctttttaaaacacatggggngggggtcatggacggcatgggaaggggggggagggtgggggaacgggnggcggggggggaatggggggagggacaggtatgcgctggggggggtggggnggctggggcacacacggtgggttggtgggtttcatttattggtttttgacattttctttctggttctttttttaactcccccctcccccggtccaacaatggtaaaaaaaaccccccggagttgggcggggccttattaggccggccccaggccttccgggccctcctgggtagccaacagtagcatgtggcggagcttctcaaagctctcataggcgggcggatccagctggttaaaactaagggaggaagaaagatcagtttgtggtgagggatganagataaccaaatctgtgtgttcccatggtgcccaccagcccctcccctccctgaagaaaccaactccctgcttcttgatgactcccaatcttgtctcagcccagtatgtccccctttatctggctcccaaactggccatcaggcaccaaaaccaa

SEQ ID NO: 631010 - DNA, 131 bp, Homo sapiens
cgatagcgctcagaggatccctgattactctataaatcaaaggcaaatcggggaggcatttaagctgcgcaggaagtcaaatcacagctctgctactatagtagctctgtacctatacatcaggcaaactg

SEQ ID NO: 631011 - DNA, 175 bp, Homo sapiens
tgattgtgggtttgatggccaggctcctggagcccttaaaacttcccaatttggtgccacttgaactatattcttttatgcactcctttttagttatccccacctgcccagttcccttattaggctgagacattttaaccaaattacctgcttccctaactattcctggactaca

SEQ ID NO: 631012 - DNA, 117 bp, Homo sapiens
gatcacctgggcagagtgggacagactgtccaacagggaaaccccgtctctactaaaaatacaagatcagccaggcttggggggcagggcctgtggcccagctacttgggaggctga

SEQ ID NO: 631013 - DNA, 920 bp, Homo sapiens
ctgtgagttccggaagagcttcagcaacagctccagctttggcgtgcatctccgcaactacacacgtgagtagaccttatgagtgcactgagtgtcgggcggaccttcagcgatatctccctactttggagcactaccagcggacccacagagggcgagaagccctaccggtgcactgtgtgtgggaaacacttctcccggagctcgaatctcatccgccaccagaaaactcacttgggcgaacaggctgggaaagattccagctgaaggagagccccatttagagtgagggagagagagtgtacgagaccactaacctattggaggaagatgcttcagcatcttttgcgtgtctaccttggaccgtcaagccgttcatcgccactttggagaatggttttgatatagccgtcatgaagtcaggatctcaggaacgtcctgaggagggactctggcatagagaacccttgcctctttccaggccaatttctcgtgttggaaagtcagaagacccagtcgttggcttgtactttcattggggtgaaagagaaatagggtaggctcagaacatgctcatgttattaaggcagcagtcctccctggacctttgaggaagtaacttactgagactcgcggtgtcaacatgtactgaaggttctccaaatatgtctagtgaactgcttaggtatggagtgacactgcagtttcctgctagttcccacctgttgtgcccgcaactttgcttctagatctcatgggtgtgtggaggagtgaccattctcatatggaagggggcctcctaggtccggagaagagatcgtgaggtcccaccttagaaatgaaagggaaaccgatcagggagccatgagcccagggaccttcacactccccgatgtttaatacttggtgtccctccccca

SEQ ID NO: 631014 - DNA, 114 bp, Homo sapiens
gcaaaccactcaccttactaccagacaacttagcaaaccatttaccaaataaagtataggcgatagaattgaacctgcgcaatagatatagtccggaagggaagtgaaattata

SEQ ID NO: 631015 - DNA, 334 bp, Homo sapiens
ttttaggcagggtatgtaagtacatccttcgtggtagtgccattggtgtttcagcttattttacagaactgtacactcaaataggtttcaaaaaaaactggtattatctcttctaaaggaaatcattttcttctctggtagattttgcaaatgatctatatcctaaccttatttgctggttcaaaatgatgtgtctaaagcagaacattgctagcccaaagtacattttctttaactccttctataaacaggcctaacgtctagacctttttgccaaagttgtagtccaaagcaagccccttctccataataaacacatttaattatattacaa

SEQ ID NO: 631016 - DNA, 265 bp, Homo sapiens
ggtgaagtggaccattctttctttgacagtgactttgaagaaggaaagaaatgtgaaactaactcagtttttgacaagcaaaatgatgacccaaaggaaagaatagataaagattcaagaaatgtgaattcgtacactggtgatgcaaacaattggacaatcttcttactggaacaggaaatgaaagaaacgtgaaatttcccccagaacaccctgtagagaatgatgttacacaaactgtaagttctttttcattgccagcctc

SEQ ID NO: 631017 - DNA, 373 bp, Homo sapiens
gcattccaaagctaagttgctggtggcattccccagttctttgccccgtcttctcagtcacataggaaagtcctcctgaaccagctgcagtatcagtacctccagcaggcactggtgaggtgcttggcctatcatcccctcaacccatctacccccaccgccctcttatagtgggtgagtctggcctgttgacccagagagggttcacagaccctcagggactgccccatggacacctctgactggtgttaacagtgtgaacattttccccgtcttcagtcccttagaatgacgacagcccctggggttggggcaggcgagtgtggccacatcatccaagccctcccagagacacaaataggcttttttgctc

SEQ ID NO: 631018 - DNA, 172 bp, Homo sapiens
acagctccggtctacagctcccagcgtgagaacgcagaagacgggtgatttctgcatttccatctgaggtacccggttcatctcactagggagtgccaaacagtgggcgcagccaatgtgttgtcccaccgtgcgcgaccggagcagggcgaggtatttcttaccttgggag

SEQ ID NO: 631019 - DNA, 728 bp, Homo sapiens
gtgcgtctgatcagcggccgcctgtcaacagaccagataaccagggtgaaaagagaaccaagcggatgtgacaagttcgggggatatgtcgtcggcgaagtaaaccggaatcgcaattaactgtacagctggttgttcactcaaagttggttgtctattcgatgacatgcgtatcaaagctaactattaatgtaacatgtaatgttgtgggtcctctcaatgtagaagattcttacatagagatcgattcacagaggggatgttttataatgatcttggtgggtgtgcatactcaagattgattagaatcgcataaggaccatggtcagggttacgtggggtctagagcttatgatagtgttgaattagaagtgatcttgtacacttgtcagtctgttcatgtcgtgaaggtgtgtaaaagtcatacatatactatagtccttatggaagaaaatgcttagaaattcagcatgggacccttgctgtgaattaagcccaattaattcctgtttgtgctacatatgatctgtcgtgtggcaaaagtgtaatcagaggaaattcttgtgcccagtcgtgtcgatttatgccgtcaggcacttgcctgtgctacaattcattgtgttacctgtagattcaggtaatacaaactatatataatccatcaagtaatagaaactaatttagtgaatagccctggggttaagtattattagggcctgggtcgggag

SEQ ID NO: 631020 - DNA, 799 bp, Homo sapiens
tctgctctcggcgccctcgcctcttcctccgctcctccttcgcctcttcctgcctcctcccggttccgcgcgcatccagcctaatcccaacccaggcgaaccgttcttattatttccgttttctcgccatacagcctctgacaaggtgatccgggcgggcccgaagaatataatcccctcaccgtctcacactagtatcgcatgtccatatcagaacctcaaatctttcgacccctttgctgatgcacctaagggtgacgataactcccggcggggccactgacgattaccttccatataagatccagcacgggacggcagaagacactgactatggtcagggcatgcagatgattatgacaaaacagaacttgtgaacgtttccaacaagaattggctgtagttggtactgtggattgaccatccgtgatacggagagggttattcagcttcaagggtgacaaagaaaaaattctgcagttcctattgaaggttggcatggtacgacggaaacagctacgctcatggattcataaactgaccctaaaataggtggagaatttctggaataggtaggtcttcaaccccgggtttgtttgcctgtgaatgattccctgagaacagggacttgtgcatgtattaatcatccaagttccatcattttgctgattaccagaaaccttggggttatgtagactagtacccatagaacaattgcgtagatggtaccaaactcatatgttttaatgtccactggaaactgttgcgtgtattgtacagttaatcgtacatggacatt

SEQ ID NO: 631021 - DNA, 806 bp, Homo sapiens
  misc_feature (659)..(659): n is a, c, g, or t
  misc_feature (671)..(671): n is a, c, g, or t
  misc_feature (683)..(683): n is a, c, g, or t
  misc_feature (725)..(725): n is a, c, g, or t
  misc_feature (744)..(744): n is a, c, g, or t
  misc_feature (781)..(781): n is a, c, g, or t
ggtcccttctaatttgagttatggtgaatggttgcatggatttcgagaaaatagaggcaaacagcaatgtatggctggaacttcagggtcagaggaggttaaggttctagagcacaagttgaaagaagctgatgaaatgcacacattgtcacagctagagtgtgaacacacatacaaatccgtccttgcagaaacagaaggaattttacatgaagctacagagaagtgttgagcaagacgaaacataaatggcaaagttcaaggtcgatgaatcacacaagactattatacagatgcatgtcatcagtttacactcttcagaacaagagctagagcgattaacgaagcgacatgactaaggatattgaaaatctgagaagagaacgagaacatttggaaatggaactagtaaaaggcagtagatggacccgagtctacctatgttacatgaagtcacgcagagttgacaggcacagttaaattgaagacactcacaaaacttagaactgaacaaaatgaacagacagaaggtagctggtgatttgcataatggctctaacagtcactggatgcttatccaagtcaaaaatagtaaaagctgctggagacactactgttacttgaagaatcagtgatgttgtccccagaaacggagtctnctgagaggaganatgtctgtaagnctaaatcagactgtaacacagttacagcagttgcttcaggcngtaaaccaacagctcacanaggagaaagagcactaccaggtgttagagtgaagtanttgggaaactgttcatttgaggata

SEQ ID NO: 631022 - DNA, 811 bp, Homo sapiens
agaaggggcgggctcgcggggtctcgactgcttctcggcttgctcggtggagcaagatggcggacatctccctggacgaactcatcaggaagcgcggggcggccgggaaaggacgtgttaatgccagaccgggagttggaggtgtccgatctcgagttgggatccagccaaggccttctcagccgagtcaacactgcacatgcaccttccagccagagattatgatgcccggcgagaagattggcctctcagatgccctggctcaaactgggcagtccaggatgcccgggagaagctttagcagcaaagatgcccgatttcgaatcacagggaaacgtgcaggatgccagaccagatgttgaactctcgccaagcagccagagcacggatgccccagaagccccgcacaggtatgctgatgcccagggagacagatcagcttgacagacggagttcccctagctgccttccatcaaacaccatcccatttgggaacacagtgacccctgctactgacagctcaccaaaacacatccagaacttttatctgacctggatgacaagattgatgatggtaatagctatccgataccttacttaaacagcatgacagtatggcagactacagtgcagggattataactcacaaaccacaaatgggctcgggacctacaagcaagaatgtcccaacgcctaataccaatgatccaaatgtgaccaatcccgacacatgaacccaaaaagatggataccaagaaaattgagtgcactactcacaggcacccatgcagcatccactatacatagtagt

SEQ ID NO: 631023 - DNA, 267 bp, Homo sapiens
  misc_feature (27)..(27): n is a, c, g, or t
  misc_feature (33)..(33): n is a, c, g, or t
  misc_feature (43)..(43): n is a, c, g, or t
  misc_feature (50)..(50): n is a, c, g, or t
  misc_feature (53)..(53): n is a, c, g, or t
  misc_feature (56)..(56): n is a, c, g, or t
  misc_feature (59)..(59): n is a, c, g, or t
  misc_feature (72)..(73): n is a, c, g, or t
  misc_feature (75)..(75): n is a, c, g, or t
  misc_feature (85)..(85): n is a, c, g, or t
  misc_feature (192)..(192): n is a, c, g, or t
  misc_feature (217)..(217): n is a, c, g, or t
  misc_feature (246)..(246): n is a, c, g, or t
  misc_feature (263)..(263): n is a, c, g, or t
aaattcgagctcgatatcctgagtggntggatnaggtgctggngtgtggntgnatnagntgctggtgtgtgnntnaggtgctggngtgtggatggagatatagatgtgtgtgtgtgtgtgtgtgtgcacgtccgtgtgtgcgcaggcatacgcactgttttctcctgatgtgaggaagggtcctcatttggncctcagctaaagctgcatctgagtnaaagtcagtttcctggagaaggctcctcngcaggatgattccgtcncatg

SEQ ID NO: 631024 - DNA, 432 bp, Homo sapiens
  misc_feature (11)..(11): n is a, c, g, or t
  misc_feature (31)..(31): n is a, c, g, or t
  misc_feature (245)..(245): n is a, c, g, or t
  misc_feature (420)..(420): n is a, c, g, or t
tcatccaaagnaaaaggctggccctccattngggggaattcccccccccataggacaggcatggaggcattttggattttaccctgcccctcaaactgacattttggcctcattataatagtagaagacagcccctacatgggagatgtaatatgcctaatgagacatgtgacatatgaacaagcatgtacagctactgtgcatgtgcaccccagaagaccacccggaacatgcttactagcaanacctcttcccaccaccttatgaataatcatgtaagactcccataaagggagtctccctactgccagtctctgctgtctcacccttatgagcagcctgccttgaaccctctctctcacggtatacagtccattctgcatgtaacttccaaaatattctttttcctttgcaataaanaactctatgctg

SEQ ID NO: 631025 - DNA, 419 bp, Homo sapiens
  misc_feature (13)..(13): n is a, c, g, or t
agtagagacgganttcaccatattggccaggctggtctcgaactccaggctggtctagaatcacctgaagtgattataggtgtgaacactgcagccagcctatttatgtatttatttattcaagacagggtcttgctctgttgcccaggctggagttcagtggcttactgcagcctccgcctcctgggttcagtcttatgcctcagcctgccaagtagctgggattacaggcgtctgcaccacacctggctactttttgtattcttagtagagatgggggttcaccactgttggccaggctggactcgaactcctgacctcaagtgatccacctgcctctgcctcccaaagtgctgggattacaggtgtgagccaccgtgcccggcttatttcttggctcacttaaaagcacatcatca

SEQ ID NO: 631026 - DNA, 357 bp, Homo sapiens
tgctaaataacataaaaccagattctgtcgcaaaacctaagaccacagtgatagtttgaaaaatgaaagttttggccgggcacggtggctcacagctgtaatcccagcacttttggaggccgaggcgggcggatcccaaggtcaggagatttaagccatccttgctacatgggtgaaaccccgtctctactaaaaatacaaaaattagccgggcgtggtggcgggcgcctgtagtcccagctacatgggaggctgaggcaggagaatggcgtgaaccctggaggcagagcttgcagtgagccgagatcgcgccacggcactccagcctgggtgacagagcgagactccgtctcggaa

SEQ ID NO: 631027 - DNA, 873 bp, Homo sapiens
gggactacgaagcccaacctggacctgctggagcagcaggcagcccagctcatccaggaggccctcatcttcgacaagcaagcgacaccaactataccatggagcacatccgcgtgggctgggagcagtctgtctcaccatcattgcccgacaccatcaaggaggtggagaaccagatcctcaccgcgcgacagccaaagggcatcacgtcctaggagacagatgctagggagttccgggcgatcgcttcaaccacttcgagcaaggatcatggcggaggcgctggggcccgaggagtgcaatggcctgcctcactcagcctgggctacgatgatgggagaacgaccgggagggttgaggccgatgttcaaccgtaatcatgagcctggtcagacccaatcagtagcggccttgtgaccgttccaagcgcttcaatcgacttcatggtcgcgggagaggcaacgatacgggacgagcggttgaccaggtcaatcgcattcctgtcaagggtcattagcgcaggggagcaagaatcttcattcacagggtgaggaggcatgcggatgagagctgggcccgccgatcgagggcgagtaactggcatcgtccaggatggcagcgagtaccgaggggcccgcctgaaccgggaaccccatcccaacacaagacccgcgggccttaggcgataggtcctgggccctcgacaggtgttcgtccaggagttatatgcttagacgaaatccgaaacaatacaaaagagggagagcaacacataggcgcgaaaaccaactcagacagccgacaaagacacagacaatccatcgacaaacagagcataagcgcattcttgagccagacacaaacgtaatcggc

SEQ ID NO: 631028 - DNA, 774 bp, Homo sapiens
tgagacagagtctcgctctgtcacccaggcttgagtgcagtggcgcgatctcagctcactgcaacctctgtctcccgggttcaggtgattctccagccttagcctcccaagtggctggaattacaggcgtgtaccaccacaccaagctaatttttgtattttttagtagagacagggtttcttcatgttggtcaggctggtctcaaactcctgacctcaggtgatacacctgcctcggcctcccaaagtgatgggattataggtgtgagccactgcacccagccttaattacccctttaaaggccctatatgcaaatacagtcacattctgagctactgggggttagggcttcaacataggaattcaggcagacatgattcagcccataacaagggctttcacttttttttttttgtagaaacagggtctcactatgttgcccaggctactcttgaactcctgggttcaagtgattctccagcctcagcccccaaataagctggggctacaggtgcaccagcacgcccagctaatatttttacttccatttttttagacggagtttagctatctttgcccaggctagagtgcagtggcgtgatcttggctcaccgaaacctctgccttccgggtcgggagtactcctgctcaagctcccagtggcgggatccacggatgcccaccttgaacggtaattgggtttaggggaaaagggttcccctgttggcggtgctcaaatcccacttgatgttggcccctcatcccagggcgga

SEQ ID NO: 631029 - DNA, 286 bp, Homo sapiens
cgggtgacaccgacactgccgagcaggtcatcgcctccttccggatcctggcttctgataagccatacatcctggcggaggagctgcgtcgggagcttgccccggatcaaggccagtacttgatcaagaaggttgcccgcctctccgggccaaggaaggttccttgtgcaattgattaaggttggttcttttccggaatcttcggggagagagaactttgatggtgagattctctaatcactcatcccctcaaaatgtaaaaaaagggggggtcacagagtgggga

SEQ ID NO: 631030 - DNA, 1153 bp, Homo sapiens
gtaaacagatgagtgtgatgggctttcaataaaacctcatttgcgaagaccaggtggaaggccaggatgtgacccatggcagctgtgtgctaattccctttattttcctttttctttctttcttgtctcttctgttactattgtatactttgctttaggcgttgggggagggagcgtcctgtggcccggtgtgggatgtgcccgaggaggaagtatttgaggagtcttacgcaaggaaggtacgcagtggacggcacgggattacacgagtacagatggttccgtagaccaacatgactcgtgaaagttgacgattggaagcctactggcagcaaaagggtgaggcattagtcgctactctagctcggggattagatgagaagggtgttacaagaggcgcacaacggtgggttatgcacgtgtgtatggggccatgactggtttctacttattctctgtgaagccttgcagttttttgtggccctacctcgcggagtttcaagggggttggcgggtcttgacttggctcttgaatctgacacggcgcctcctgtgcaaaaatgccgctttactacacaggggttgtagagggatgcgctgaatcggtgtagagaacacttgggacagcggcgcgcccaatttgtcgtccattgggtccctggcgttatgttgtaacccgacattttacatgagctgcggctggagcgaaaaattcagagaaaaggctctagattcggggaagtggcccaaggatggacacccaactggtctggcgcgaacgcatcacactcgttctcgaacggcgaatatatctcgccccagttgcgcgggggccaccgctgagggggctacatatgttagacctccgcaaaagatctcggaaatccatagaaagtcccaaattgctcaattttttcccccggggggtttaatccacttaattaccagcttatgtttcgagaacgctcaggacttgggggattatgcatcgggaactcaagggggaataccggatatctgtgggcaattgtggcggaagaagcaatctctttcgccctgaaggcccaccacggggtgggaaaaacttcccgtgaatccccacggggagaaccctgtttttttgggaaaccggaaccctttaaaactctccagg

SEQ ID NO: 631031 - DNA, 101 bp, Homo sapiens
tgtcatcgagctcggtcctacttttcacaggggacactgtgggccagcaaactaagtggatgtagcctaccagttgaatccaaaccagaccagcaaatgtt

SEQ ID NO: 631032 - DNA, 119 bp, Homo sapiens
  misc_feature (18)..(19): n is a, c, g, or t
  misc_feature (24)..(24): n is a, c, g, or t
  misc_feature (44)..(44): n is a, c, g, or t
  misc_feature (54)..(54): n is a, c, g, or t
  misc_feature (79)..(79): n is a, c, g, or t
  misc_feature (84)..(84): n is a, c, g, or t
ccacattacaggtctttnntgggnagaaaccgaaagaaatcacnaaagcaattnagagagctcaaataatggggtttangccanttacatacaaggatcctgcatatctcaaggaccct

SEQ ID NO: 631033 - DNA, 323 bp, Homo sapiens
  misc_feature (256)..(256): n is a, c, g, or t
gctcgacttttaaaaggagaatttatagacctagaatgttgggatttttttttcctttcaggacagaaatgtgtacctttttgtgtgtgaaatagactacttttctaatttggtaactatactgtagttagagtttgttatttgattttagaaagagacaagaagattaactcgacatttttacgtatttcatttgcttcagtttgaagtgcatagatttgaagattcttgaatcacaactatgtggtttcttttntctttttttttttttaagtaagtggttatttaaaaatctgaaatatgggctgggcgtggtggcttac

SEQ ID NO: 631034 - DNA, 1246 bp, Homo sapiens
  misc_feature (211)..(211): n is a, c, g, or t
  misc_feature (668)..(668): n is a, c, g, or t
tggtctactccgctaggggggtgtccacactggggggtcttttgtgcggaggttttatatgctttgttgtgtccacccaagtgtcgtgttggaggaggagagatgtcttgattgtctgtcggggccgccccacgcgccgaataattttggggtgcgccccgttgttcgcccactgtgtgggattgtctgttggtccggcagccagtggcgnccccgggctttcccttatgtggggacgcgtgctcttataaggggtttcccgataatgtccgacagccccccgcccacgagttttatggcccccacccgcctttggaggaggaactctcccgcgctgcccgcccaagaatgggttatataagcgcatgtatggccccttttaaacggcgctttgtttaccccacagggggggtttgtctcctcttctcctgggagtggaggcagaccgtattgtccgcctggtggcgcgcccacttgagtttgagagttgtgcgcccctcgctgttgtgtggaacggtgaactctggctggaaggccacccccggtaaccaaacagttttgtgtcgggtttctctatagccccccgccgcacgcgtggagagatgggtttcacaaacagcccacgaggccacacccttgtggtttggtaacccacatgtgggtaagcncacgcggttatacactatagcctcggaggttctctgttgggcaccacttggtttttctccacccctcgcctcgagttttctcgtgcgtatttctcgctgttggagattaatacgaaataaaggtgacccacgcggctttcttctcggtgcctcccaagaggaactctggagtttataaaggtggtactgtgaaagggaactcgttttggcccgcgatcacatcactgacattggtagaccccgagctgcacactaccacgctgggtttatatctaatgaactcccgctgaaaggtttaacttcacgaacttcctcgcccctcctcccaccccgcagatgcccgagtctctgagagaagaagccttgggttaacctccagtagttagatccaacgccaatgtggacctgaatcgtgcttgttgatccacgtgttgaagaaaggcgccaaagggaccttttaatataatttgccccgtgtagggaattgtctattcctgatataaattcaccgtagtactcttgctttaaggccagagtttccagatttactgttggaattaacccccactcttccatga

SEQ ID NO: 631035 - DNA, 295 bp, Homo sapiens
ggcgacctagaggatcccctctctccacactggaggggtagaagttcaagactaaggtgttgcagtgttggtttcttctgaagcctctttcctggcttgcaagacgaccatcttccccctctgtgtgtttatatggtattctctctgtgtgtctgggttctgattttttcttcttataaggacaccaaacacactggattcgggcccaacctaataacctcatgaaacccgaattaacttcctaaggatcctgtctccaaacagactcacattctgaggtccagtgtggagagag

SEQ ID NO: 631036 - DNA, 890 bp, Homo sapiens
  misc_feature (785)..(785): n is a, c, g, or t
gcgggcccccagcgtcgcccgccgggaggaccgagcctaagagggcagcgcgcctgaaggaacgcgacggtcgcgcgcccgcacgatagtttttcagtgcgtgtaccaagcgctcttgaattactctggtagcttttcgcagaaagacccatgacttcagccagcattttctcgagttacgatgaaggtcctctgtatgtcagcatgggcagctcacataacctggagaaccagactgcagcagcgcaccagaagaacctcctgttccttcagtgggagcatgccagctggctctaggggctgctctccgagatcaggcggctgcagcaggactgcacagatttactgatatgagctgacagtcaaaagttcggaacagacaggagtacgggacttctaaaagcagtgaattaaatgaaaaagatgtgaagagctgggaagtcccagtggatagtgaaagatgaacgaacacatgcgtggagtggtggagtataagtgtgcagcagagaatggggatgatctacaagtgtgtgggagtaacaaccactcagaggagccgatgagtagctagagtagcctgtgggagctgaaggttgggagcttactggtgggtgatgctcgtatgtcagagtaggaagcgagaggggacagaaaaccatcggtctaactgagcttgcctagatgaagcccgcctagaagaaagctcatgagcctcagtgggatctaagatgccagccgtcaggagccccgtggctggccagtacgatgcagcgcccccaaaaganaagtaccgaatgctgcgtcggttaaaagaggccctagccctgtcccggaatttgcaaggtaagatctggccaagggaacctttggggaccggttattcggccacc

SEQ ID NO: 631037 - DNA, 120 bp, Homo sapiens
ctgcggtgctctgaggtcccactgacatagaggcggtgaattgcttgagtgtggatattgcagtgatgctggatcgcacctctgcactccagcctggagacaaagtgtgactgccatctc

SEQ ID NO: 631038 - DNA, 104 bp, Homo sapiens
cctcaatgtttcggatggccaggtagatctcatgagctcttggactcgttcttgccgtgtcagcactcggggagagccctccgctcgatggcttgaacactatt

SEQ ID NO: 631039 - DNA, 157 bp, Homo sapiens
agtaacctcgttgtcttctactgaagcagatgcagtggtgagctggtcaccttacatccgcggcaggtgctgtgtggagtgaaggccaggttgtgttttagtaagccatctgctgcttctggtttcttcaagctttcatctggaagcttgattttgc

SEQ ID NO: 631040 - DNA, 124 bp, Homo sapiens
cgggattttgcttctgagtagtgcatcttcagccacggtgttggtctacaactcgcacaattcagcagcattgggtcttgtggagattgtgtttgaggaagctgttatcatcttcatcggagtc

SEQ ID NO: 631041 - DNA, 844 bp, Homo sapiens
taccctcaacaaaatgttccgctccttcaaagccccctctttccagccacctcgtcctcccaaggggaaccacctctctctgttctatgacccccttacatgttagtttctcttccccctatgattatcttgcttagcggcgcccccccccgcttcatcactcctcttttaatatccgccgtggcctctctgaaccatctttctacacatgctgaccaaatttctgtcctttgtacggctatccatccatcgagaatactgtctttctgctacttacgcgagcaagtcctccctccgagagtgctcttattatttgttcttgttctctcccaacatcagcatgattttacacccccccccgtggttgaaagatcccctcccacccacacgtataaagaggttctatatatgtagcgcttgtctacaccacacacacacatgtgcgggttcttcgtaatctctcttttttctaataaacacggttgccccaggcttgagtcttcataccctgcaatgcactacgcaacttcgatcactcgctcgcacacccccgctgacattgttaatgattatatataggcagatgccacctctgaactctagtattatcatttctcaatatcgtacaatgtcttctgttgattgacacatcatttcaaaacaagatcctagtataggcttacacgtgagcataaaaggcgaacacttattgccataaccccctccaccatcgtctcgtgtcgaacatgactagatatgagatgctattctcgtgcctgacatgcattcctctcatcaaacaactaccacctacagaacaacaatttccaaaccacaaaacaca

SEQ ID NO: 631042 - DNA, 207 bp, Homo sapiens
tggcccatggatggatgtgcagcggtgtgagcttgtgctcattgcaacctctgcctcttggactcaatgtgatcctcccaccttagcctcgtgagtagcgggggctacaggcttgtgggtgggctaattttttatatttataggggatgaggtttctccatgttgcccaggtgggtctcaaactctcatgctcaagcaatccaccag

SEQ ID NO: 631043 - DNA, 385 bp, Homo sapiens
  misc_feature (34)..(34): n is a, c, g, or t
accacaggctggcacagagcaaactcttctcaanaaaaaaaaacaaggtcatgagtgagtagatatggggtgcttaaaagacccctggataaagtgactgtgtccgggcatactggccagttgttactttgagcttgaccctcattcttcctactttccactttatacgttgttacactgggatatcggtgtaggcttctgtcctcctctactgttgacttccccagcatggtgagacttgtttgtgaacccctccagtccctaagcttatagactctgtggacaggagaaggaggccagaattgaaagtgcatcgagaggtcttgtaagtgaaatggccactgattccccttccctttttaagccggcctggaatttgggagtt

SEQ ID NO: 631044 - DNA, 266 bp, Homo sapiens
  misc_feature (76)..(76): n is a, c, g, or t
  misc_feature (187)..(187): n is a, c, g, or t
  misc_feature (214)..(214): n is a, c, g, or t
  misc_feature (235)..(235): n is a, c, g, or t
gaggatccgcgcaaccatagaactcacaacccagccatatacctcagacacaatggaatgggcggaggtcgaggtngacaaaccctgagtaatgttgggcacttccgcaccggagctgttcttacctttgataaagtggatgttattgctattaatgatctcttaacggacttcaactgtaaaattngcatgatctagtcctatccaccaacgncgaacaatatgctgttgccangattgagcacgagccgtttgggctcaacggc

SEQ ID NO: 631045 - DNA, 903 bp, Homo sapiens
  misc_feature (35)..(35): n is a, c, g, or t
  misc_feature (38)..(38): n is a, c, g, or t
  misc_feature (82)..(82): n is a, c, g, or t
  misc_feature (113)..(113): n is a, c, g, or t
  misc_feature (128)..(128): n is a, c, g, or t
  misc_feature (138)..(138): n is a, c, g, or t
  misc_feature (149)..(149): n is a, c, g, or t
  misc_feature (151)..(151): n is a, c, g, or t
  misc_feature (174)..(174): n is a, c, g, or t
  misc_feature (193)..(193): n is a, c, g, or t
  misc_feature (220)..(220): n is a, c, g, or t
  misc_feature (240)..(240): n is a, c, g, or t
  misc_feature (243)..(243): n is a, c, g, or t
  misc_feature (253)..(253): n is a, c, g, or t
  misc_feature (261)..(261): n is a, c, g, or t
  misc_feature (271)..(271): n is a, c, g, or t
  misc_feature (276)..(276): n is a, c, g, or t
  misc_feature (298)..(299): n is a, c, g, or t
  misc_feature (322)..(322): n is a, c, g, or t
  misc_feature (343)..(343): n is a, c, g, or t
  misc_feature (349)..(349): n is a, c, g, or t
  misc_feature (355)..(355): n is a, c, g, or t
  misc_feature (361)..(361): n is a, c, g, or t
  misc_feature (367)..(367): n is a, c, g, or t
  misc_feature (374)..(374): n is a, c, g, or t
  misc_feature (377)..(377): n is a, c, g, or t
  misc_feature (390)..(390): n is a, c, g, or t
  misc_feature (435)..(435): n is a, c, g, or t
  misc_feature (453)..(453): n is a, c, g, or t
  misc_feature (481)..(481): n is a, c, g, or t
  misc_feature (587)..(587): n is a, c, g, or t
  misc_feature (618)..(620): n is a, c, g, or t
  misc_feature (833)..(833): n is a, c, g, or t
  misc_feature (881)..(881): n is a, c, g, or t
gcaggcggcgggcaaggacggcgggcaaagcgcanacntccccgctcgttggcccgggtatcccagcgcggacccacgcganacgctgacgccccgacgccgatacggccganccaaataaagggganggcccgaganggagaagggananagtgggagtttcccagcccgcanaactttcgaagttgaaaanaaaacccctggaacgtgcgctcagcantgggattttctggactcaangangactctgaanaatgtcancatgcgccanggcantgtgggcatgcagccaaaaaannagcgctggagcatcccagctganggcaggcatctgatggtccanaaaaanccccancagtanagccancgcaacngcnattctgctaaccntgaggaacaatgccgccgaagctggtcctctgactccaaaaaatnagtcatctcctctgagtnagggaaaacctaataccgagtggtgctnataggggaacaggagggtgggcaagtccactctggccaacatctttgcaggtgtgcatgacagcatggacagcgactgcgaggtgctgggagaagatacatatgancgaaccctgatggttgatggggaaagtgcannntatatactcctggatatgtgggaaaataagggggaaaatgaatggctccatgaccactgcatgcaggtcgggggacgcatacctgattgtctactcaatcacagaccgagcgagcttcgagaaggcatctgagctgcgaatccagctccgcaggccccggcagacagaggacattcccataatttttggttggcaacaaaagtgacttagtgnggtgccgagaagtgtctgtatcagaagggagagctgtgcagtggtgtntgactgcaattcatcgagactc

SEQ ID NO: 631046 - DNA, 925 bp, Homo sapiens
  misc_feature (211)..(211): n is a, c, g, or t
cttctctcctcactcacccttcctggtgctttgggctctccttccttctcagacaagatgtcttatcagaaaaagcagcccacccctcagcccccagtggactgcgtgaagacctctggcggcggtggctggtggcggcggcggcggcggtggtggctgctggcttcttcggcggtcggcggctcatggcggctggtagcagctggttctnggctgcaggctactcctggctggctggtggcatactctggcggcggctgctgtgcggtggctcctccggctggcggtggaggctggtggcgcagccaattggaagtgctagcgggaatgcggtagctcacttgatgagagaagcatgtcaaacgatacgtccctgagaatgcgcaggcatggcatcgcatcgcaggacagagagagggcttcatgggcaaggttgacttccacatgccagagatgcagacgtcctgcgcacacagtgacatgcatatcattcgctccaagtgttgggtagagatcgaatcctatccaagcgaatcgcttggcctcccctgcattgcatttcatcgcatggcatggaagtgtgagtggcattgatcacaatccaggtgaagtgaccgggcatgcgggaacattggcgtgcattccattcacaggagaaggaagaggcagggaattatcatcaaagggccacaaaggcagtggtaccaagagatagaaacaacaaagagtaagaaagaaaggccgtaagacaaaacgcagagcaagagatcccatccgagagggagccgcgcacgcaaggaagtagaagaagacacaagaaagagcaggcgacacaccgagacagagcatcgaagaaaattcgcagcgattaacagcaaaggacagagaaggaacaacaagagagagagcagagctccaagggcaa

SEQ ID NO: 631047 - DNA, 110 bp, Homo sapiens
cgcggtaattacatactccagaaagagcctctgctcacactggctagaacaacaacaacaacaaagaaaacccacaaacaaacctggagaaaatatatctaaactctctg

SEQ ID NO: 631048 - DNA, 950 bp, Homo sapiens
cttagcgcctatttgtgatcccgcttttgtccatattgttcttgcccgccaaaatccggtcacaatccccgtggggggccacaactatgctggttaaccgacacagcggcttttcccccctctgccaatttctcgtctcccgcccgctctcatggtggtggcgccgccccccggcgcgccactttaatagggtgttctccggtctgcgccgccctggagattcatgtctcctgttacgcaaaggcgcgcacaactgggcaggtgtgttctccgcgctggtcgtcgatgaacggtgcgtccacacgacacgattgttttctgtgtgcccactctccgcgttgcttccgaccaaagggcgtcgtcattctcccccactataaaaggagcctcctcttccccggggtgtgccccgcttatttttccgcctccccaccctttagggcctaatgcttctcgcccaatcgccttttggctccttgtctcataattctcctctggcgcgtgaaaataacactgtgtcttctcccccacaaccgcatgtttcgcggcttattccctgcgaatgtccccccgcccgttttctcgggggacactccctcggagtcgctgggcgcccccccacgggtaaacacctgctctcttcatctcgtacggacccgatctacatttttggtgtacacccatacaatttccagatctgtccacattaccggataaaacacacgttctcgtttgcatccttagaaatcccttaataatattcgacaagccccccccccatacccctgtccggtccaaatatggaaagccccccccccccttcccccaccttctggtggaccccccaggaaccaattattgtctcctcaccacaaaaagagaatgaatctctagaccccccccctccttcggttctaccccaccccggcgcccccacttctcccacaaac

SEQ ID NO: 631049 - DNA, 890 bp, Homo sapiens
cagagttgtctaagtgccaaacgggtgtgtattcccccagtaagttgttaccccaccttaaggatttccattctctaattatacatttgcacccctaacaaaatcttggggtttagaattccccaactgtttgaacacacgtccttacgaaggtttgatgtccttcttccctaatgagaaattgtcctcgcaagaagttcttgtttcccagaatcccccctcagggcggtatgtatgtcatcatgactacagttctctcccccccaggtgaaaaaatggtccttcactagagatgtctccacgccggaagtactttacatcagacacatacagagtgcagaccttaaacatatataataattgtcgcaacatgaggaatcacccacaattactgtgtatcgccactgcctccggatatatagtacaagacacccttagttctcaatctttctcccgcatgatagagcgctcccatacctccttttaattattatcccgagatatatctctctggactattcactgtgcaagctttttcctcctatttgttagccccctctcgaagcccgagttcctctctctcgcccctatatctgtccccctcttgcgaccacaccacctttttcatgcctatccgccccacataatcatagcaccaatcgattgttctatcagagtacttacttacccccatcccatgaccttcatactgtagcgagtacgtgcgctacccaccagttaccaactccaagggagttctaagcgcacccacccgaataaataatatagagatggggtctggatatggtcaatacaccatactcaatctcgcctctccatcttaaacgcccttcttggaaagatcaacagtattccccccccacaaaaca

SEQ ID NO: 631050 - DNA, 366 bp, Homo sapiens
agtccgggtcgcatttgtattgcgtgcctagacagtctcttacaatacttagtcatttagatattatattattagtatctttcttattgatttgtaactgcttttgatatactaaagaaagcatgggctgggtgcggtggcttacgcctgtaatcccagcattttgggaggccttggtgggcggatcacgaggtcaggagatcaagaccatcctggttaacatggtgaaagcctgtctctactaaaaatacaaaaatattagccgggtgtgatgcagggcgcctatagtcccagatactcggaaggctgaggcaggagattggcgtgaacccgggaggtggagcttgaatgttgagccgagattgc

SEQ ID NO: 631051 - DNA, 394 bp, Homo sapiens
aggctgcgtcttgactgaagtgctaagtgttacagacatcgaccacaatgccaaggcgaatggggacaatgaaatccatggctgagccctaagggcaggtgcagaggatccagcatgttattctgaaaccccagaatactccgcagctaccgggtggacagagcctggatccctgaatgtcttcatggaacagaacattctcctcactccagtctgtttgaaccagaatatgacctgggcaagaaataagccttaattatatttgaccatattatttctggtgatatttctatggctgtaagtccatgttgagggggccccgggattctgtaaagcctcttctattaaaaaaaaatgcccaaggaaaaaaaaaaaaccggcctctctggcctca

SEQ ID NO: 631052 - DNA, 393 bp, Homo sapiens
cagtgctacaaacgcgcacgaattcttgcaggttggcaaaaagcagcctgcatctggatgtactatatgatgttatgaaaagtaaaaaaccatagaacatggcaaaagatacacgaaccaattatgttgacatactaggaaacttagcgtggatcttcgcaagagaccactaggcaaaggaggggttataccagtataagaacatttgtcaacaggtgaacataaaatctctggaggatgttgaaagggcatatttgaaaatggcagaggaaaaaactgaagctgctaaagaagaatctcagcagatggtcttagatatagaggatctagatcatattcaaactcctgagagtgtactcctaagtgctgtaagtggtgaaagacactcaggat

SEQ ID NO: 631053 - DNA, 704 bp, Homo sapiens
  misc_feature (367)..(367): n is a, c, g, or t
  misc_feature (549)..(549): n is a, c, g, or t
  misc_feature (588)..(588): n is a, c, g, or t
ataggatgaatctgaacatctctccatctagagcccaatgaaggaagcttcaaatgagaacatgatggaatcagtaaccattcaatcttttgtcctaggatggaaaaaaatgttaaaggtttaggacacacctaatagtatgtcctttgaatgggaagtgttcttaataggataaaaactggtatttgcctctccccagagtactttttttgttttttcatagagacggggtcttgctatgttgtccaggctggccttgagctcctgggctcaagcaatcctcccacctcagcctccccagtactgggactgtaggtactcaccactgcatctggcctttctttgttttattaacatatttagtttngttattattggtatgttttagagccaagactttagttccagtgggataagaaggcatagaatgttttctggttcccagtccataaagaatgacttttccaagagttctagatgtttgattttctaattaatacttatcagatctacaaaaatcattattattttaaaagagttatttgagtntctttctttctttttttttttttcggaaagggagtctcnctctgtccccaggctggaagtcgcaggggggcaacctcggctcagtgaacctcggctccaaggtccaaggtgatctcctggcctaagctcccagagtagctgggataacaggcgtc

SEQ ID NO: 631054 - DNA, 100 bp, Homo sapiens
ctagtctgactcaatggtaacttgctgtatttgaatttttatagatgtatatacagggtgggggaaatgggcggttctcattaaacgtcaccatttcatg

SEQ ID NO: 631055 - DNA, 262 bp, Homo sapiens
  misc_feature (82)..(82): n is a, c, g, or t
ttccccgtcccgccacagcttctccctcgtcccttcacagcctgctccttcctgttccacgcagcttccactaactgcccgngagtagactgactgcgtccgcccacggcctagtccgcagttgcctgtccttgctgcctagcaccacgtctaccccgtggggccagccctttcccccgctcccgatcagctcgcgccgtcttctagagctttgttaatcacgccccggagggtcttctcagtgaaccttctctgagcctgt

SEQ ID NO: 631056 - DNA, 679 bp, Homo sapiens
gagggaattgggcctgtgccctggtgccagtccatgtgctcgctggctggctccattgccctgtgtcacagtgatgcctgttctgtcccccgggcagctggtgtgcctccacgccctgtgggtgccctggtgaccagtgctggtccagcgaaggagtctactccagcgaaggccagagctttgcgtgtgctccgatgtggcgctgtcctgggtacttgctgtgatggagtgggacatatgatgatgcagcagagtgccaagttacttgagcccaagcatgagagagtgccccgagatgattgagcgagctcccacggtggtacctagaccagagtttcggtggcaatgggattctcagtaagtccctctagaaggctcggagtgacgcatgaggcaagaaagcgttgacatgcatcaatgggtaccagggcttgcctggtatggaccgggagaagaattgaacatttacctatgtcctttggggcatggctccctacggtctttgcgatgagcaaaccgagcgaggggctcctaccccgcagtgggtgttccgagcttctaccggttgcctagggtaagggattgcttcacttacacgaatgaaatctgtgctaacagtgctcttggatcgcgcaaggggcatatgacgaaagggatatgataccttaaaggagggtag

SEQ ID NO: 631057 - DNA, 473 bp, Homo sapiens
gactacgcggctgtgccgtgaacaggtgttctggtctctctttgatgtcagagtggaatgacctgaggctaaggtgtttttgttaacttgaaactgacgtgcaggccgctgatggcttgtggagacctgcacctcgtcatttcccatctggctggggttgattgctgactgctgagggacaccagggggtcagaggtggaggctgtggggcatgtgcttgcctgagttcgtggctgtctcctgtgtcaggaaacaggtgctggtgcttatttttctttcccagggtccacagaggcccaggagagaagcctggttgctgccctctgtctcgtagcccccctttcacagagctgggttatttggggtagagatcctctgtctgtgccggtccacccagcttggtttctttggggtaggagcaccaggaaaggctcccgtggctcttgggagctcctagccgcgtagtcagatcg

SEQ ID NO: 631058 - DNA, 232 bp, Homo sapiens
caactaacctcagggtcaagagattctcctggcctcagcctcccgaggagctggggactacaggcaactggccaccaggcccagctaattttttggtattttaagtagagacgggttttcaccggggtaagccaggagggtctctatctccggacctcgtgatccacccgcctcggcctcccaaggtgcggggattacggggggggggcatcgataaacacggggtaccgag

SEQ ID NO: 631059 - DNA, 867 bp, Homo sapiens
gcgccaggacgtgggcgtgcatgatgcccgagctgggtctgagctcgagccaggcgtcgcccggagagattcggagatgcaggcggctcggatggccgctaggcttggggcgtgcacgctgctgatggttgcggggagcggagatgctcgtcggtctcactggttggctcctgtgggctaaccccggcccggtccctgcccggagagcccatatgcctggtgggatgcctggcatctagacttgagacttcttggacaagtcaatgattccacactcccgtctgacgcatcgtgaaccaagtgaaaaaaacctgagccaagggcggaatctaatgtccttttgctgtgggaatgttcaaaggaccatgctcaccgaacagaatcatggtgttcccatgacccgtccgtgctcaacgaagcacgcagacacagtttcttaaagagctgagtggatgcctgtgtccctgtttcttcgacggaagtgaatctgaatcccgctcctagatgaagtgactgctcttggagatggtgtgacgtgatgagccacttggtagggcctcaaggagctgcggggcctttggtctgcaagtgcccagtgagctgggtggtgtgggcctttgcaacagccagtacgcccgttgtggtggagatcgtgggcatgcatggaccttgcgcgtgtgcattaccctgtggggcccatcagagcattggtttcaaagtgcattctgctcttttggtacaaaggccagaaagaaaaatacctccccaaggctggcatctgggggagactgtggcgcttttctgtctaaccgagcctccaagcgggttcacaatgagctccatcaaactctggtggggccacccctt

SEQ ID NO: 631060 - DNA, 197 bp, Homo sapiens
  misc_feature (69)..(69): n is a, c, g, or t
  misc_feature (75)..(75): n is a, c, g, or t
  misc_feature (119)..(119): n is a, c, g, or t
  misc_feature (162)..(162): n is a, c, g, or t
  misc_feature (189)..(189): n is a, c, g, or t
  misc_feature (192)..(192): n is a, c, g, or t
ggaaggccccccattaacctttaaagttacaaatgttaaaaaaagttatgtgcctctccttcccaaaantgttangtgtgtagctattcttacaaatgaggggaggggagacggtgganctgtggaggctcggagagccagaccagggcatttccctccacnaccagcgggaactgcatggacctctcnccnagacc

SEQ ID NO: 631061 - DNA, 896 bp, Homo sapiens
tcccagttcacaacggttgaacaatcgggaacaaacaatcgtctgccgtgcacacacacaacagccggaattacacaacattttatccctgccccacccgttgaaaaccggtgtccattgaacccgtggtccatcagtgccccttcattacttcctaggaacagagtacgttctttctaactttcattaccccctgctccccactatccatagaccttcctctttgaacaacgctgctcgcctaataatgcccctccttattttcctgtcaactgatgtttcctccgcgccaggcctccccttttcttccccgcacacaggggggttgcaccaccgttcccttccctcccccactagttcaccgtctctcctcaccagttggggaccccaccacacttttaaaaaaagacaagagagggacccatcttccaccttgattgacaaaataactcaaataactttcgtggaacatctcccgtgccccccgcatctgtcaatgtttcgtgacacccactcatttatttgctctcattagtcaccactcactcacacaccataataacagagcgcaggagatagaaaaaaatataatattttcatcccgcctctttgtattactcgacccatcatagaggaattttctagagaatctcatatgcgactaccttctcctcatgattttgagtacaatattgagacttattctatacccactcgtacaaaattaggatcccacctccaacaacacctctttcaccaagcattcccacgatctaatcttttgtcttttaacaaacaccacaaatttttttatattaatatatacctagaagcagagaatttaagaaaaaaaatgctaagaaaattgttgttttaaaaaaacccccaacataaca

SEQ ID NO: 631062 - DNA, 319 bp, Homo sapiens
ccaatgatatgtaagatgttattgtagcttccgggatggaaacttctctgccagcttgtgggttgggcaaggacgacactccgggccctaccggcggaagctctgctcctgtcgtgcgtggaccacgcagcaaatggccttggaggctgctggcagccatcttgtgaccatgaggcaagtcagcgcgggccgaagccgacgacgcgaagacaatgaggagagggagaaagagccgatctttggtgtgtattggctgtgacgtgctgccgcctctctggagaccgggttcattatacttttcctggtatcttaaaaaaaa

SEQ ID NO: 631063 - DNA, 145 bp, Homo sapiens
ccgaaagtacagatcatggcctgagtatcgtactcctcggtttctctcaatcgtgtagtgcaactgaaattcgggcatcaggcctctccaaaaaatagtcatacttcaacgccttcttcactttccacagctacaataggcggct

SEQ ID NO: 631064 - DNA, 183 bp, Homo sapiens
gatcgagcgcgggcccgaattctaattacgatcccggaagcagcccctttccacggagcccagattcctttaatgggagaatggtattgagaaaccaggatctaggggctaggtgttgttttgccgttgttctcagcactcagctgggaaaggtgtgtgttgtgggcatgtgtatagtgtgtg

SEQ ID NO: 631065 - DNA, 252 bp, Homo sapiens
gaggatcccgggtgggagtacaggaataccttaggaaatctagccgtattcctacttaaggaatgaaccccatacaccctacctctcacaccctacctctaaacacaatcattctgcatgttcaggcgacacctcctcagtccatcagagtaccacagtttatcccccctcctagactcactccacgtccaagactttcttccacgggttcgagcctaagctcgtgtggccctgaattaggccttccgtagt

SEQ ID NO: 631066 - DNA, 295 bp, Homo sapiens
  misc_feature (52)..(53): n is a, c, g, or t
tttgggggggggggggggggagggggggccccccccccaattcccccttttnngcccccctttttttaaaaaggggggggttttttttttcccccccccccggcccttccgggagaactttttttaaatttgggggggggggggggggggggggaaaattttccccttttttctccccgggcccggaaaaatttttcccctttttttttcccggggggggggggggggggggggttttttttgggggttgttccccccctttgggggggggggttttttttttttttttttttta

SEQ ID NO: 631067 - DNA, 353 bp, Homo sapiens
actgtgggcataccagaagtgcataaaagcagtagtgaaggaagaaaaggtttaaaaaggaaaccaaaaaagagttggatcaagaaacttaatgtggaaacacaagatgaaaccggaaaatcatgaacaggtacagttcgggcaatctatgctccaaacaaggactggaacgaattgtcgctgcatggacgcagtgtgcttgttctctggccattccataactggcattttatgtggcccaatatttttagtgtaacccgtggttacagaaattaagaccttggacctttttctcattaattgggcactttgtgtattatacaagggactgttcactgctgtactggtttgca

SEQ ID NO: 631068 - DNA, 211 bp, Homo sapiens
  misc_feature (68)..(68): n is a, c, g, or t
  misc_feature (115)..(115): n is a, c, g, or t
  misc_feature (187)..(187): n is a, c, g, or t
caagcatcaaaactaggctcagatatagtagagattttggaattatcagagcagaaacttaaatatgnttaatatgttaagggctttaatggaaaaagtagacaacgtgcaagancagacagagtaatgtaagaagagagaccaaaactctaagaaagaaaagataataccagaaataaatataacngaaatgaatgcctttggtggggtc

SEQ ID NO: 631069 - DNA, 626 bp, Homo sapiens
  misc_feature (29)..(29): n is a, c, g, or t
  misc_feature (86)..(86): n is a, c, g, or t
gtacccacgaacacactcgcgttttgggngcttttcacaagacacacccccccccacagtgagagcgcacttatattttagagagnggcgcaaccccctctacccaccattttggaccccaccaccaggagaaaatatgggcgccccccttttgcacactcgggatataaataggtggcgcccacatctctcgaggagggcggccgggagatttccctctcttctctgtgcgcgcttgggtggagcccacaaagagtgaaaagaatgtcccagaggggacacccaccatttggtgacacatcaccgctccggagagagcactatatgttggcacactacacactccgccacagtatcacacgcgccttttcgaggaaagtcgcccacccaagaacacacatcgtgtctgtaacacacctcgttcccccctgctttacgggaacgtccacgatccggtgacaatcgtcacacacactgggcgagagtgccggcctctctgagccagaccgtgcgcttcaacgtgctcaaggtcaccaaggctgccggcccccagaaccccgttcccgaaattttgaggctggacatcggccccctcccccccatgaaataaagttattttctcattc

SEQ ID NO: 631070 - DNA, 171 bp, Homo sapiens
atggtgagtgccagtgacaggaagctcgtctgaggagcaggagaatgccgtagttccatgcagctctggatggttggggaggtcgaccatgggaccaggataccctcttgtcctggaagaggaagctggggtgttgtaggagtctgtcgtggtagtcggggtttgatcctc

SEQ ID NO: 631071 - DNA, 791 bp, Homo sapiens
ggtgtggcgcccgcggcacggaagctgggttgagcgctgcgtgctttgcgtccgcggaaagtgtgcctgttatggcggggggtgggcaccgtcggctcgcacgtgtttttaggtacgcgcttggggcgcgatccacgcgcctggttgtgtaggcgcgcgtctggcgtgcgcgctcgcatgttcagttccgcgccgcttatggatgtatatagttggcacgtgcgtcgtgttggcggcactacgcagcaccttgtgctggtgtgtcggaggcgtccgcttgacggctctaattgactgcgcacatctatttgagagagggcggcttcctcttcgttgcggcgcccatctgttgacgtcgtccgctgcgactctgcgcttacatgtctgtcgtgttgacgcctttcttggctcactccactgttctgtctcgctcgcattgttgatctctcgcacatgctcgcgcccgaagcgctgcgatatatattttttgtttcccgccctcgtattgtgccctccttctctctctctcgttttgtgtggcgtctgtctcctacgctcgcgcgtgcgcccgctcctctcgcttgtcttatagccacgcgagttcgtggggcggagccagccccactgtaaggtgaaccctctcttttcccactccatttgcgaccacaatatgcacatcccgcttttaaatgttccactcccactctctttttctctcttatactcctcatttattctcgcgctctcattttgaaacccacaaaatattccataatgggcccacatataca

SEQ ID NO: 631072 - DNA, 245 bp, Homo sapiens
  misc_feature (60)..(60): n is a, c, g, or t
  misc_feature (151)..(151): n is a, c, g, or t
  misc_feature (161)..(161): n is a, c, g, or t
  misc_feature (204)..(204): n is a, c, g, or t
  misc_feature (221)..(221): n is a, c, g, or t
  misc_feature (231)..(231): n is a, c, g, or t
aatagcgacgacatacgactaccctactcgtactcactgactatgttcccatccaccaantaacataaaaataaaatgacaattcgaacacacaaaacaaataaaactacttcccacaaataattgtattatcgacactaactcctacctnataacaccangccctctcgtccccttaaactagagaactttagtttaacacangaccaacgagccttcanaagctctaangtaagtacaacagt

SEQ ID NO: 631073 - DNA, 1086 bp, Homo sapiens
ggagggccccacccggggtgggtgggaaggctgatgatctgtctccagccccttccttctgcccacccatcgttcttccctctgggacaactggacaggatctgggagccagcagcgtggatgcttgtgcgctaggacatgagacacctccaggctgttgtgctggaggagcttgggtgggagcccctaggctgacatcgggtccaattaacaaacaacagtggagccaaagaaataataaacaaacacaacaagagggggaccgcggccaaagaagactatcctctcgggggagcgtcaagagccataaacagccgcaccgcgggtaatttatgtagcaacggggcgctcctacatatggggttcgcataaatcagcaaggacctggccggggctgttccccaggctgtgccggggaccccgcggaacgggggcgctccttaggtagaaggagaaactttgattcgcgtgaggggggtggacaattacttttgggcacagcctaacgctcacgtaaatcttaagagagctctatatggtgtaaagaaattaaaatttcttaaccgtgctggttaaaaggggggtctacccttacgatggcctaaattgtatggctatggatagaaaaagtggcggtgaccggaggtctggatttaattgaaccattctttcttaccaccggggacgaaggtggaaaaacgtggtaatcatcaccccgaatgaggggcaagcagacagaaacgcctgaaacgcaggcagcataacatacctgatactacagcccgtaataggctccctatcccatacgccaacggcaggtagctatacgcatcagaaacacataggacgagtaaacattcgacacgcagaccgtacggcgccagaacagactacaaacctgaggccaagcaatgactagctacgccagggttaaaagaaagaaggcgatagggacgacaggaaggaccagccaggagccagagggcacaaggaggcgcgaaccagaaaaggggaagaaaagcgacaagacccagggaggacaagaacagagaaagacggagagagaaacacacaacagaagagaac

SEQ ID NO: 631074 - DNA, 260 bp, Homo sapiens
cccgctagcccgacagaaatggggaggcccaaactgggatcagcctccccgttaccacacactcccacagtgggggtgcccgggctgggtcccactggggaagctcaaggcagccctggcctttccctcattctccacccagtcaggcccctgcgtggttccagctgcggcccccttttcctcttgcacccctgaggcaactgaggaccctctgcgggcacagctgtgatatcccagcgtcctggggatgtggctcctct

SEQ ID NO: 631075 - DNA, 542 bp, Homo sapiens
agatgagaagctggtagctacgagtcacttatcacatttgttgggtgggaacaaatctgtgccccagttattaactgatgtgtggcgcgtttattctctttcaaagttcacatgtgctgatgaccacttgcggacgttattctctcaaccaagacactctgcagagccaatccaaggagtgctgggtctaaggctctgataatcagctgggaaggagtccataggggtcttaactccacaaccactcacagtgatctcgatcctggagctgtcctgggaagggaacctcagggctacatgtgcgctcttcccatgcaggaaaaatcaggctggaaaagaacgggcaattggccagggactgaagctgaacatctcccaactgcacaaattaccgtgtgagttatgtaagctacttaatgttgccctgcctctgcttccacacttgccaaatgagactacctgacagggtgttgtgaggattaaaggagtgacacccaccaaagctcataacacagcactcagaacgttttaaattctccata

SEQ ID NO: 631076 - DNA, 383 bp, Homo sapiens
ctgaggtctgtgcagatgttgcagacaaattcagaatcaatgaagctcgtgaagaatgagctggtgtgggcttggaagagagaagcagcgaagtgttagagctctgtctgagtgctaaccagacacgccgtgacctcgtgacatgcctttcttagaaaactcgttgtctgctcccttccctcgtcccttccctccccgacagttcacataacagctgcatcattgaccgcacagcgccatctctccctgagaataaagccgatagccaccctcctccggctccgagcctgcttctgccacacctcgctctcagttctctccacatttccatagagaccgtgtggtttttgctcacccgggccccccgtcttcctccctgtccc

SEQ ID NO: 631077 - DNA, 820 bp, Homo sapiens
ctggggccgtccgaacaggggccgcccaacaggggacgcccaacatgggcccgccccaactatagatccgtcttcccaggtgtgtggaagcgggaaacacctttatgcgttaattccacccatgcgcccatctggggaacttgggcacgcctattcgtgagtgccctttcctggaaaggtgttttgtatctggaaagactagaatccaagtattggataactcatggttcagccaaatggctatcatgaacgtaggaaacattgatttttcttgtgttagagtcatgggcctctacatgcaccttttccagagtggtcctcttctgcaggccctttgtagtccctttccaaagctgcctcccaccacccctgctcctctggcctcagtgcacagtggccccagcctcggccaggcactgctctgctcagcgctccaccgcccaccacccctcctgcttcccacgagcctgacccatgttccgcccacatggcaatcagggctagcgcacttccctgtcacacggtccccaggcgctgtcctgtcttgtcccattattgatcagtgtatttaactctagggtgttcagctccaacctcgctgagttggtgcagctccaggtcattcctggggtgggaatcggatcatccctgactcagcttcttaccttaattttatttgcagaggattctttgttctcaaaatgctctcgcatttggacacacattcacatgtcgatatttgcataggagtcattttcagtaggaataacatttttaatgtgtggttttacggttcaataactacaggatgattatgaga

SEQ ID NO: 631078 - DNA, 145 bp, Homo sapiens
gtcactatagagagggttcacatgttggcagagctggtccactcctgaccgtcagatgatccacccacctcagcctcctaaagtgctgagattagcggtatgagccaccacgcccagcacctacttaactctgtctggggcatct

SEQ ID NO: 631079 - DNA, 226 bp, Homo sapiens
aggccttttatgatgttgtgggaaaaactgttggaaaaacagactatattcctctcctggatgtttatgaaaaaaccgggaactcaaagtcaaaaaagaaaccgtgctcagaaactagccagattgaagatactcccttttttaaaccaacactcctagccaatggtggtcatggagtaaaagggaacgatactacagggtttcccactgaattccttgaaagaga

SEQ ID NO: 631080 - DNA, 846 bp, Homo sapiens
  misc_feature (602)..(602): n is a, c, g, or t
gcacaaagggatgatttatgattaaggcaggatgcaccaggacagtgggagattcatcatgctatcagaaaagcgcataatttatgaatgtaattaagacttttggtgtcatatgttggattgatcacatgatttgcaaatatttctctcaatggtgggtggtcttataactatctgtggaggtgtcttttgaagaacaaaagtttttcatttggatgtagtccaatttataatatggtataagtggtggctggtacttttggtgccatatccaagaaaccatggctttctccaatatcaagaagatatataaccttggtttgtttcttagaatttgagagcttaagttaaatccatttggagtaaattttatatatgatgtgaaatagggaaaaaatactataaatttggtaatgtgatcatatccgtgtaatctagctaaatttcacttagtagatctatttaatagtaattggggaaaatttcttctaaagtagacagtcaatgttcactgcaagttgattgcagttaatgtttcattggaaatcgtgggggtctcaattacttgcaaggtgcatgggtaggaccctatacatgatggnagagagtgagagggaacactagccggaccgagctaaggggaagatacagctccaagctgagaaggaagggtcgggaacaattatacctcgtacctgagcaccacagccaggaatgggggaatcataagagcacaacgggaaaaaacagacggaaagagggcagcagcgaaaaggacacacacagagacgtggaaaaagacgagtaaaaaacacggcggcgccgccccaaaccacccacacccgc

SEQ ID NO: 631081 - DNA, 418 bp, Homo sapiens
  misc_feature (78)..(79): n is a, c, g, or t
  misc_feature (384)..(384): n is a, c, g, or t
gagtttaatggttagaagttattatgggcctagcatggtggctcaagctataatcccagcactttgggaggcaagccnnagcaggaggattgtttgagcccaggagtttgagataagcctaggcaacacagtgagacctcgcttctgcaaaaatttgaaacattagctgggtgtggtggtgcacgcctgtagtctcagctactctagagactgaggtgggaagatcacttgagcccagaaggtcaagctacagcagtgagctgtatttgcactacttgcacttcagcctcggcaagaagggcaagaccgttttctcaaggaaggaaaaaaaaagttgtttaattgtagtttattttcaagttggacttggaatgtttattagtnccctggattaattatggatggataattgattagc

SEQ ID NO: 631082 - DNA, 1648 bp, Homo sapiens
  misc_feature (492)..(492): n is a, c, g, or t
  misc_feature (1117)..(1118): n is a, c, g, or t
gtcgcttcaacgcgagtggggggttgtcttctgggcggggcgcgcggtgttattttctttgggcgctcccttttcaggtggctggttttgataggagggcagcctgcatgagtggtgtgaggctgcctttctggggtcgctctgtgtagtatgaggggttgtttctacgagataaggagtgtgtccttgtccgctcacggaggggggcttgcctccgcaggactacgcgacacgagaagggggggaggagggattagagaggctgggttgtgttggctgtccgcgggggtgctttgtggtggggctctggttgttcaggatacgagggaggggcaaggataattatttcggtcgttcgtcccacaaggtggaccaccagtgattgagaggggggccccctcgtcgctcttgttccgcccaagcaatgattgataggtcgctcgcgggtataggtgttgtcggtgtccgagagagggtgtcgaccaacaccangtttgatcggttgggggggtgactctgttggacctccgggggggtggccacccaccacggggggtatctccgcgccatcagaggggcatgtgtcgctgtgggcaacagatgggggaatgtcttgcgcaccacggtttgtggggggggttcttccacacaatgtggccgcgcaacagggagcttcgttgcgtgcgcagagggagagcttttgtttttgggcgcacaagtgcccctgtggggttttgtgcaggggcgcacaattcctcacacacacaggggtggttgtgtgccccccccctcccacggggaagagaggtggatacttgtgtgtgcacagcccgcgcttttacacagacggtggcgttgtcgcacacacacgcccctcgggtatttgtccgcggggggtctcacaacccaccggtgacgccaccccgtggtggcccgctgtgggggggtctctctctctcgccacacacgcaatgtgtgtgcccgcagaggaggctacctccccgcttctcacacgcgacatgagatggggcgcacacacgctctctcgctgtggtatattgaagaacccttctctctatatgggggtctcccccacacattgtggggatatctcccnncccgtgtgagaagagagtggaactctctcacacatgtggcaccatgtcgcccccctctccggggagaattcgcgcgcgctctctctctctcccccgctgtggagatagctgagagcgcgccttttctgtgtgagacaccctgtgtgcgcacacacagagagtatatgtgagaagatataggctctctccacagagaggcgcttgggggcggtctgaatgtctctctcacaggggcgccacaggtttgtccaccacagagccctgtgtgttgtgttgttttatatagctcggtgtttcctggagattttcactagggatatgttctggtgtttcccctaacacgggccccctctcccccgcggaatagcgccccccccaggccctcagaccttctcttcttggccctctcctccaggcttccctcgccctcgtttctccctaaagctgttaccataatccctttatttccttttgtgccctatgtaaactgggtttataaataacttttaaaaggcacccttataaattta

SEQ ID NO: 631083 - DNA, 2466 bp, Homo sapiens
gctaggtacgaggctgggtgttggggatggcagcctaccctgtggcaacgcgggagtcgcgttgccgcagggggcgcattggggtccagccgtccccagaacgcagatcagaggtagtcggacctttcccgctggcgcgcagcctcagctagggcacacagagtgaacagaaaaagaggatacctctgcgatcccgggtcatctccagatgctagggttatggtttattctagtgggcccaacctctgagaccatccttgaacatcagtagactgtgagttgtacatgggcgagagcagcttcgccaacccctgcaaagtgactctgaagaagatgacaatacctgcttcagtcacacccggaagctgactggtccacgcatggccaaagcatgagaaaactcattgcgggactcattttccttaaaatttggacttataccatagggacttcaactgaccttcctcagactgaagactattcccagtatatacgtcaagtcactgaggtaggaaaaaagttgctacagtcctattattttatggttattataagtataccaggactctaaaaagaacttgtttgtataatgctattctatacaaggtatgtagcccaggaaatgaccaacctgatgtgtgttatgacccatctgagcctcccatgaccacagtttttaagattaaggactgaaacctggtgggggctcataaacgatatgagtaaagtgttagccaaaacaaaagaaaaaggggtgcccaaacaagtcaccttgaagtttgatgcctgtgttgtcattaatagtaataagttaggaataggatgtggttctcttaattaggaaaaaggctatatggcaaaaaaaaaaaaaagtacatttgtcataaattaggactgtatggaaatgaacgtgcatactggtcttgtgtcatttcggctacttggataaaaaatgaaaaggatcccgtccaccttcagaaagggaaaagtggcccttcctgtacaagtggtcagtgtaaccccttagaactagtaataaccaacccccttgatcctcactggaaaaaaggggagcgtgtaaccctaggaattgagggggctggactggatcctcgagtaaatatcatggcttgaggagaagtttataaacgctctcctgagccagtatctcaacccttctacgattaactgaatgtgtcagtaccagaaattccaggaaaaacaagaaatttgtttttacaattagctgagcatgtagcctagtctctcagtttcacttcatgttatgtatgtggaggaactataatgggagatcaatggccatgggaagcctgagaattagtacctacagacccagttcctgatgaatccccagttcaaaagaatcaccctgataacttctgggtcctaaaagcctcaattattagacaatactgtatagcaagagtggggaaggacttcaaccttcctgtgggaagactcaactgccttgagcaaaaactgtataatattactacaaaaacagccacctagtggagttcaaaccacactaagaaaaatccatttagtaaattcccaaagttgcaaaccatgtgaacccacccagagtcccactgggactgggcagcccccactggattatactggatatgtgggcatagagcttacaccaaattaccctaccagtgggcagatagttgtgttattggcactattaaaccatctttcttcctactgcccataaagacaggcaaactcctgggcttccctgtctatgcttcccacaaaaagagaagcatagctataggaaattggaaagataatgaatggccccctgagagaatcatataatattatgggcccgctacttgggcacaagatggctcgcggtgatatgggacccccatttacatgctgaactgaatcatacggttacaagctgtcttagaaataatcactaataagatcggcagagccttgactattctggcccagcaagaaactcagatgagaaatgctgtctatcaaaatagattggctctcgactacttgctagcagctgaaggaggggtctgtgggaaatttaaccttactaattgctgtcccttttaaggacaggaattgtgttggagatgtgagtcttgccaaagctcccggccgaataaagcccttccttaactcgatgtctgaggggttttgtctgtggcttgtcctgctacaatgttagctgtgagtttgtagtatatggcctttattattttgaggcatgttccttctgtgcttagttctttgagagtttttattatgaagggatgctgaattttatgaaatgttttttctgggtctattgagatcgtcatgtgggttttgttcttgattctcttaatgcaaagtatcgtatttgttgatttgcatatgttgagttgtccttgcatctctggtataaaacctacttgattatggtgt

SEQ ID NO: 631084 - DNA, 683 bp, Homo sapiens
agcggaactgtcgcggccgggttgcgggtaggactggacgccaggcagccgcgcagcgcctgaacccgctgcgggccgccggccgcccttcccaccctcgcctctgtgtgtctccagcctcggctttctccgactttcctgctcctctgctgccttcgtctctggtcctcggcgtctcgccgcccgcccagaggagtccccggcccagccgagtgaagccgctttccgctggccgcagcccgccgcgacttcggcacagtttctccctctggctagtctcccaaacggcgctcctcgccccggggaagaccaggctgcgaccgctgaacggcacgatcctctcccaggagcccgtaacgagcgcccgggggccaagccccgggaccaaccccggcggtctcgggcccagcgcgcctgcgcttcgccgcacgcagtctgctcctcgcccgcgtgccggacgtacgcgaacggccctgttggcttgcaggcggtcggaacccgaaccggatcgcatggacccagatgccatgactgcccgaacggcccgcgtgacttgcctcaggtccccgagcctcggtgtccgaggtgcccctacggactgactgtggggggaaaaagggggacatcaggactctgcttttggtgaatcgttgactgcatgaggtcgcctcactcggggctac

SEQ ID NO: 631085 - DNA, 821 bp, Homo sapiens
cgtgacgcgtgggttccagcgcatcgtggagagcgtgaacgtcatcatctcacacctacggcggagggctgagagcggccccatgggcaacatcatgatcgatccatgtcctcggtaccgtgggcttagggtcttggcctccacgggtgggccttcaccctgaagcagtgtagccagagatgtatgtgagccaagattcgaccgccaagggggagggccacgtcagagggcctgccgagccgggccaagacaagtagaggacatgatgaagaagctgtggggtgacaggtacttggacccagccaacggcaagttcagcaagtcagcacaccagacccgaagggcagaagctgccacgacaccttctgccagctgatcctggaccccatcttcaaggatgactccgctgcgactcatgacattacaagaaagacggcgacagcacaactgaccgacgacaaccgggaacatcaacactgggaccagccgacggacaaggacaacgaaggcaaaccacgtgagtgaaggctagtgatgcagccgcatggctggcctgacggcagacgcctagattgcacgatgactcaccataccagctgccactcccctgatgacgagacccaagaagtaccagcaggcggacgctcccggtaacagaggcggacaccccgggaaagacgaaggctggccaatgcggcacattacacaacgcaggagcacccacaaaggaccatccaaaagcatgactcagaaccacaactggtgacaacataccgaaaaaggccagacataggacaaggaacgacgaacaccgagcatgc

SEQ ID NO: 631086 - DNA, 211 bp, Homo sapiens
actgtacctgtcctgaccgacttctgcgtccttactttgccgaccctgactgttctggtaccgtactcccacgcccgtacccttgacgactctcttccactcccttgaccgtttgttgttgactcttgactgtggtgatacactactactcaccacgtctaccgaccacaccttgggaccttgactcacttacccacgccaccacacgcca

SEQ ID NO: 631087 - DNA, 714 bp, Homo sapiens
cggacgcgtgggtgctcagcagatccaagagatatattggcaactttttctagaaaaggcacatgggtatcattcattacattcttgagttttttgggttttgttgttttttttgggaaagcctgggggtttggcccaggcgggatggggggggcaagccacggctcatggcttccccatatcacccggggccaaatagaaggttcacttcccagcacgtggaatagcggggacttacagcttcacagcacacgtgtggggataacaatttatttttggtgtaggagaagggtttttcctcatagtgtggcccagggcgtggctcatcagggcgtcgggtgggacactcagaatgtggtccctcgcgtgccataagattccgaagaggaagcagggcacaagttgtgttaccttgtgctcgccttgcaatagattgcccaacaaggaggtttcataaatccctttttaaaggaatgtggacgttcgcaataaagtgggctagagtgttggggggggcaaagttgcttaaaagccgggatactgtgggaaactcccctccggaaagggggtataccaggcgggtacccgatgacgattaattactgacacctaacggcgagggccgtggggggcacaacacgaaaaaaaaaggcaacaaagcaaagaagcgcgggggcgacaaaatagagaccccagggggcgcaaaagttaaga

SEQ ID NO: 631088 - DNA, 258 bp, Homo sapiens
ggcactgacacggggcctggagctcacggtcctcagtgcagttgctgccctacaccgcctggtgggctggtgggggagacgccgcttcccatggcactgagtgtggcggcggccatgggttttactaacaaaggctgggcagtcttctcggaggaggtgtggtatcattggtcaggggcaggtctggcccatcaccctcactagctccctggccgtgctgcctgagcactgagtacacgtcgtccacacggctgagtt

SEQ ID NO: 631089 - DNA, 292 bp, Homo sapiens
tccatattggtggatggtggatgggtgatggaatgatgagtggatggtgaaggtagatggaatgctgggtggatggtggatgggtagatggaatgatgggtggatggtagatggtggatggcggttgggtaggtgttatgacgagtgatagtggatggtgtatggtggatgggtgcatagtggactgggggactggtggatggcatgatgacgtgggtgagtggatagtggatgatggactgggtacgactggcactgaccaggtgggtagtggctggtccctctcatgtca

SEQ ID NO: 631090 - DNA, 442 bp, Homo sapiens
ataaattcattctttttaatagctgagtagtactccattgtgtaaatgtaccacattttctgtatccattcctctgttgaggggcatctgggtcctttccagattctggctattataaataaggctgctatgaacatagtggagtatgtgtccttcttaccggttgggacatcttctggatatatgcccaggagaggtattgctggatctccggtagtactatgtctaattttctgaggaaccgccagactgatttccagagtggttgtacaagcttgcaatcccaccaacaatggaggagtgctcctctttctccacatccttgccaacatctgctgtcacctgaatttttcatcttagccattctgactggtgtgaggtagaatctcagggttgttttgatttgcatttccctgatgattaaagatgttgaacatttaaa

SEQ ID NO: 631091 - DNA, 1023 bp, Homo sapiens
ggcgagactgaggcggacagtcgatggctgccgtgcggttcgcgggtagccctggtggagtcggctgctgaatctggggtggtcgtccgtgtaccccgggctgatgcgtgcctggcaggtgtccactgctgcactgactcgtgtatcgaggactgggcttaatttgagttagccatatttgctcaagtgatttgagtgcaacttgacaatttggccgccatagtacactacgatgaacaggactgtactagtctgtccagaagtactatcaatttaaggatgcagtcacgaacattgagtgctcgggcgtgtagcgcagctgactccgaccgatgtgtcgtcaggacggcgtccccgagaagtattgggatgctgcgctcgcaaaatgttgactctgccgtagtggcctgcatagtgtgtgccgtgatggctatggtagatccgcggcgtagcggacggtgctgtgttgtgccacagcaatacgcatgtttgtcgctaggcgtcattgcgaaggagaaagaggcgcttgcaccagagaggcggacaccaaagtctcgtattcgcccaggcctcgttttgaggcaccttgctatgagtggcttctcctcacaaggcggcttggctcctggaagggtgataacagggactacttctgggtggtcagggagtgggaaagattgggtccatcagggaaactggaggccacgtctcctcgtgcaggggaaggtccggcctggccccactggtcagaatcagtcttctgggtccactcggaggactccgacgtgttgaactttcctgaaggaacgttggggacggagtgtcgggcgctggccttagtgcctctggggattagagcgctggacatggctgttggcggagcggcggggaaaaaagtagctcggttgatacccccgtttttccaagaattccggcatttttgggaactatgctcttgcatggcacgcctggggctttcttgcttcggcaaggccgtgggcctgttagggggccccgccgggg

SEQ ID NO: 631092 - DNA, 511 bp, Homo sapiens
  misc_feature (31)..(31): n is a, c, g, or t
  misc_feature (69)..(69): n is a, c, g, or t
  misc_feature (106)..(106): n is a, c, g, or t
  misc_feature (117)..(117): n is a, c, g, or t
  misc_feature (119)..(119): n is a, c, g, or t
  misc_feature (142)..(142): n is a, c, g, or t
  misc_feature (157)..(157): n is a, c, g, or t
  misc_feature (228)..(228): n is a, c, g, or t
  misc_feature (236)..(237): n is a, c, g, or t
  misc_feature (261)..(261): n is a, c, g, or t
  misc_feature (265)..(265): n is a, c, g, or t
  misc_feature (283)..(283): n is a, c, g, or t
  misc_feature (285)..(286): n is a, c, g, or t
  misc_feature (288)..(292): n is a, c, g, or t
  misc_feature (312)..(312): n is a, c, g, or t
  misc_feature (327)..(327): n is a, c, g, or t
  misc_feature (400)..(400): n is a, c, g, or t
  misc_feature (402)..(402): n is a, c, g, or t
  misc_feature (426)..(426): n is a, c, g, or t
  misc_feature (442)..(442): n is a, c, g, or t
  misc_feature (495)..(495): n is a, c, g, or t
aaaaaaatatattttctcctaaataaccccntcttcttattttaaaattctaaccataactctcttaancccacccatctttaaccattaacactctttaacaaanctacacacccntnccttaattctcatctcaccaatnctcccaccctcttgncttacagagttgttagttaactccatcctttgccacacgagtcaagtggctcacaacctcctcagggcacnagagaagnnacacactggttgctgtgatgatanccantccccccccccccccccncnncnnnnnccacatttgactgtagcatngcatctgtgccctgntgacatttatgttaaccttcaggtattacttgctgcatatcttgacatatcttgagattctgcatgtcttgtnangagaggggatgtgcatttgtgtgngatgttggatagtcanccacgcccagtttggaccattggaggaacttagaaaaacgcacaaatggggcnataccaacgcttagaa

SEQ ID NO: 631093 - DNA, 95 bp, Homo sapiens
ctagaagattcagcaaagtacttttgtgctcttgggtcgaatttagggagatctttgtactgggggatacggccgtgtacaccgataaactcact

SEQ ID NO: 631094 - DNA, 458 bp, Homo sapiens
  misc_feature (259)..(259): n is a, c, g, or t
  misc_feature (274)..(274): n is a, c, g, or t
  misc_feature (347)..(347): n is a, c, g, or t
  misc_feature (349)..(349): n is a, c, g, or t
  misc_feature (373)..(373): n is a, c, g, or t
  misc_feature (389)..(389): n is a, c, g, or t
  misc_feature (442)..(442): n is a, c, g, or t
gttaagagaagggagtgtgtcctgaagaagcccttcttctgatggttgctgaccagaacgcttttgagcccaggcattggtgagcattaacaatttgggaccgaacttgagaaccctggcctggggcttaatttaagaatggtggccaccttttggcttttctttaagggcaccagaggactcactcacgtgtgcgctgagaagatatccagtgtccctgtgccctcttatatccacaaacacatttgactgtagcatngcatctgtgccctgntgacatttatgttaaccttcaggtattacttgctgcatatcttgacatatcttgagattctgcatgtcttgtnangagaggggatgtgcatttgtgtgngatgttggatagtcanccacgcccagtttggaccattggaggaacttagaaaaacgcacaaatggggcnataccaacgcttagaa

SEQ ID NO: 631095 - DNA, 196 bp, Homo sapiens
ccgctttggtttgcgcggtgtactcgtccttgtccgcccagttgaggccgtcttcggcgcggtccacttgcatgatcttcatgccggggccgccgacgcggatcacgttcggggcctccgccgtgatggtggccgagagcgcatccgggtgattggcggcgagcgcctgcctcacggtttgtttgtcgttgtcgtt

SEQ ID NO: 631096 - DNA, 328 bp, Homo sapiens
tcacgagactctccttgtaattcaagcagtcggtagtggtaatatgtagagggagtatagggctgtgactagtatgttgatgtcctggtaagtagagagagtagatatttagatcaggtaagacgtggttactagacagcagagagttctcccagataggttaatagattgggggtaaggcggaggttagctgaggcttgctacgaattcatcagaaaacgctattcagtgggagctagagtttgaatgtcctctgagatgacggattatgagtgcgagctgctgtggatgtacataggacgggtagccgaggctcgagattctgcta

SEQ ID NO: 631097 - DNA, 127 bp, Homo sapiens
ctggttagctgggggcagaccctcctatggagaggagggtgatgaattagggtttagtcatgtagcttgttcaggtgcgagatagtagtagggtcgtgtgctggagtttaagttagagtagtcggaa

SEQ ID NO: 631098 - DNA, 808 bp, Homo sapiens
gcagctggggctgggaaggcgggcgctgggtggcgctgcggcctgctgcagcgccagggtccacctggtcggctgcacctgtggaggaggaggtggatttcatgtgcttccctgtagactggaagaatctggctcaaaacctgcttgcctctgcatgtggtgcttgatgcttgtgatgtgcatgctgatggcctgccctgagcgcatgtgcttcctgtgctgatgacatgtgcagtggcaatggatttgcagccctgtgcggcatgggcccggctgatggatgcgcgaacccgcggccgcagttcccaggcgttggggcgcagccgccgtgacctgcgtgctgcctggggcgtgtgggtggcggggcctcgcctgcacaaatatgggactgaaggggggctgtggggctggccacaatttcgcgccaaacttgacctgcgcgttcttgctgtaacgagcgggctcggaagtgtcctcccgctgctgtcatggtttggttcgctaaactgcatcgtcgctgtgtccccagaacatgggcatcggcaagaacgggggaccttgccctggccaccgtcagggaatgaattcagatatttccagagaatgaccacaacctctatcagtagaaaggtaaccagaatctgggtgattatggggtacgaagacttgtttctccattcctgagaagaatcgacctttaagggtagacttaatttagtactcagcagagaattcagggaactcacaaggagctcatttcttccgaagtctaatattcttaactttgaacaacggattcaataagtac

SEQ ID NO: 631099 - DNA, 134 bp, Homo sapiens
gcgtagaaaccacagcctgggctagaaaatatccgttttatgcatttatattggggagacaagatctcagtctgtcactcaggctgtagtacaggtgacataatcatggctcacgtgcagcctatgagtgccca

SEQ ID NO: 631100 - DNA, 746 bp, Homo sapiens
gcatcgatgtggccagcctggagccagcatgatgagaacacacaatgtacacacacatgcatgtagacacatcagatggacatagtactaccaaatgtgcaacaaaggaatggacagaacacatgcagatgccccaacactgcaaaggaccaatctacagagggaagaaagaacgggatacggcatggccagaccatgggaaagaatggagattccaaccatcattccccacactcgacatgacaccgagaccgttccactggaataaccaccagaccaaatccgacaagtcagatcatactgaccaatcacccaacaggacaatccagaggacccttgaagacaaagcccaaacaccacgagggaaaagacagattccaacccgacaaaagaggaatatcacccatcgaacacagatgcatagtcataccacgaaaaaagggagaaacaggccagtgtaaagagcatgctggacggtgacttgcaatcacagtcagaccagaacaaggtatgaacgaagcaaaagaaccatacaatcatatcaacccatactacgggcaacgataccaaacaaacacaagagggaccgcacatttgtaaacacaccacgaagaaatgatggaacaccgcaagaacatcacaccaaaacaggacccacagattattcggaatccaaaaacattcaaaggggacccaacggacttacaccggaagaacaaggaaaactcacacaaagagatcatgcc

SEQ ID NO: 631101 - DNA, 826 bp, Homo sapiens
ccttaaaaaaaatttctccttttttaggggaaaaatacaatttttcttaatttggccccaaactcttgtttacacattttcggcttcttcccccgataatacaaacatttgttcccaaggaatccccctgctctccccaactcgggtgtcctaattccacctacaaacaaggtagattatacacgtaacatggtttccaagaaattaaacgaatccacagtttaggttccaggatgccaagatgcacaatcctaaatattccaagctgtgtgaacaccaaacaattttatcaaagttcattacgttgcggtcaacattatgtacattttatataaccgctcaagtattatttcgcaatacacaccatatttggtctaccttatagactgtactcacctaccttttctccctccgttctaaatattttgtatctacatgtcaccactggttccacacatttattttcaccacacccttatttattttacagaacgaagataaacagcacctcttcttacatgtgctactcgctcttcacaagtgttaccacgccgcgggaacccttacacgctcattacttttctcttttacacgatcacacgaagaagataatctcccttgagtttatatttccatcactccaaccttcatcttattaaaacagaatttatgtacgaaatattgaaaccacggtccccattaccaagtactctactattgtcctccctacctgattcctgaaaaactatcatgttatggccatttaaagaaaaagagaaataaatagtacaaaaacaaaataaaacaaaaacaaaacaacatgcac

SEQ ID NO: 631102 - DNA, 453 bp, Homo sapiens
tctagaggatccccccaatcaacatccaaccccatgagaacaggagcgacatagagcttcttcatctttttgtacgcatagtaggtatcatgcacatagtgggtatctaacaggtaattgttaaatgaatggaatataaagaaggtaaacttctgggtcaaacaaaaccattattcagtttttttctcagtgaagtcctttcccctatgattaccgttgctgtctcacatgtgtagagtgcttctaacttttcagatggctttcccgtcctttgtctgacttcatgcttatgtctgcgcaagcagtgcagtcttatgatcccccttggtaacttactagaattcactcagctagtacctggaagaactagaactaaaatgtgtctcctgagtattctgtccccatgatcaggaatattagaagagtagcagaccattcccaagctgattggat

SEQ ID NO: 631103 - DNA, 222 bp, Homo sapiens
gatccacgcaggattcttggaccttttttccacacttgatggaaatgtttgaaaattgctcataataggccgggtgcggtggctcacacctggtaatccccggtactttgggcgaggccgaggcgcagcggatcatgtcacggagatcgatgaccatcctgtgctaacgtggtagaaacccctatcattacctaaaaaaaatacaagaacactagccaggcg

SEQ ID NO: 631104 - DNA, 346 bp, Homo sapiens
gtcggcccgatgtgaactgtgttcacttccagatcagtctgatactctccaacaaaaccaaatacatttcgtatgaggcaacacaactttttttttttggagatggagtctcgctcggtggtccaggtgggagtgcaggggtttaaatccctctagttttaaatgagcactttccatatatctatggaacaattccctattttggtgatgtgccgtgtaaaagtctttaatctcattagctgcgcgtgggggcactggcctgtaatgccagctactggggaggctaaggcaggaaaggagaatcgctggaaccgggaagggggaggttgcagcaattctccggcag

SEQ ID NO: 631105 - DNA, 248 bp, Homo sapiens
agatctcatatctgagttctctcaggaaaacacaagacaaaagacaaacaagagggaacaaaacacaactgttctagaggtcagataccagtcccacatcgagtgcagataatgggctaagtaaccaaggagcaatggagacaaggatgtaaatggggtggagcacgatggctcacacctgtaatctcagcctccaagcagctgggaccacaggtgtgcaccaccacgcctgggcacacattatggag

SEQ ID NO: 631106 - DNA, 365 bp, Homo sapiens
  misc_feature (91)..(91): n is a, c, g, or t
ggtgcctctacctactgtatcctataattaacccattaaatactggaatacacgacaatatagcagtttcggacacagacgacgcagtacngttatccggtgtttcgtggtggggagttgctagttaagatgaccggagttgcggctatgaactgaaccatgggcacggctgaagtccgtagccggacactcctatttgagaagaaccaaatacacgtaacgcagaatggtcagaaacgaggacagcattatctatagccatttgctctgcatctcagtattgcgtccgggtaaaataaaggaagtgatactggttagtacgtgtgtcaccaccgggaaggatagctgagggtgactaagtatgt

SEQ ID NO: 631107 - DNA, 107 bp, Homo sapiens
attgatctggtataatctggcaagaatatacttatcactaataatagactggtgtgtaatcaaggatcaatcagatctctttgagaatgaaagtatagccaaaagat

SEQ ID NO: 631108 - DNA, 278 bp, Homo sapiens
cggttgatttagaggatccccggtacgagcggtctcacagcagtgacaatactggatcctttaactgctaggcactgggaaactccctttatgttcttcacggcccttaccaccaccagaaatttttttttggccttttttttttttggggtgggagggtctccgggtatttttctgctggaggtgtatttttttttcattttttcgcaattgcaatatggggttggggcgtgggggtggccagacggcttctaccgggggttacggagctcgaattc

SEQ ID NO: 631109 - DNA, 313 bp, Homo sapiens
  misc_feature (38)..(38): n is a, c, g, or t
  misc_feature (141)..(141): n is a, c, g, or t
  misc_feature (145)..(145): n is a, c, g, or t
  misc_feature (217)..(217): n is a, c, g, or t
  misc_feature (277)..(277): n is a, c, g, or t
  misc_feature (297)..(297): n is a, c, g, or t
gggcatccctccaaggcctgactccctttcaatacccngaattttttttttggtccacacgttgcctccaggattattcccgtcaggcaaggaggccctcttcctgattttttacagctttacctggggccaactcagggncctnaaagggcccattcccaacagccctaggtttttttttccccgtgaaaccaaaaatgatttggaaaatgggggngaaggaccctcgggaactagggcaaaaacagggctaaaggtatgtggagctgggactgtntttggaatttttatcccaanaaagtttggcaaggga

SEQ ID NO: 631110 - DNA, 994 bp, Homo sapiens
gctcctccgctccgagcaccagcgcggctctgagctgcccaggtccctcccccgccgcagcagcccatttggagggaggaagtaagggaagaggagcggaaggggagccggaccgacgtacccagacagaggccggtgaatgggttgtggtgacccccgccccaccacagacaccacacgcgccgcaggactcccacccacgccgacacgaaaacagccaagagaaggcaacgcaggggcaactacacgcacacaagaacgccacgagcagcaacaagcagagagacaacaacaccagagcggcacacacccacactggcggcggacaaccgggcaccagcatgacacagccagacacaaccacaccaccgccacgtcagacacacgggaacacgcaaagcaggcaaccggcagcgaccacgcggcaggaaacacgggcgatcgaagcgaacgcgaggaagagacaccccgacagccaccgcacacagcgggacgagacacgagtgaccgcgaaccatggggcgccgcgccacggcacgccgaccaaaacaagcgactcagctaccggcgccgagcaacacgacgcgaggccaccggcgcgaacgccagccccaatagagcgcgccacgcacaacagacgcacggactagcaccacgatgcaccacgcagagcatccaaactcacaccgaccaccgaaaggcggagaacgacgagacgcagaaccggaaacgcagcaagaccaagcacaagcggagcaagaccaagtgaacaaacagatccgagcgagtaacaagacacacagggaggaagaccgcacaggagacgcaccgagggacacagaccaccatcgacacggagaggcctgcacagcgcagaacaccaggcagaccaaacgacagaacagccgcacagcgacgagcggccgtcatgacaaaacggacaccgcagccgccgcctgcaccgcgaatgctgccaacaccacagagcgaaaca

SEQ ID NO: 631111 - DNA, 214 bp, Homo sapiens
cccgtgctatcccccttcgtctctatctgcctcttctctacttcccactctgcctctgttttctattccctcttttttttgtttgtttttttaaaaccttgggcccccccggaggggggacctgaccaaactaaaaaaagggggaatggaaatcccgggggcagccgggctcccgggccctcttttaaaaattggtccccgggaaataaggaaa

SEQ ID NO: 631112 - DNA, 133 bp, Homo sapiens
taccatcatcatagctccttccaacatctcatcccccttccaacatctcatgtccctttccaacatctcatgtctgcttccaacaatctcatggcgtaccgttgcaagcatcgtcagtgcgcccctgtccaga

SEQ ID NO: 631113 - DNA, 695 bp, Homo sapiens
gggaggctgaggcaggagaatcgcttgaaacctgggaggcggaggttgcagtgagcagagatcgtgccattacactccagcctgggctacagagtgagactctgtgtcaaaaaaaaaaaatgaacagaaaaggggcttgtgtggtagccaggtaagaaattggaatctctggtggtacagcagctagctggtactggcatgatccacttcccatttccccagcctgacagtgggctgtcctctggaaactccttaccacagtctcttcaattgggataggccagcccgtggatgccagttgactataatcaatgggacattggaacaatgccacctgtgccttctgttgcgaagcagacaccttaacaagaatctggccagatcgagccgaggctgcggctggctctcagcgcctcataactcgccaacaacctacggaggaagcgtcaaggccaggaggaactcacgaacgggctcagcgagcagtggcagcaccaagtcgcgtggcactcacacacgcgaggaggaaaagcacgcggaccgatcgtacagtaaaaacaaacaacgagtcaaaacaccacttacagagtggggagacgaaagagtgagccgagagacgccgcgtgggtgggataccccagaggaataaccatccacgcggaaggagccaatagaggagccacgagaaacgacag

SEQ ID NO: 631114 - DNA, 545 bp, Homo sapiens
  misc_feature (22)..(22): n is a, c, g, or t
  misc_feature (68)..(68): n is a, c, g, or t
  misc_feature (94)..(94): n is a, c, g, or t
  misc_feature (137)..(137): n is a, c, g, or t
  misc_feature (139)..(139): n is a, c, g, or t
  misc_feature (186)..(186): n is a, c, g, or t
  misc_feature (188)..(188): n is a, c, g, or t
  misc_feature (252)..(252): n is a, c, g, or t
  misc_feature (263)..(264): n is a, c, g, or t
  misc_feature (268)..(268): n is a, c, g, or t
  misc_feature (311)..(312): n is a, c, g, or t
  misc_feature (329)..(329): n is a, c, g, or t
  misc_feature (448)..(448): n is a, c, g, or t
ggggcgcaggaaggagtgaggncgaggggccggggctcccctggaggggtcgccccggccccccgtgncgccaccgttgaaaagtccaggccgncaggcgaaaaggcccgagtagaaaaagcaagaggggcaaaggncnacacaaaaaagtaggagtgaggagatctcagagagtgaaagtggggngnccaatgcgccaaaaaagaccaaaactgagcaggaactccctcggccacagtctccctccgatcnggaaagcttgnncggncggagccttaatgatgatggcagcagcggccttagggatatcnncccggccccccggggcnggtcccccggttctgcgggcccagaaagaaggcgagcgaacctttgtctcttcttctggcctgtcccagggcccagccagcccctaccacccacctccactctttcctccttcccctcnaccgccagacagcacccctcgacagccagaggctagctttgaaccccatccttctgtgacacccactggatatcatgctcccatggagcgccccaaa

SEQ ID NO: 631115 - DNA, 189 bp, Homo sapiens
atacacgaattcacaaacagcaaaagtcccacacacatcctctgcatccatctcaatcagctgcagcaaaacgcatttgacacaagtcaacatccattcatgatcaagaccctcgccaaagtgggtatagagggcacactcctgaacctgatcatagtaacttaggacaacaccacatcaaagatactc

SEQ ID NO: 631116 - DNA, 551 bp, Homo sapiens
  misc_feature (22)..(22): n is a, c, g, or t
  misc_feature (68)..(68): n is a, c, g, or t
  misc_feature (94)..(94): n is a, c, g, or t
  misc_feature (137)..(137): n is a, c, g, or t
  misc_feature (139)..(139): n is a, c, g, or t
  misc_feature (186)..(186): n is a, c, g, or t
  misc_feature (188)..(188): n is a, c, g, or t
  misc_feature (252)..(252): n is a, c, g, or t
  misc_feature (263)..(264): n is a, c, g, or t
  misc_feature (268)..(268): n is a, c, g, or t
  misc_feature (311)..(312): n is a, c, g, or t
  misc_feature (329)..(329): n is a, c, g, or t
  misc_feature (448)..(448): n is a, c, g, or t
ggggcgcaggaaggagtgaggncgaggggccggggctcccctggaggggtcgccccggccccccgtgncgccaccgttgaaaagtccaggccgncaggcgaaaaggcccgagtagaaaaagcaagaggggcaaaggncnacacaaaaaagtaggagtgaggagatctcagagagtgaaagtggggngnccaatgcgccaaaaaagaccaaaactgagcaggaactccctcggccacagtctccctccgatcnggaaagcttgnncggncggagccttaatgatgatggcagcagcggccttagggatatcnncccggccccccggggcnggtcccccggttctgcgggcccagaaagaaggcgagcgaacctttgtctcttcttctggcctgtcccagggcccagccagcccctaccacccacctccactctttcctccttcccctcnaccgccagacagcacccctcgacagccagaggctagctttgatcaccaccatcgagaccacatccccagtactcccagcttggtagtatacggatcctctaga

SEQ ID NO: 631117 - DNA, 506 bp, Homo sapiens
agaagaatcagaaaacaatttactaacctccctgtttgatattaaaaataggaagaattttaatattttctgttagtacaagttgaacttgattgtgccaactgaaacccccgaggtttgtaaatcagtagaaaggcaagaccattgttaaaggtgcttacgatcttttttgttttcctttccactccattgtatcaattttttgagtaacttttaaatggctagaaaatggtctttttgctttgcccttttacagttgtaatcacccgttccattcttttcatgaatagtaagttgatacacctattgatcaggtatctcgcagttgtctccaaaagcagaagttttattaggttggagtgtaactatagatcaatcaccttaatgtaatggggggcttcaagtcatagtagaacttttcacctgttaaagtcatagttaatcattccaatttaagatgtggatatagggcgaactgatatagagtatcccccaaggggcccaaa

SEQ ID NO: 631118 - DNA, 157 bp, Homo sapiens
  misc_feature (7)..(7): n is a, c, g, or t
ccagcgnctccgtaacatgccatgtgacattaggcaacactgatgcatgtgcacaactgctggccaccactgtccacactgctcacacaatgccatgtgcctgcagtgttggaaagaagctagcagttacatccaggcggatgtccttcttcccacc

SEQ ID NO: 631119 - DNA, 230 bp, Homo sapiens
  misc_feature (212)..(212): n is a, c, g, or t
gttggatcctggtatgtctacatcttcctgggcccagagcccatagagcgtggtgcagcagtacctggacgttgtgcggatacccgttcatgccgtccactactggtggcctgggcttccacctgtgccgctgggcgctactacctccaccgtctatcacccgaccaggtgtgtggataacatgaccatgggcccatcgttcgccccgtgtnatcgatccaagtggaacg

SEQ ID NO: 631120 - DNA, 834 bp, Homo sapiens
  misc_feature (387)..(387): n is a, c, g, or t
ggtgcatgaccccataaacaggggccctctcaggcctcctaatgagctccggactagccatgtagatttcacttccactccaataacgctcctcatatgtaggcactacataatccaacacactaaccgagtatacgcaatagatggccgcgatgtgaacaacgagaaagcgacgataccgaaggcctagctagagaccatctgtccaaaacatggccttacgatcactgggataatcctatgtcattgacctccacgaagtctggtgtatcattgctgcaggatttgtgtcatggcagcctttaaccaactcgcagcgctgagcgccctaactcgacccacattacaggacgcggtacgtggcccctctaatgacgtgcgatgcancacacgctgatagagtccactcgtacgtaacgctgcgcagatacgcataagaccatccaatcgcagatttgttaacctcgggccatttcatgggacgtgagtcagcgccaagcgtgaaagctcaaccgatatagtcttaactacgaaggagcaagcccggaaacctgagagtaccctgttcagatggcaacgttgcgtgtactgtcatcaacacttcttagcctcgagggtccatcatattttgtttagcactcatcccttatcgaagacacgtgcaaggaggtgacttgtcgacgctcttcacacttgcgacccagttcacccagaggggcccttctacgggactcaatgctgtatcctgggtaggccacaagagcttcccacaggaaccttcaccgtcgatatagttggcttcaagatgttccgtccacataatctgcttcaatc

SEQ ID NO: 631121 - DNA, 469 bp, Homo sapiens
gggctgcgcacaatctggttgttaccactgagaagttgagggggttccacgccccttgaaaaaacagatgaaatccatagacccgatccccaatgtgtaaacatgaaaccctgtcccagcaggtttcacgagatactcccccgacctggcactatgagccccccctgaacctccagcacctaggtccagtgccccagactcctccagctcaggcaccctacctccgaccagcctccagtccctggctactgcgccccgtaggataatccccgcatgcccgccacagcacagaacagggcacacagttgacattggggggtgtggggacgaaagataacccaaggccttgcctgcgggtatcttggcacagcttcaggggcccgtagggaagagggggcggagagccgagaccccgaagttagtcccaggttcaactcagcccaggtgcttcctgggagcctcactttat

SEQ ID NO: 631122 - DNA, 280 bp, Homo sapiens
atctaggtgttcaactgaatgacagagggaagcaccttccatttctgttggtctttctcagcctcccccttgtggtgacaaacaccataagcaccaaccgctcaaggttcataccctcccagctcctctcccagagtccccacaggagctggcattgccttccaacagctccctcagagcccctgaagtccctcactggctcggcttggggcttgggtcttgagcccacccctgagtgccagccgtgattgaccaggcctgcctgaatatccactgctga

SEQ ID NO: 631123 - DNA, 332 bp, Homo sapiens
  misc_feature (329)..(329): n is a, c, g, or t
gtagaatttcaactcactgcaacctccgcctccttggttcaagcgattctcctgcctcagcctcctgagtagctgggattacaggtgcccaccaccacgcccggcttatttttgtatttttagtagagatggggtttcactatgttggccaggctggtcttgaactcctgacctcaggtgattgcctgcctcggcctcccaaagtgctgggattacaggcgtgagccatcacgcccagccagtacttgtggaaggactagctggacagacagggtgcttgcagacctgacagtggaagccatggccctgcatgtcagaggtgctttttnaaa

SEQ ID NO: 631124 - DNA, 162 bp, Homo sapiens
gtcatagtataggatgtctgccctctgccattgctgtcggacactacttctggtgggcacagagcggaaacttgaggatgacatcagagagctgcatgcacttaaagggcatggcctgtctcctcacttgagtgcaggtccatcgaccaaagccctgttctg

SEQ ID NO: 631125 - DNA, 974 bp, Homo sapiens
ctgcttcgtctcggctggtagtaagtctgtgcacgaatgtcgtctgtgctgcctcagttagagccatgttgaaaaaagatacgggagacaatgccttgttcccctgatgggcaagactagggtggacgtgctcaggtatgcgatgtcaaaggtgtgtgactacgtacgccaggtgcaacggacagaggacaatcatgctaccttctgccagattacgccctgataaggtgcgagaggtgaccgccctgcgggctggaaacctttttactaggacgctgagatgttagtagcgagtggacccataatcgtggagcatgcaccatgggtagagttctcccaaagctctgttgcaatgccgatgcagtcgatggaataagcacgaaggatgtaatctaaggatttccgtcttcttagggaattgcaacgagtttaatgggaatctgatggtagctcgtatgcaccggagtgaaagacctttagccgtgttgttgggcgtagaaaatgcctgaattggcattcgtttgtgagaatgacagggcgttgttcggatggatatagtgggtctgaacctgtgttgcttgtggaggaaatgcctatatgtagtaagatttgccccatctttgtggccattctttttttctggaaaaactacaaaaggtgatggagtccctcctaggcgttaacaagagaaaacgcctgccatacaaacaaaccaacatatgcagttggcgcggccgccacatcggcgctcccgaaaaaaagcttgcaagacgaccagtcggctaggggagccagcagcgacccagacaataacagtgctgcagcgttgtgccacacgcattgacacccgaagagagacccggcccaacgagtgaggacaggcctgcaccaataaaaaaagcccgcgggcctccggctgtaaccaccgacgtgacgtcgagcgcccgcgggcttacaagggccagcgatgatct

SEQ ID NO: 631126 - DNA, 120 bp, Homo sapiens
atatatggttggtaggttggttggttggaatttttggtaaagacgaaatttaaccatgttgctcaggttggtctcaaaattcctatagaaatctcaaggcaatcttgtgcccactttagc

SEQ ID NO: 631127 - DNA, 664 bp, Homo sapiens
  misc_feature (664)..(664): n is a, c, g, or t
ctgatctggcggatatttaatcatttgtgagccagcactgcaaaaaaaaaatttccccctggcgaatcgtactccttaacgtgactagctcgctaagcattgggttatgtgtgtcatattcagtaatattacattaattgattgtcatcaaacaaaggtgtgcctcgtcataagacaacactcaggattgttgctcttatgacttgtaacctggacaaccctttgtcatattagcttggaacacttaaatcattcaggtcctttgctgaacagtggtagtctagtgacttcagtctagttcaagaagcctaatgtgacagcttgggtgaccatactgaccacaggtgcggagaaccgtcattgacaggaaaactgtcggtctggtacctgcgggctggtcaactgcctgtaaagggaacgctttgccggacactaacacgtaactagacgtgactaaactctaacttgagaggatcctgataggtccgacgcaggcacacggagcacttttgcacaccaccaaaggccctaggcctcgcccgggaacttcctcgggcacaagcacaccgacagttacagcgctctagaaccaagggccttagacggagcacaacaggggttccacctacgggggcacaaggcattggcacccgacgctcaattn

SEQ ID NO: 631128 - DNA, 323 bp, Homo sapiens
ggctgcacgccttcaagcgagcaatattggaatcgcgtcgagcccgttggcagacgcgctaggaaatgtggcgtgaccactgggaggtcgccaccgcagcggttgctcgcacccgtggctccggtcaacggccgtcttgctccaaaaggtaggcgacgcgaatggtcctgacgagtagcgacagcaaatgagcgattccttgggcattgttgatgcgctcggcagccaggtagtcgagcacttgcgtccagaaggtctagtcattacattcacaattgatgcagtaccatttagaaaaaggaaacactagcacttttggccat

SEQ ID NO: 631129 - DNA, 385 bp, Homo sapiens
  misc_feature (79)..(80): n is a, c, g, or t
  misc_feature (366)..(366): n is a, c, g, or t
  misc_feature (374)..(374): n is a, c, g, or t
acacaacaaatagcatggtagaatcaattaaacactgcattgtgttgctacagattgctaaagaccagagtaatgcggnngcacgcagatggaattataagtactattaatcctgtagatgcaatataccagcctagtcccttggaacctgtgatcagcacaatgccttcccagactgccttacctccagaacccgctcagttgtgtaagtcagagcagcgtccatcttccttacctgttggacctgtgttagctaccttgggacatcatcagactccaacaccaaatagtacaggcagtgggaactcaccacctagcagcagtctgactccttcccaagccatgtcaactttgtctccaaattcngttccagnggttctcttac

SEQ ID NO: 631130 - DNA, 369 bp, Homo sapiens
tatgaatgtaacgaatgtgaaaaagcctttaatgcaaaatcacagcttgttatacatcagcgatcccacactggagaaaaaccctatgaatgtaatgaatgtgggaaaactttcaaacaaaatgcatccctaaccaaacatgtgaaaactcattcagaagataaatctcatgagtgttgtagaagtcggaggatagtaagctgagtgaatggtatagttgaaccatagagataagatgattttaaagagtgtaagaaagcctttagcaagatgtcacaccttgttgtacatgagaaactttgaaaatggatcttcatatagaatcagtggatggaaacaagggtttaaacttgatacaaaaccttttat

SEQ ID NO: 631131 - DNA, 120 bp, Homo sapiens
cacctgtagagcagagggactgtctgtctgactttatgtttccaaagtgtagcaaactgtaggcattcagagcaaatgatacgaatgagaaattgaattttatcttgtatttagaggaat

SEQ ID NO: 631132 - DNA, 509 bp, Homo sapiens
cacaccacctgagtcttcatttggatttatttatttgagtgggattttcatttgctttgactgaaacgagaaaggaagaacaggtgctgaccctgtcatgactgaaggggtaagaataggcattgtggcacctctcaaccagggctgcttccttacaggaagtgctccaaagctgccgagatgggagtgatttaacagctgcctcccccttgattgaccgcatcaggctttaaaaatatcaatggattcatcagcatcaaccctttgcagaactctcttgaagactatcgtaatggaaacatgtgaaagcttttatgagtgcactccaagatatgatttatgggaaatagtcgcaacaagtgtttgcttgaagtctgttaaagacattcctctgaactctaggcactatcagaacatcaataaagcatgaattttgagtaaagaccaaggcagataaataagtattggcgttgggatttctggaaaattttctggaacatttatcaagg

SEQ ID NO: 631133 - DNA, 705 bp, Homo sapiens
  misc_feature (609)..(609): n is a, c, g, or t
  misc_feature (621)..(621): n is a, c, g, or t
  misc_feature (649)..(649): n is a, c, g, or t
ggaattcggcacgagctggtatcttagtcaagtaaatgatagatttacagccaaagaaagggaaaaattccctaccggccagcaagctgtctccagtataggatccccactgggacctcaactcagatcagggccactgcagtcaaaacacaggttgacctgttttctagaaagactaaggagaattaggaaaaagcccatgaattattcaatgatgtccaccataactcagggaaaggaagaaaatccttctgccttccttgagcagctataggaggccttaagaaaatatactcccctgtcacctggctcactcaaggttcaattgatcctaaaagataagtttattacccaatcagctgcagatatcaggagaaagctccaaaagcgagccctaggccctgaacaaaatctggaagaattcttaaacctggcaacctcggtgttctataataaggaccaagaggaacaggcccaaaaggaaaagcaacatcagagaaaggctgcagccttagtcatggccctcagacaaacaaaacctggtggttcagagatgacagaaaatggagccggccaatcacccagtagggctttttatcagtgtggttngcaaggacactntaagaatgtctaatgagcaagccacccnccagtccatgtccactatgccgaggcaatcccttgaaggcacctgcccagagtgct

SEQ ID NO: 631134 - DNA, 1272 bp, Homo sapiens
gccaagatgacggtagctgcaggcttagcttcgcggggtagtgtaggtgcccagcggggcgcggggctcccggagcgcgcgtgcccgggagtctgctggtgcagcgcgcggccccgtggccatgttcccgctacgggacacctccaggcgattggccttgttcgtcgacaggtctgggcctttcccgtaggtcctggtaacacgtgatgctgtcatgcgctgggctatgctggcggcagggtggttgcggggcctggacctgtggggcttcgtgacgatttccgagttgttgagctgtccgagctggaccgtggcagacttgcgatccgcctccccaggatatacccgctgtggtctcgaccgcttgggacttccatctccttcgcttggtgaacccagaactacagtcactctcggtgagtgggcgtcttcccagtgggtactaataaatcgcaagagctggtagcccgcgcgttcacttgcccagcatgccattgggcaccgttctgctgggaccctaacacggcacaaaccccttgaggtgggagcagtttggttgcattagcaagcaggggaaggcgaaatggacagcgccgtacacggtgaaaggcttggtggacttggcggcgaaggcggttgggggaaggggctttcccaatatgggaacccgagtgcaccctcccaaaattggcagaggaaatttggctggcgaaagacaattaggttgtaccaacttagcgcagtggccaccagggcggggcacaagactttggtttatcaggaagccttaatttgattcgccacacaaaatatataccaattatacgacacctctaaaaaaccaaatgtgttggaaccgggctgtttgccaaattcctgaaaaggaccttttgtacgcttagaaaccccaaaaacctgggtagaaggcccaaatatgtgtgcagcgcccccttaccgttgaaagccctattccgaagtaacggataagccagttccgggattggcacggaaacggcatttaggcggtcactagtttgcggtttgagggtcaggacgggggaagcttaaccaaggattcctattccatttcgcgacattttgcgttacagacaggcggagccattaacgatggccggaaagagacgaaaacacgcaaaacccatggtggagggctcgggttcaacctttggcgggcggggaacaaagaggtcccttcgtaaaccttttacgaaacccgcgcccttaaagcgtatttacccattagagggccca

SEQ ID NO: 631135 - DNA, 495 bp, Homo sapiens
ctggacatcttcagtcaagtcttcaccacactgtatattttggtaacaaaccataagcatgcaatagaagccaattgttcctgtccaaagataagaaatcacaaccattatcatggtataaccaaagtacagaattgtgcttgcggttcccgtgttctgccgttatgcccaaaaatagtgtactgcatagattaagaaataaactgcagtaaagccactcgtaaggaatgaacgccattgccaatgataatcctctgcacataggtggaaatagcaaagaagtatagttgcttcagaacaggtaataaccaaaatgataaacaccagaaataggaagccaaacatgtaatacatctggtgtgaccaaatactattcagaatgaagaaaagttgtataaagatgcagccaaagggcaaaatccctcccatgataataccaggcaagggcttcgtgtagaacgactgttcaggaatctgacgtggaatctgattggt

SEQ ID NO: 631136 - DNA, 493 bp, Homo sapiens
atggcggtgaaggctatccccttggctgtgtgttggattgtaatcattgtccatgctccttcctgccagtcttgaggtcatgcctgccctcaattggagcccgtctgcacctgtgttctcagggtcccagaatggtgatcttgtgagttcatgttgtggccacacgacagctcctgaaccatccagggcgacaaagtcacacgccacgagcatcaagacggtcagggccatgctgtctccattggtcctccatgctgtcacaacatgtcccaataggcgcacttgtcttgtcccatgtgatggcacatggccagtgatgtacttcatagggttaaaacacagaccactgatgggcccttcgtgtccagacaaaacatcacggagcctgcctgtctgcatggaccacacgacaatctcaaaggcgtcctgcgccccctgcagatgacgatctcaccgctcgcaatccaaccgacacaacaggagaaactgggtg

SEQ ID NO: 631137 - DNA, 444 bp, Homo sapiens
  misc_feature (203)..(203): n is a, c, g, or t
tgaacccccaaccagattaatttctccacagctggaattccaaggtgcttggggatgaatgatgacctctgaccttttctatccttttgggaaagtactttgaggtgtgcaagctgcatggagagcctcacgcaggagaggagattttgagggtccaacgaacgctagtaccagtaggagacaacggcagggaaaatactacngacatttcaggagtcaaggcccctctgagcgtcgtcatattggagaactggagtgttgtgctaaggcacctagcttacttaagggatcgccagaggggattataagtgagtactcccccagaaacctggggagagatttgaataggggccctcatgagagaagggtgactcatgacacctccaagtggttggggactctcgagatgaaaagttaacaacgaatgctcatggttttgcagag

SEQ ID NO: 631138 - DNA, 104 bp, Homo sapiens
tccccctgtgtactgcgtgtgctgtgtgttgtgtgtgtgtacgctgcggggactgcactaaacgtactgagtgctttttaggatgggacttgcgatgtaagatt

SEQ ID NO: 631139 - DNA, 763 bp, Homo sapiens
  misc_feature (25)..(25): n is a, c, g, or t
  misc_feature (92)..(92): n is a, c, g, or t
  misc_feature (109)..(109): n is a, c, g, or t
  misc_feature (119)..(119): n is a, c, g, or t
  misc_feature (123)..(123): n is a, c, g, or t
  misc_feature (128)..(128): n is a, c, g, or t
  misc_feature (133)..(133): n is a, c, g, or t
  misc_feature (137)..(137): n is a, c, g, or t
  misc_feature (141)..(141): n is a, c, g, or t
  misc_feature (145)..(145): n is a, c, g, or t
  misc_feature (157)..(157): n is a, c, g, or t
  misc_feature (167)..(167): n is a, c, g, or t
  misc_feature (175)..(175): n is a, c, g, or t
  misc_feature (194)..(194): n is a, c, g, or t
  misc_feature (217)..(217): n is a, c, g, or t
  misc_feature (255)..(255): n is a, c, g, or t
  misc_feature (275)..(275): n is a, c, g, or t
  misc_feature (285)..(285): n is a, c, g, or t
  misc_feature (330)..(330): n is a, c, g, or t
  misc_feature (375)..(375): n is a, c, g, or t
  misc_feature (384)..(385): n is a, c, g, or t
  misc_feature (391)..(391): n is a, c, g, or t
  misc_feature (403)..(403): n is a, c, g, or t
  misc_feature (432)..(432): n is a, c, g, or t
  misc_feature (436)..(437): n is a, c, g, or t
  misc_feature (442)..(442): n is a, c, g, or t
  misc_feature (458)..(458): n is a, c, g, or t
  misc_feature (460)..(460): n is a, c, g, or t
  misc_feature (501)..(501): n is a, c, g, or t
  misc_feature (509)..(509): n is a, c, g, or t
  misc_feature (552)..(552): n is a, c, g, or t
  misc_feature (728)..(728): n is a, c, g, or t
atttaattaattttaaacacatgantgactctacaaaatctttttttagcaaagttacattcagaagttactaaagaaggaaaatgtttttntttttccgtcatgcaantcgtcgttantttnttccnttccntacnttcntgantcccgcgttaantaatacaaanaattaatngactgtaaacctcaaagangtcatggtaaaaggcatcttttngcgttcacagaaatcatgacccatagagaaaacaaggnaaaaactaaggaaaactgancattgaactnttttcaaaaaaattacaaaataggatgtataacattatctttggnaaacagacattttctttctactagaaatagcaaaaatcattctanattggttcnnccccantggcatgtacantgagcatacataccaacagtgtgcatganaaannggcgnagccagagggagtggngngagggcgtccgaagtgggtcggctaaggcagtggccaaganactatgangtctatgcgctgactggacagagtaaagaaacaaaacagaaanaattaccaagggataaagctgacaagacccagcaacaatctgtcattacttcagctgttagtcggtcttctccccccacccagccccacaaaaaaagttctgctctgcttaagtgtacaagactccagtgaacttccaacagtttggcttcaagtgaccaaggaatggagtgagtnatctgtaaagcctggagtggtccaaataacacaga

SEQ ID NO: 631140 - DNA, 122 bp, Homo sapiens
gatatataatagtaattcagaatggtatgtagggttgtcggtagaactgctattattcatcctatgtgggtaattgaggagttgctaagatattgcgtagctagggtatggtttactccaca

SEQ ID NO: 631141 - DNA, 138 bp, Homo sapiens
atacttattacttatctattaataattattaatatatattaatatattttatataatatataatataaaatatataataaataagtagtctagtaataaaagaataccagcctggagtagtcacagcacggggatcct

SEQ ID NO: 631142 - DNA, 1280 bp, Homo sapiens
ccctggtgtgattccgtcctgcgcggttgttctctggagcagcgttcttttatctccgtccgccttctctcctacctaagtgcgtgccgccacccgatggaagattcgatggacatggacatgagccccctgaggccccagaactatcttttcggttgtgaactaaaggccgacaaagattatcactttaaggtggataatgatgaaaatgagcaccagttatctttaagaacggtcagtttaggggctggtgcaaaggatgagttgcacattgttgaagcagaggcaatgaattacgaaggcagtccaattaaagtaacactggcaactttgaaaatgtctgtacagccaacggtttcccttgggggctttgaaataacaccaccagtggtcttaaggttgaagtgtggttcagggccagtgcatattagtggacagcacttagtagctgtggaggaagatgcagagtcagaagatgaagaggaggaggatgtgaaactcttaagtatatctggaaagcggtctgcccctggaggtggtagcaaggttccacagaaaaaagtaaaacttgctgctgatgaagatgatgacgatgatgatgaagaggatgatgatgaagatgatgatgatgactgaagaaaaagcgccagtgaagaaatctatacgagatactccagccaaaaatgcacaaaagtcaaatcagaatggaaaagactcaaaaccatcatcaacaccaagatcaaaaggacaagaatccttcaagaaacaggaaaaaactcctaaaacaccaaaaggacctagttctgtagaagacattaaagcaaaaatgcaagcaagtatagaaaaaggtggttctcttcccaaagtggaagccaaattcatcaattatgtgaagaattgcttccggatgactgaccaagaggctattcaagatctctggcagtggaggaagtctctttaagaaaatagtttaaacaatttgttaaaaaattttccgtcttatttcatttctgtaacagttgatatctggctgtcctttttataatgcagagtgagaactttccctaccgtgtttgataaatgttgtccaggttctattgccaagaatgtgttgtccaaaatgcctgtttagtttttaaagatggaactccaccctttgcttggttttaagtatgtatggaatgttatgataggacatagtagtagcggtggtcagacatggaaatggtggggagacaaaaatatacatgtgaaataaaactcagtattttaataaagta

SEQ ID NO: 631143 - DNA, 281 bp, Homo sapiens
cagcttcggatcactgtgatttttccggaatgcatcttactgagaatttgccctcgtgaagattacataccacaaagtttcagaacaataactttagagaatgcctcttggccaagacacttcattttggcatactgactaaataaaaggcttggatacctgttaatttaacgggaacccaacaccatagttctccaataagcccagctatgaatcccagttcccatcgtgcgatgatgtccactggtcgtcaacaacggcttcctcattccgttctcccc

SEQ ID NO: 631144 - DNA, 211 bp, Homo sapiens
aagccttggaaaacgtgattttaaaggcaacggcgaaacgccacaagatcgttatatgagtgcagcggcgatggcggatgacttgagttcagtcttgtcagcacgtcgcgggaatgaagaacgctttgcccaatgtcggaaacgtctgatgatacgcgcattattccgatggcacaaatttcaagaccacactcaaaacagggggtgttcg

SEQ ID NO: 631145 - DNA, 479 bp, Homo sapiens
  misc_feature (4)..(4): n is a, c, g, or t
  misc_feature (12)..(12): n is a, c, g, or t
  misc_feature (67)..(67): n is a, c, g, or t
cccntgtagtcntagcttacttcgtgaaagctttaggttgggaggattcacctgaacctgggaagtnggaggctgcaagtgagcccaaaatttgtccagcctgggccaaaagagttgagaccctgtctctcaaatgaatgaatgaatgaatctttcttgtttgcccttggtagagccacataaataagaaattagaggccaggcacggtggcttatacctgtcatcccagcattttgggaggctgaagcaggaggatcacctgaggtcagaagttcaagaccagcctggccaacatagtgaaacctcatctctattaaaaatacaaaaattagccggatgtggtagtgcacacctgtaatcctagccactcgagaggctgaggcacgggaattgcttgaacccaagaggtggaggttgcagtgagccaagatcataccactgcacttcagcctgggtgacagagtaagactctgtctcc

SEQ ID NO: 631146 - DNA, 1682 bp, Homo sapiens
ccctggtgtgattccgtcctgcgcggttgttctctggagcagcgttcttttatctccgtccgccttctctcctacctaagtgcgtgccgccacccgatggaagattcgatggacatggacatgagccccctgaggccccagaactatcttttcggttgtgaactaaaggccgacaaagattatcactttaaggtggataatgatgaaaatgagcaccagttatctttaagaacggtcagtttaggggctggtgcaaaggatgagttgcacattgttgaagcagaggcaatgaattacgaaggcagtccaattaaagtaacactggcaactttgaaaatgtctgtacagccaacggtttcccttgggggctttgaaataacaccaccagtggtcttaaggttgaagtgtggttcagggccagtgcatattagtggacagcacttagtagctgtggaggaagatgcagagtcagaagatgaagaggaggaggatgtgaaactcttaagtatatctggaaagcggtctgcccctggaggtggtagcaaggttccacagaaaaaagtaaaacttgctgctgatgaagatgatgacgatgatgatgaagaggatgatgatgaagatgatgatgatgatgattttgatgatgaggaagctgaagaaaaagcgccagtgaagaaatctatacgagatactccagccaaaaatgcacaaaagtcaaatcagaatggaaaagactcaaaaccatcatcaacaccaagatcaaaaggacaagaatccttcaagaaacaggaaaaaactcctaaaacaccaaaaggacctagttctgtagaagacattaaagcaaaaatgcaagcaagtatagaaaaaggtggttctcttcccaaagtggaagccaaattcatcaattatgtgaagaattgcttccggatgactgaccaagaggctattcaagatctctggcagtggaggaagtctctttaagaaaatagtttaaacaatttgttaaaaaattttccgtcttatttcatttctgtaacagttgatatctggctgtcctttttataatgcagagtgagaactttccctaccgtgtttgataaatgttgtccaggttctattgccaagaatgtgttgtccaaaatgcctgtttagtttttaaagatggaactccaccctttgcttggttttaagtatgtatggaatgttatgataggacatagtagtagcggtggtcagacatggaaatggtggggagacaaaaatatacatgtgaaataaaactcagtattttaataaagtaaaaaaaaaaaaaaaaaaaaaaaaaaaaaaaaagaaaagaaaaaaaaaaaggggggggcgggtaaagaattaccccctgggggggccaattttggggtcccattttttggaaaaaagggggcccccaatgagagggagacgcaaataaaacacgacgaggccagggccggagtcaacacacacggcgcggatgcgcgacaaacggcacgcgtggggaaccctgtggagagaaacccaaaacctgcggggcggggcaccaacgggggccaccacaccccaagaaaattatagcctcaggaaaataaaactcgagggttaacgggtcaacacaggcaatacccgcgggaaatggcccaggaattttgaaatatgaggcaaaagac

SEQ ID NO: 631147 - DNA, 1214 bp, Homo sapiens
ccctggtgtgattccgtcctgcgcggttgttctctggagcagcgttcttttatctccgtccgccttctctcctacctaagtgcgtgccgccacccgatggaagattcgatggacatggacatgagccccctgaggccccagaactatcttttcggttgtgaactaaaggccgacaaagattatcactttaaggtggataatgatgaaaatgagcaccagttatctttaagaacggtcagtttaggggctggtgcaaaggatgagttgcacattgttgaagcagaggcaatgaattacgaaggcagtccaattaaagtaacactggcaactttgaaaatgtctgtacagccaacggtttcccttgggggctttgaaataacaccaccagtggtcttaaggttgaagtgtggttcagggccagtgcatattagtggacagcacttagtagctgtggaggaagatgcagagtcagaagatgaagaggaggaggatgtgaaactcttaagtatatctggaaagcggtctgcccctggaggtggtagcaaggttccacagaaaaaagtaaaacttgctgctgatgaagatgatgacgatgatgatgacgaggatgatgatgaacgatgatgcatgatgatgacttttgatgatgaaggaagctgaagaaaaagcgccagtgaagaaacaagaatccttcaagaaacaggaaaaaactcctaaaacaccaaaaggacctagttctgtagaagacattaaagcaaaaatgcaagcaagtatagaaaaaggtggttctcttcccaaagtggaagccaaattcatcaattatgtgaagaattgcttccggatgactgaccaagaggctattcaagatctctggcagtggaggaagtctctttaagaaaatagtttaaacaatttgttaaaaaattttccgtcttatttcatttctgtaacagttgatatctggctgtcctttttataatgcagagtgagaactttccctaccgtgtttgataaatgttgtccaggttctattgccaagaatgtgttgtccaaaatgcctgtttagtttttaaagatggaactccaccctttgcttggttttaagtatgtatggaatgttatgataggacatagtagtagcggtggtcagacatggaaatggtggggagacaaaaatatacatgtgaaataaaactcagtattttaataaagta

SEQ ID NO: 631148 - DNA, 281 bp, Homo sapiens
aagaatttttttataaagggctttgtaaaaaaaaaaaaaatgtattctagcttttgcgggacaaatgtgtgatacctttaatacccctgccagttaagggcaattatttcatccctcaaaaaaggctatttttgggccagttcccgcaggggttttcatgtttttgcaaagtgacccattttaatccctttttgataaagtggtagcccttttgtagctttttaaaaactttgtattcatccggtatcaatgaaaaataaagaaaatgaaagtgtgggtca

SEQ ID NO: 631149 - DNA, 1242 bp, Homo sapiens
ccctggtgtgattccgtcctgcgcggttgttctctggagcagcgttcttttatctccgtccgccttctctcctacctaagtgcgtgccgccacccgatggaagattcgatggacatggacatgagccccctgaggccccagaactatcttttcggttgtgaactaaaggccgacaaagattatcactttaaggtggataatgatgaaaatgagcaccagttatctttaagaacggtcagtttaggggctggtgcaaaggatgagttgcacattgttgaagcagaggcaatgaattacgaaggcagtccaattaaagtaacactggcaactttgaaaatgtctgtacagccaacggtttcccttgggggctttgaaataacaccaccagtggtcttaaggttgaagtgtggttcagggccagtgcatattagtggacagcacttagtagctgtggaggaagatgcagagtcagaagatgaagaggaggaggatgtgaaactcttaagtatatctggaaagcggtctgcccctggaggtggtagcaaggttccacagaaaaaagtaaaacttgctgctgatgaagatgatgacgatgatgatgaagaggatgatgatgaagatgatgatgatgatgattttgatgatgaggaagctgaagaaaaagcgccagtgaagaaatctatacgagatactccagccaaaaatgcacaaaagtcaaatcagaatggaaaagactcaaaaccatcatcaacaccaagatcaaaagggtagaagacattaaagcaaaaatgcaagcaagtatagaaaaaggtggttctcttcccaaagtggaagccaaattcatcaattatgtgaagaattgcttccggatgactgaccaagaggctattcaagatctctggcagtggaggaagtctctttaagaaaatagtttaaacaatttgttaaaaaattttccgtcttatttcatttctgtaacagttgatatctggctgtcctttttataatgcagagtgagaactttccctaccgtgtttgataaatgttgtccaggttctattgccaagaatgtgttgtccaaaatgcctgtttagtttttaaagatggaactccaccctttgcttggttttaagtatgtatggaatgttatgataggacatagtagtagcggtggtcagacatggaaatggtggggagacaaaaatatacatgtgaaataaaactcagtattttaataaagta

SEQ ID NO: 631150 - DNA, 1842 bp, Homo sapiens
  misc_feature (1320)..(1320): n is a, c, g, or t
ccctggtgtgattccgtcctgcgcggttgttctctggagcagcgttcttttatctccgtccgccttctctcctacctaagtgcgtgccgccacccgatggaagattcgatggacatggacatgagccccctgaggccccagaactatcttttcggttgtgaactaaaggccgacaaagattatcactttaaggtggataatgatgaaaatgagcaccagttatctttaagaacggtcagtttaggggctggtgcaaaggatgagttgcacattgttgaagcagaggcaatgaattacgaaggcagtccaattaaagtaacactggcaactttgaaaatgtctgtacagccaacggtttcccttgggggctttgaaataacaccaccagtggtcttaaggttgaagtgtggttcagggccagtgcatattagtggacagcacttagtagctgtggaggaagatgcagagtcagaagatgaagaggaggaggatgtgaaactcttaagtatatctggaaagcggtctgcccctggaggtggtagcaaggttccacagaaaaaagtaaaacttgctgctgatgaagatgatgacgatgatgatgaagaggatgatgatgaagatgatgatgatgatgattttgatgatgaggaagctgaagaaaaagcgccagtgaagaaatctatacgagatactccagccaaaaatgcacaaaagtcaaatcagaatggaaaagactcaaaaccatcatcaacaccaagatcaaaaggacaagaatccttcaagaaacaggaaaaaactcctaaaacaccaaaaggacctagttctgtagaagacattaaagcaaaaatgcaagcaagtatagaaaaaggtggttctcttcccaaagtggaagccaaattcatcaattatgtgaagaattgcttccggatgactgaccaagaggctattcaagatctctggcagtggaggaagtctctttaagaaaatagtttaaacaatttgttaaaaaattttccgtcttatttcatttctgtaacagttgatatctggctgtcctttttataatgcagagtgagaactttccctaccgtgtttgataaatgttgtccaggttctattgccaagaatgtgttgtccaaaatgcctgtttagtttttaaagatggaactccaccctttgcttggttttaagtatgtatggaatgttatgataggacatagtagtagcggtggtcagacatggaaatggtggggagacaaaaatatacatgtgaaataaaactcagtattttaataaagtagcacggtttctattgaaaanaaaaaaaaaaaaaaaaaaaacaaaacaatcaaaaaacaaaaaaaacaaaacaaacactaaaaagaaaggcgggggcgccccaaaagaatatccccacaggaggggcccacacaatcagaggaagtgagcaacagagttattgttgtggccacaaagggtggcccaaaaaagagaaggaagaccaaataagaaaccgcgcacagggaaagcgggggcagcggtactaaaaacagagcgcgtaggcgtaggggacaacaaaccgcgaaaataggagaaaacaagagggggagagcagaacatcaaactaggtggggggggcgaaacaaaaggggggaacacagaaagacccactaagagagaacagaaagaaagcagcacaaagaggagaaaaaaagacaactatgctagggccagcaatataggcgggacataacacaaaaacgcagaaaatagaaagcgagcgcgacgagaaaaatcgacgatcggaagagagaaactaaacaaaagacaaaatacacagag

SEQ ID NO: 631151 - DNA, 241 bp, Homo sapiens
aaataattttccccccttttggctttataagcaaatttgggaactcagaactgggccaaaggggcttttctttttcaaggttgaaactgggggggcgggtcccttatcccccccccctccccctccccttcctaagggaataggggcccacttagggtatttttggttccggatttgaatggaaaacttaaagcccggggttttttttttttgccagacccccggttttccttttgtttta

SEQ ID NO: 631152 - DNA, 1969 bp, Homo sapiens
ccctggtgtgattccgtcctgcgcggttgttctctggagcagcgttcttttatctccgtccgccttctctcctacctaagtgcgtgccgccacccgatggaagattcgatggacatggacatgagccccctgaggccccagaactatcttttcggttgtgaactaaaggccgacaaagattatcactttaaggtggataatgatgaaaatgagcaccagttatctttaagaacggtcagtttaggggctggtgcaaaggatgagttgcacattgttgaagcagaggcaatgaattacgaaggcagtccaattaaagtaacactggcaactttgaaaatgtctgtacagccaacggtttcccttgggggctttgaaataacaccaccagtggtcttaaggttgaagtgtggttcagggccagtgcatattagtggacagcacttagtagctgtggaggaagatgcagagtcagaagatgaagaggaggaggatgtgaaactcttaagtatatctggaaagcggtctgcccctggaggtggtagcaaggttccacagaaaaaagtaaaacttgctgctgatgaagatgatgacgatgatgatgaagaggatgatgatgaagatgatgatgatgatgattttgatgatgaggaagctgaagaaaaagcgccagtgaagaaatctatacgagatactccagccaaaaatgcacaaaagtcaaatcagaatggaaaagactcaaaaccatcatcaacaccaagatcaaaaggacaagaatccttcaagaaacaggaaaaaactcctaaaacaccaaaaggacctagttctgtagaagacattaaagcaaaaatgcaagcaagtatagaaaaaggtggttctcttcccaaagtggaagccaaattcatcaattatgtgaagaattgcttccggatgactgaccaagaggctattcaagatctctggcagtggaggaagtctctttaagaaaatagtttaaacaatttgttaaaaaattttccgtcttatttcatttctgtaacagttgatatctggctgtcctttttataatgcagagtgagaactttccctaccgtgtttgataaatgttgtccaggttctattgccaagaatgtgttgtccaaaatgcctgtttagtttttaaagatggaactccaccctttgcttggttttaagtatgtatggaatgttatgataggacatagtagtagcggtggtcagacatggaaatggtggggagacaaaaatatacatgtgaaataaaactcagtattttaataaagtaaaaaaaaaaaaaaaaaacctcgagtttttttttttttttttctaggaggtgcgctttttatttaaaaatacgttcccgccagcccgttctcaacgcgtcttttttgggggcttaaaacagccccaattgttcccccaggagaattatactttgtcgccaaaactcatgttgtgcgccgggaatattggaacccgtgggcgctacaaactcttcaaaagaccccaccatcaagatttggtgtactttcctcccgggggttggtgccccaaaggacggtctgttgcctccgaatggggaatttttccgcgttccacaaggggccttgagggtttctgttgcggaagcggccaacggtcacgggcacaccgcgcggatcaacaggaaaacgggggcgcgacggttccgacctgcgctggcgaattggcccccatcccaattcagcgggagggcggaagagagggcgcccccggtctgctgaaaaacccccccagctgctcaaaatgtggacgaacagcctttttggggcacgtggagccctcaacggcccacaagagcgggggaagaaccacggccaaacgaccgggctgatcaaacaacagaggggcggtgaccccccaggaaagggcgtgacagcaacaacacccggggccctcgtcggcggcgcacagt

SEQ ID NO: 631153 - DNA, 234 bp, Homo sapiens
gaaattcaattttttttaaaaaaggaaaacccttttttcctccaaaaatgagtattagggttcatgtgtttaaaaaaaaaaaggttacaatgtttggccaaaaaaaaaaatgggaaattaaataaaccagttgttcagcatctttggaacatggggacgagtgccgccaggaggcccccaaggaaatcccctcaaaattaatttgtttccaccaaaaaaaagttttccctccca

SEQ ID NO: 631154 - DNA, 1463 bp, Homo sapiens
ccctggtgtgattccgtcctgcgcggttgttctctggagcagcgttcttttatctccgtccgccttctctcctacctaagtgcgtgccgccacccgatggaagattcgatggacatggacatgagccccctgaggccccagaactatcttttcggttgtgaactaaaggccgacaaagattatcactttaaggtggataatgatgaaaatgagcaccagttatctttaagaacggtcagtttaggggctggtgcaaaggatgagttgcacattgttgaagcagaggcaatgaattacgaaggcagtccaattaaagtaacactggcaactttgaaaatgtctgtacagccaacggtttcccttgggggctttgaaataacaccaccagtggtcttaaggttgaagtgtggttcagggccagtgcatattagtggacagcacttagtagctgtggaggaagatgcagagtcagaagatgaagaggaggaggatgtgaaactcttaagtatatctggaaagcggtctgcccctggaggtggtagcaaggttccacagaaaaaagtaaaacttgctgctgatgaagatgatgacgatgatgatgaagaggatgatgatgaagatgatgatgatgatgattttgatgatgaggaagctgaagaaaaagcgccagtgaagaaatctatacgagatactccagccaaaaatgcacaaaagtcaaatcagaatggaaaagactcaaaaccatcatcaacaccaagatcaaaaggacaagaatccttcaagaaacaggaaaaaactcctaaaacaccaaaaggacctagttctgtagaagacattaaagcaaaaatgcaagcaagtatagaaaaaggtggttctcttcccaaagtggaagccaaattcatcaattatgtgaagaattgcttccggatgactgaccaagaggctattcaagatctctggcagtggaggaagtctctttaagaaaatagtttaaacaatttgttaaaaaattttccgtcttatttcatttctgtaacagttgatatctggctgtcctttttataatgcagagtgagaactttccctaccgtgtttgataaatgttgtccaggttctattgccaagaatgtgttgtccaaaatgcctgtttagtttttaaagatggaactccaccctttgcttggttttaagtatgtatggaatgttatgataggacatagtagtagcggtggtcagacatggaaatggtggggagacaaaaatatacatgtgaaataaaactcagtattttaataaagtaaaacacggtcgcgaggagtaaagaaaagttttgcccgataggagtcgatgtcgacgcgccgaatttactgtagtgtcgaccgggaatccggacggtcccgccgcgtacactttcccatagtggccgtatagcctgggtcatcaggtcaaccgttccgtgtaaa

SEQ ID NO: 631155 - DNA, 807 bp, Homo sapiens
  misc_feature (332)..(333): n is a, c, g, or t
ggcatgacgccgaattcttgttcggccacctatcaggtccaaccatcctgcaccgatggagatttaagagggattctaaggttcttgggtgcatcacgccaggcattctgggaaactaagggccgtgccccacaaatttgccctactctgttggcgtagtcctgctgcccaccaaattgtgagcgacctgggctgtttcaccactttgcgttttatttcccagtcaaggaccaccccggttcattcactcctgggcagttactcttcttttgggtctgtgatattccttgcctttcccagggagaatgtgcttgccaggtctggagcaactnnattccagaatcttaggggaaggggagagatggaaatcaccacacccgcttactggaaaggtgccaaataatatgggttgagctggaggtaggaataccggttattaaggtttctactttaagggaaaaccagatctattgcccatttaaataaggtaactgggatttggttaagttcaaccaagatagccagaagatttatttacaggcgttcacctgtactgtccagggccagagaaagcctggtaaacacagctacagccagtttacacgtgtgatggctgtgacaccagctccccatccacgggtggacaccacacagagggcaactgggctggcctggttcagtgtgaatccaaccgcttaacccccacctggtacaagtgatttttttttgtgagccttacacccagcccaactattgtccaagcatcatttttatagaaataagccttattttgacctgttttattta

SEQ ID NO: 631156 - DNA, 1304 bp, Homo sapiens
  misc_feature (1287)..(1287): n is a, c, g, or t
  misc_feature (1291)..(1291): n is a, c, g, or t
ccctggtgtgattccgtcctgcgcggttgttctctggagcagcgttcttttatctccgtccgccttctctcctacctaagtgcgtgccgccacccgatggaagattcgatggacatggacatgagccccctgaggccccagaactatcttttcggttgtgaactaaaggccgacaaagattatcactttaaggtggataatgatgaaaatgagcaccagttatctttaagaacggtcagtttaggggctggtgcaaaggatgagttgcacattgttgaagcagaggcaatgaattacgaaggcagtccaattaaagtaacactggcaactttgaaaatgtctgtacagccaacggtttcccttgggggctttgaaataacaccaccagtggtcttaaggttgaagtgtggttcagggccagtgcatattagtggacagcacttagtagctgtggaggaagatgcagagtcagaagatgaagaggaggaggatgtgaaactcttaagtatatctggaaagcggtctgcccctggaggtggtagcaaggttccacagaaaaaagtaaaacttgctgctgatgaagatgatgacgatgatgatgaagaggatgatgatgaagatgatgatgatgatgattttgatgatgaggaagctgaagaaaaagcgccagtgaagaaatctatacgagatactccagccaaaaatgcacaaaagtcaaatcagaatggaaaagactcaaaaccatcatcaacaccaagatcaaaaggacaagaatccttcaagaaacaggaaaaaactcctaaaacaccaaaaggacctagttctgtagaagacattaaagcaaaaatgcaagcaagtatagaaaaaggtggttctcttcccaaagtggaagccaaattcatcaattatgtgaagaattgcttccggatgactgaccaagaggctattcaagatctctggcagtggaggaagtctctttaagaaaatagtttaaacaatttgttaaaaaattttccgtcttatttcatttctgtaacagttgatatctggctgtcctttttataatgcagagtgagaactttccctaccgtgtttgataaatgttgtccaggttctattgccaagaatgtgttgtccaaaatgcctgtttagtttttaaagatggaactccaccctttgcttggttttaagtatgtatggaatgttatgataggacatagtagtagcggtggtcagacatggaaatggtggggagacaaaaatatacatgtgaaataaaactcaagntcanacgagctcgtgcc

SEQ ID NO: 631157 - DNA, 382 bp, Homo sapiens
acacgcgattgctatatccagagcagtaacacaggtccgtcagcgaagtcgcctttgtgcctacccaaccctggaacgttgcagaagtggaaggagcagaacgtgagggtgtacttacaaaaaggtaatcaagaacaaagacaccaacataacccccaaatttgccaactagatcgaaaatatatatgtcttacaataacgtctccgaaaccaccgtccagcgtgatcttctagcactccatggcaccgggctgagcgggtaagtaaaaaagataaaaagtgccttttgccccttcgaggaaaccctttcgcaggccaagcaagggctgcaagtgtatgggagctgagaggagaacggaggcttctggagcattgtatctag

SEQ ID NO: 631158 - DNA, 862 bp, Homo sapiens
taatattctaccttgcagtgatggcctattgttatccgcacggtgagagcaccgttattctcgcgcactccggggtgtcaccgggcatatttccagggtgtgccccggaaacacctctccagggtggaatatgcgcctggtaagtctggcttcgccgcttttctgttggcccccggttggcctcgtggctccccgcctcctggtgcctgctgggtctgccaccgggctcttaaaacgttgttcaccaagcaacaaaaagcgttgcccaggggccccaaacggggaggccgcccccagggggtcaccaaatggatgaaaaaatcccggggggaaaaaaacaaggagggggcccccaggaattgtttcctgaaccagggcgggaagccccagagttcggcccccgcgagatacaaagcacaccgggccaaccttgtcagattaagggctacacagaaaacaagaccaggtttcttctccgggaatataaggagcccgcaccacgaagcgagtttcaacgacgccctttcgaacccgggattgcgactcatgcccgaggggattctggcgcaaccatcaaagaaatgtgggagaagccaacacaggtaaaacataaggaggaatcaaccaagggacatccccccggagtctccatggcagagaggagcggacccagcaattctagtggggcgccaaccatggggaacccactctccagaatgcaggtacggcgtccggagaaccccccccgagggggagaatgcctgctccccgctccctacccgctgtggggagactccttattggcagcacacgggcaggcttcttcaaaaaaacaacaaagggggatacccacaaaatgaca

SEQ ID NO: 631159 - DNA, 1265 bp, Homo sapiens
gtgcgggtgatctagaggatcccgctgccgctactactacctaagtgcgtgccgccacccgatggaagattcgatggacatggacatgagccccctgaggccccagaactatcttttcggttgtgaactaaaggccgacaaagattatcactttaaggtggataatgatgaaaatgagcaccagttatctttaagaacggtcagtttaggggctggtgcaaaggatgagttgcacattgttgaagcagaggcaatgaattacgaaggcagtccaattaaagtaacactggcaactttgaaaatgtctgtacagccaacggtttcccttgggggctttgaaataacaccaccagtggtcttaaggttgaagtgtggttcagggccagtgcatattagtggacagcacttagtagctgtggaggaagatgcagagtcagaagatgaagaggaggaggatgtgaaactcttaagtatatctggaaagcggtctgcccctggaggtggtagcaaggttccacagaaaaaagtaaaacttgctgctgatgaagatgatgacgatgatgatgaagaggatgatgatgaagatgatgatgatgatgattttgatgatgaggaagctgaagaaaaagcgccagtgaagaaatctatacgagatactccagccaaaaatgcacaaaagtcaaatcagaatggaaaagactcaaaaccatcatcaacaccaagatcaaaaggacaagaatccttcaagaaacaggaaaaaactcctaaaacaccaaaaggacctagttctgtagaagacattaaagcaaaaatgcaagcaagtatagaaaaaggtggttctcttcccaaagtggaagccaaattcatcaattatgtgaagaattgcttccggatgactgaccaagaggctattcaagatctctggcagtggaggaagtctctttaagaaaatagtttaaacaatttgttaaaaaattttccgtcttatttcatttctgtaacagttgatatctggctgtcctttttataatgcagagtgagaactttccctaccgtgtttgataaatgttgtccaggttctattgccaagaatgtgttgtccaaaatgcctgtttagtttttaaagatggaactccaccctttgcttggttttaagtatgtatggaatgttatgataggacatagtagtagcggtggtcagacatggaaatggtggggagacaaaaatatacatgtgaaataaaactcagtattttaataaagta

SEQ ID NO: 631160 - DNA, 484 bp, Homo sapiens
gcgttctagaggatcccgcattactcatggctattgctgggtagcagattatccacaattattatgtagctcaaaaacgtgagtttcctgtttctcttcttttaccattgtcgttattctttccccccataggcaactccctcccttctcataattagcttaagaccttaatgttggctgggtgtggtggctcacacctgtaatcacagcattttgggaggctgaggcaggcagatcgcctgagcccaggagtttgaggccacaagatcagcctgaataacatggcaaaacccaatctctactaaaaatacaaaaatgagtcagatgtggtggcacgcgcctgtagtcgcagctatttgggaggttgaggtggcaggatggcttgaacctgggaggtcaaggccgcagtgagctgtgatcgtgcgactgcactccagcctgggtggcagagggagaccctgtctcaaaacaaacaaacatagct

SEQ ID NO: 631161 - DNA, 1253 bp, Homo sapiens
  misc_feature (1227)..(1227): n is a, c, g, or t
ccctggtgtgattccgtcctgcgcggttgttctctggagcagcgttcttttatctccgtccgccttctctcctacctaagtgcgtgccgccacccgatggaagattcgatggacatggacatgagccccctgaggccccagaactatcttttcggttgtgaactaaaggccgacaaagattatcactttaaggtggataatgatgaaaatgagcaccagttatctttaagaacggtcagtttaggggctggtgcaaaggatgagttgcacattgttgaagcagaggcaatgaattacgaaggcagtccaattaaagtaacactggcaactttgaaaatgtctgtacagccaacggtttcccttgggggctttgaaataacaccaccagtggtcttaaggttgaagtgtggttcagggccagtgcatattagtggacagcacttagtagctgtggaggaagatgcagagtcagaagatgaagaggaggaggatgtgaaactcttaagtatatctggaaagcggtctgcccctggaggtggtagcaaggttccacagaaaaaagtaaaacttgctgctgatgaagatgatgacgatgatgatgaagaggatgatgatgaagatgatgatgatgatgattttgatgatgaggaagctgaagaaaaagcgccagtgaagaaatctatacgagatactccagccaaaaatgcacaaaagtcaaatcagaatggaaaagactcaaaaccatcatcaacaccaagatcaaaaggacaagaatccttcaagaaacaggaaaaaactcctaaaacaccaaaaggacctagttctgtagaagacattaaagcaaaaatgcaagcaagtatagaaaaaggtggttctcttcccaaagtggaagccaaattcatcaattatgtgaagaattgcttccggatgactgaccaagaggctattcaagatctctggcagtggaggaagtctctttaagaaaatagtttaaacaatttgttaaaaaattttccgtcttatttcatttctgtaacagttgatatctggctgtcctttttataatgcagagtgagaactttccctaccgtgtttgataaatgttgtccaggttctattgccaagaatgtgttgtccaaaatgcctgtttagtttttaaagatggaactccaccctttgcttggttttaagtatgtatggaatgttatgataggacgtagtagtagncgcagcgggatcctctagacgaccag

SEQ ID NO: 631162 - DNA, 327 bp, Homo sapiens
atgcggccaataccgagtttgatgaaatatacgagtaatgcccaattaaacatatttccacaggacattattaatgttgaatcttataaacttattgtaacacccgctgagggagaacatgagggaagtatgcagcaagggttctatactacgtataattttgatagtgcatttacagtaaccattcaatccccagaaggaactgtttataagaacggaaatggtagtaagcatctaaaggcagttatatataacgctgtcggtgaggtaaattcctaccaggaatactatttaattattatgggtatctatataagcaggggcact

SEQ ID NO: 631163 - DNA, 203 bp, Homo sapiens
cataacgtgagcatgtcacattgaaggccaggtagggcttgtgtacagagctccacaggactgggggaaacagagaccccattcttaaaaggtgcacacagaccttcacgaacgcggggtcccagggcaaagcaaagtctccatagcaatctgggtcaaacctgactgcagtacttggaggatatcctgggaaaacaggggtg

SEQ ID NO: 631164 - DNA, 210 bp, Homo sapiens
gcggcccaccttatcttttttggtagagacagagtgttgctatgttgcccaggatggtctcaaactcctggcctcaagcgatgctcctaccagtcggcccaaagtgctaggatacagtagggagatctccctactgtatcctatctctcccagtcctagctgctggcatcactatactactaacagaccgcaacctcaacaccaccttct

SEQ ID NO: 631165 - DNA, 108 bp, Homo sapiens
cagcagatttgtgcaagagtgcgccctctactggaggggtgaagaaacctcatcgttacaggtattaaaaaacaggaaaaaaatggggggtaccgagactcggacatt

SEQ ID NO: 631166 - DNA, 398 bp, Homo sapiens
cctcccaagtagctggaattacaggtgtgcactaccatgcccagctgttttttgtagagatggggtttcaccatggtctctactaaaccctgtctctactaaaaatacaaaaattacccaggcgtggtggcacatgcctgtagtcccagctactcaagaagctgaggcaggagaatcactcgaacctgggaggtggaggtggcagtgacccaaaatcatgcactctggcctggggtctcgcttttgcccaggttagagtgcagtggcacaatcatagtggctcactgcagcctcaaactcctgggctgaagggaatcctcccacctcagcctcccaagtagctaggactataggcatgtgccatcatggcgagttaattttttgtgtgtttttatttt

SEQ ID NO: 631167 - DNA, 183 bp, Homo sapiens
atcggattctgttaacactgcgcacgacgggactcctgtcacattttatcataataacttaaaattttacttttggagttcccactgtggcacaacaggatcatgcagcatagctgcaatgccaggttctatcctccacccagcaatagtgcgtaaaacggtaacacccacagggggtacccg

SEQ ID NO: 631168 - DNA, 291 bp, Homo sapiens
aagatggtcctcagctgtaaaactatggaatggagacacaaactatgtgaaaattcccaacatttagtctccacccataaaggtatctcccttatctgaacctgatttccatatctgatttatttatttatatttatttatcattgttgagatggagtttcgctcttttttacccaggctggattacaatggcgcgatcccggctcactgcaacctccacctcctgggttcaagcaattctcctgcctcagcctcccgagtagctgaggaccatcgttggggtaccgagct

SEQ ID NO: 631169 - DNA, 114 bp, Homo sapiens
gagaatggctcccgcaaagaagtgtggcgagaagaaaaagtcccgttcgccatgcaacgaggtgaaccacgacgatgacacatgaacatgcacacgcgatcctccgcgtcgctg

SEQ ID NO: 631170 - DNA, 230 bp, Homo sapiens
ataaactggaaactttatgggcccaaggacatacagggttttaacagcagagacggactagagcagagcggggactaaaacccagaccttacaggtcaaggggggtttggacatacctctatgactttatataagattatttggtgtctggaaaatttttctatctttaaggtaaacatcctataaggggataatacttaaactagttggaaggcagattcttcagaaag

SEQ ID NO: 631171 - DNA, 333 bp, Homo sapiens
ttacataccccagatcacctttctttctttctttctttctttctttctctctctctcactctctctctttctttcttcctttttgagatagagtctcactctgtcatccaggctggagtgcagtggcatgatctcagctcactgcagcctccgcatcctgggttcaagcgattttcgtgcctcggccttctgagtagctgggattacaggcgtgcgccaccacgcctggctaattttagtatttttagtacagacgaggtttcaccatgttgaccaggctggtcttgaactcctgatcttaagtgatctgcccgccttggcctcccaaagtgc

SEQ ID NO: 631172 - DNA, 426 bp, Homo sapiens
catagcagacaagaattacgagttcaaaacaggtgaaacaattcaatactgtttacaaagctgcatgaccttttttgtaatacactgaggctcgccatgtgttttctaataagcttgtatcttcaggcttgagcttttgtaggagagtctatattaaattatcagacaaaaatatcatcgttctcaaactatgaaaccactctagagtttggagaatcagtactttgccctcattatatttgtgagaagctaccaactaatacaagctcactctgatcagccttatggaccagaggcactacgtgcatccagtgttcactaggacgcacagggctgaaatatccatctctcctagcgtcctccccattggtcgatgtcttttactgttaggaaacgcgctctctagacataatgactctgagagca

SEQ ID NO: 631173 - DNA, 439 bp, Homo sapiens
  misc_feature (125)..(125): n is a, c, g, or t
  misc_feature (388)..(388): n is a, c, g, or t
  misc_feature (398)..(398): n is a, c, g, or t
  misc_feature (424)..(424): n is a, c, g, or t
cagagtttcactctttcacccaggtgcagtgccgcgatcttggctcactgcaacctccaccttctggttttaagcgattcttctgcctcagcctcccaagtagctgggattgcaggcgccacacncacaactggctaatttttgtatttttagtagagacggggtttcaccacgttggccaggctggtcttgaactcctgacctcgtgattcatccacctcagcctcccgaagtgctaggattacaggtgtgaaccactacgccgggccccttattgttattatctttcatctatacctttaaggtaaagtgggaacaggttaaagttcgtgggcataattaacactttcattggaatggcacaatagtattttaacatgtttaaaantttggggttnaaaatatttaccacacttaacctaancttttttaaaatttt

SEQ ID NO: 631174 - DNA, 158 bp, Homo sapiens
ccgagatgtctgagatggaacagttttatccaaagacattccccacatcatggaacagttgtcttccactgaaactggtccctggtgccagaacaggttggggactgctggcttagacaaccaccatttagcgacgagcactttgagttaggtaatgc

SEQ ID NO: 631175 - DNA, 326 bp, Homo sapiens
caccaaggatcgtcatgattaggcgcagtatcgagagatttcatgtactatactacatagtctcataggtgtagatgtccattggtgtatgagtcagtatatgttggatataggagtggtgtgagcttgacgcacttatatgtgctgctttatgctacatggtgtaattttactctctctacagtttttcctatgtcaagactgtctcttgactacagtaaattacagggattagaggtctgtggcaattaaagtgactaagatctatcttgacaacagtatcacatgctcggaggttgtcgctctactataatcttccactattt

SEQ ID NO: 631176 - DNA, 191 bp, Homo sapiens
gtgagagttaagttgatgccaagtaatgacgttaagatccgtgcaagcctgtggctactacaaatgttgcacccgtaaatccgtcggaaatggtgaagggagactcgtaagtactctgaggcttgctacgacggtcaaatagatacccattaaaactgttatacgcagtgcttgaattatttggtctcggt

SEQ ID NO: 631177 - DNA, 854 bp, Homo sapiens
tcagcgtctcgaggcacgtgcccagtttcctttcaaaatgtcgtactgtccagccgaaatcctgtgtcaagtctcaggcattggagggtgaggcactctacgaccaccgcaaggtgcagtatgggctgcgtgtcaagagaccatataactatagctctttgatgctctagcgggatgcttctgcaacattgaaacagccatcaggaccaaaggtgttggcagtgaggtcaccgttgtcaagattttgacgaatcgtagacaatgcatagagacaggatatagcctacgcttaccagagaaggagccaagctgggaagcttgcatcagatagtggccgtcaggccttatctggccacctggagacggtgatccgggcctattgatagaacgacctgctcggatagtgacgcttctgagtctaaaagcttccatgatgggactgagaaccgacgaggatctactcattgcgatcatctgttgcagaaccaagcaggaggtgggggaaattaacggagtctaccgaggcaacgtgtgctgtgagtgatctggagtgaggacttaattcgggagacaatctggtgacttccgtaccgctggtaggttgccctgtgcaaagggtgagaacagcagaggaatggtctgtcatgattatgaccctgttggcacagacggtcgggatctctattgacgctgcacgttaacacaggcaagggactggctgttcacacgtgggtcagcctcatgaccgagaggacgtgcccactccagaaggtgttgacaggacacgagctcccgcctttacattgtgacgctcacgagagtaacggggcgcggaagctccgaaccgctagcac

SEQ ID NO: 631178 - DNA, 208 bp, Homo sapiens
  misc_feature (106)..(106): n is a, c, g, or t
  misc_feature (158)..(158): n is a, c, g, or t
  misc_feature (186)..(186): n is a, c, g, or t
ttatacagacatctattaaaaaaaaccatgtgacacattagagagttagaagtagaacatgaccccgactatacaggcacagtgtgcacacacgctgtaatcccangcactttagggaggccgagagctggtaggatcatgaaggtcaggacgatcgnatagcatctctggccaacaacgttgaanaccccgtgtctactataaaata

SEQ ID NO: 631179 - DNA, 399 bp, Homo sapiens
ccccctctggatgcaagtgtcagcaattttttttttaaagggggaaatcagatgtcacctcccgggcctaaaattctccaaggacttcccatggcacttaaataaaatctaaataaggtcaagcagggtggctctcaccggtaatcccagcacttggggaggccgaggcaggcggatcacgaggtcaggagatcgagaccatccgggctaacacggtgaaaccccgtctctactaaaaatacaaaaaaaattagccgggcgtcgtggcgggtgccggtagtcctagctactcgggaggctgaggcaggagaagggtgtcaacccgggaggcggagctggcagtgagccaagatggtaccacggcactccagccggggcgacagagcaagactccgtctc

SEQ ID NO: 631180 - DNA, 684 bp, Homo sapiens
ggggtcgtggggggggggcgggggtatgtggtagtgtggtgtgggtgggggggtggggtgggggggggggtggtgggggtgggggggtgggggggtggtggtgggtgggggcgggtgggacgcgtcggaggtggggggagggggggggtgtggaggcgaggcgcagtgtgggagcggggtgaggatggcgcgcggcgagcggcgggcccgggccagcttacgggctaggtacgaggcctgggtggaggtaagccgcatatatatatatatgcgtagccagaccgagccacatagctacagtacaccatggggggaaggtagaaggtacggagtaaacgggatatataggtacgtaatatagggggcgcctaggtacacccagggctagctatattaactactgggtaaaagtaggataattagtatgccatacaatagacccctatacatatagacctacaactaacataggtttaaacatagtaaccaataatagataaccacccataggcaaatataccataggcaccgtacaagggctagagaacggggaagctatagtacatacaataggaaatacccatacaccatactataccaggagcgagataccctaccaaaatacaagtaggggcgatagctaggcgctagagtaacgtacgtaggagtaccactaggcgtact

SEQ ID NO: 631181 - DNA, 280 bp, Homo sapiens
gaagtctgtggagttgagtggttacttcaaagtgtcaggagagtgaataaattggccacaaaagagcaagaagctctcttaagaaaagggaattctctttaaagaaaccaccaccaccgacaatgcaaccaaaaaccatgtgttatgtcaaagctgtgtagcacagagaatgtggtgtcacagatacatcgtcgagagagggtgctttctttcattgttgaatgtatgagacagatgtcagggtctgtttctagggcaaggagctaggggaagactccac

SEQ ID NO: 631182 - DNA, 1426 bp, Homo sapiens
gcagagcgcctgttatggcggccggctaagtcccacagtagacgggagtcgggtgggatcccagggtgggcccctgcggcgggctgggattctcttccctggaccaaagtctctgaggatcttctcccatgggctgagtgcaataggctactcggctacccaagcgtgtggaccgttgtgctgcaagtatctccgtctgaggacgctgccagtgctagaaggacgccatctcgtcaccttctgcatggcgactccgtgatcctaggacgtaagcgtggacgaccatggagccattggctatcatgacgtggactctcatgcagagcagtccagtggcacgtatggtgcaccttttagtgagctgacaacatagtgcgttgtcgaagatgtccaacctcttatacgccctgaaccgatagacgatctcgatgggtacagggctgaacaagcgttgggcgcaggcaagatttatccatagtccccaaattcagagctttcgtaagtggaagccgaagaactacttggcacgacggattccagtgcagcacgcaagcggtgggctagtcaacgcagtagcgatgtgtcatacgacacagtgagccttgccttgtctgcctagagaacagggcgcagcgccacacgtggtcccccgtctcaagtgacacgctggggcagttggagtcaatcgattggcgtttgctgccgctcccatgagccaggtgacttgaacacccactggaggctacggacatgtggctagaatgctcatgcgtggcattgagggagtgggccgaacttttgtgaccgttgggatcacaggagaggaacccaacgaagggcccgcccttcatggcacttgcccgaaagccgaagggtaggtggtgctcttcggtggaagcaagcaccgcgacggtggtcactacttcttcacatgcagtttccttaagtccatcatgtgcaagcgcaagggacctcaactgttcccgtgggcgggagcaacgcggaactgccccccagaggggtcctatgcccccagggagttggactgacttccgttgcaggggcaaatttggaaacagggaatagagcgcccagtgtgtgtcgccaccgagcccccccatgaggaaaggggcatgtggttcggcgggccaatgccgcagcggtgtgtcgcgggggaagagatgcacccctggagcccccggtgcgacaagaagcttaagaagattgccagaggtatccccggagaaagggagagccctctttttccgaaaagacacgtgcatcaaacgggcttgagaaccctcttcgcgagggcccgcacacgaggagcatctgcgaagccagcaacgatgcgacacgcaacccaattagagagcacaggacccgcgattttggtgatccagcagctcgtgagaaacaaagcttg

SEQ ID NO: 631183 - DNA, 951 bp, Homo sapiens
ggatgtcttactcttcacacccagaccctgtatactcagtaaataaccttggcaatggttgactaattgattacgttgagaagatgagaaggcggacataatgacaatgatgataacgttccatcgtccagatatacttattagtggttatcgagtgtcgtaagtgtggcaactgggtacaccatgttaacctcctaccaccctgattcgctgtcttctcagaactgtctcgctgttagaattctggattggagaccgtattgacctggtgactttacttctgtgtgagcgcgttagatttccattgtaacttagtgcattcatccctctgtataccaaactgagttgttttaggatacttacccaatgtggcgatttaaaatgtctgtgtgagtccatgtgcctgaactaggccctgttcgtgagggtgtctcatcgaatgctgaatcatgactcaggaaagtgagatccccagacactgtgagatacgtgaagaaggtcagtgattgaatgaattagccaggcgtagttcacaagttctccaggtcccggaggtcagtgttgaatagctgacggcttggttccatgtgccgatacttattgtctgagcagcccatgtggatatggaaaagggatggtcatgatgggatcatatttgccactatgtgagatatggaaacgcgaatgttttagtaggctgatggttgctggactgtactgtatgtgtgggggcttatgtatggggcatggatgtgggaaaggggtggccgtgggcagtgttttcagaattggatgtgggtggcaggtgttgggcagattgtgcccgtttggggcggggtaaaaaaaaggagtgaaaccggcggtgaatggggcacttaacagggggtttaatcgaatcaggagcgtgaaatggtggacaaaagggaggattaaaaaaggcgggacaatcag

SEQ ID NO: 631184 - DNA, 718 bp, Homo sapiens
gtggacgtagacctccttcagtgtggctctgctgggccagaggcatcctgctgtcccgggtggctgcctcgctgtctgcaccccctctccctggggcagctttgcttcctgcccctgtgctcggggcctgggtggttactggcgtgtagatggaattgcttttttaactatgggaagatacacttctatttcttcttccatgctggcgtgggctgtctctcatctcggacttcctcttctgctcacatacgtttactcttcttagaagcggtggccagagaatccagctcctgtggccaccctgtgtcccagcaagcagctgagtggagctgcatcaggggtgcccatctcctgccggaccagtctctgacatgtccaaaagcatgcagggcctggcttccgtgctctggctattggtcaacttcatcatggcaaggggaaagcaccatgacccttcacgggcacagggctatgctcaccgtattaacattacctcgcggggtgcttagactcggccaatcccccggtgatgaacacacgaagacccctctgaccaatggtttaaccggtgctcgaatgtacgtggcagggttcgaccaactggtcacgatagtccatgcctgggcaacaagaaactcacactcctctgacccatatgctcatccccatcctcctcccaccaagatccaggtgcctacccatatctacagctagatcg

SEQ ID NO: 631185 - DNA, 601 bp, Homo sapiens
aagaatcatataataaagtaatatgaggtcattcttgttcatcacgtttccagtatgcttttctgccaagcagcaactggccgacacaccatcagcatatgaaaatcttcaaccagaagacaatattgtctaggttctgggaaagctcaggcatgcattttaagagagaataccagggagaaccataagcaaatcattcacaaattaccatttcagatgtcagtgttcataattgtttcctgaacctaatagcagcaacttgagggcaggaactagagccggcagggagtactaaggcattcatccaattagcatttctaagttaaccattatcgcatttatagtaagtaagacacagggtcttgctctgtcacccagactaaagtgcagtggtgcaatcacagctcactgcagactcaaactcctggactcaaggattctcccaccttagccttcccaggagcacactatcacggttggctaattttagtatttacagaaaagacagggtttcaccatgttgactaggctggtcttgaagtcctgggctcaagcgatccacctgactcgagctcgcacagtgctgtgattacaggcacga

SEQ ID NO: 631186 - DNA, 152 bp, Homo sapiens
  misc_feature (123)..(123): n is a, c, g, or t
ctgatgtccaatatcaacaataactttgcagagcttgttccggataaagtaaggtaaggttttatggtgagccaaaaggagtttgggcagacagctacggatttccatcttatcctgagatgngaccccaagccacattttattgatcagat

SEQ ID NO: 631187 - DNA, 1541 bp, Homo sapiens
cgcatggaccgagatcctgctcctggcattcctgaagctcatcgactgagggcagacacatggtgatgctggaatgccctgagactggtcaacacagctgctccacgaattcctgctactgggagccctgagccctcgcccaatggctctacctggatgccacatgacacggctgcctaccaggaatgacaatgaaagtatgacctgcttgtgtgcctgtgcgtgtggcaatctgctatgtgttgatgcaccatgcctgaaatgaccacggacgtgatggccctgaagccttgacagccaatggtgtcttgcaatgtctgcaaagaacccaacctttgtgggactgtggcacatggtttacagaataccatgtgattggtggactggtgtgaggccaaacgggtccactggggatgaacttgacaccacacagtggcatttgccattgtggtgacctgggtgacccgttagaggacaatacctggaaagaatggacgaccaacctatatgtctggggaacaagatttacaccgatgctttcaatcactgggacattcatcccgggatcacacctggctagtgtggaggacccaataatactaggcgtctggtatatcacttggggggagtgcccctgacacaaagcaccaggaatcggaacccccatatccacactcgcgcatactgacattggaaccaatattgcttacacaggaaaacggcacacacgataccaccatcaaaccaaattatcccacaacgacgacacaacaagcacacaagcccggacaccgaacaagtgacacacgggaacccagcacaaaaaaagcaacggacaagagcccaaaaccaggatgacaacaaaacaccagaaagcacaagagcaactcacacagggagcacgacacacagagcaagaaccaccaaaaaaagtggtcgaacacaccagacggaaggcgacacccacaaacccaacacggcagacactcaccgcagcaaaccaccacaacgcgcaaaacacaacaccacaaaacaacaaaggagcaggccagtggcaaagcacaaaaacaaaaacgaaacgaaaagaggcaaaagcggacacgaccaacaaacagagcgcaccagagagccacccacaaccacggaccccccgtggacccaccaccgtcaagagcccagagagcaaccaacacacaacaccaaaccagacaaccaacacgacgcgaccacacacgcacacacaaacaaaaaaggacgacagcacaacacaacaagagccgcacgaatcgacaagcgacgccaaccagagcgacgccccgcgccgacgccaccagaagaaagacgcagaagcacacgggtgacaagacaacacggcagcagcagcaagacccaccacccgcccacagacacacgcagacccagacgacccacgcccacaacagcacgacacgaaactcgggagcactgaccgcaccgcaccacgcggacgccacgaccgagcaccgaacaccaaacacgcacaaaagacgcaccgtcaccca

SEQ ID NO: 631188 - DNA, 1299 bp, Homo sapiens
ccctggtgtgattccgtcctgcgcggttgttctctggagcagcgttcttttatctccgtccgccttctctcctacctaagtgcgtgccgccacccgatggaagattcgatggacatggacatgagccccctgaggccccagaactatcttttcggttgtgaactaaaggccgacaaagattatcactttaaggtggataatgatgaaaatgagcaccagttatctttaagaacggtcagtttaggggctggtgcaaaggatgagttgcacattgttgaagcagaggcaatgaattacgaaggcagtccaattaaagtaacactggcaactttgaaaatgtctgtacagccaacggtttcccttgggggctttgaaataacaccaccagtggtcttaaggttgaagtgtggttcagggccagtgcatattagtggacagcacttagtagctgtggaggaagatgcagagtcagaagatgaagaggaggggatgtgaaactcttaagtatatctggaaagcggtctgcccctggaggtggtagcaaggttccacagaaaaaagtaaaacttgctgctgatgaagatgatgacgatgatgatgaagaggatgatgatgaagatgatgatgatgatgattttgatgatgaggaagctgaagaaaaagcgccagtgaagaaatctatacgagatactccagccaaaaatgcacaaaagtcaaatcagaatggaaaagactcaaaaccatcatcaacaccaagatcaaaaggacaagaatccttcaagaaacaggaaaaaactcctaaaacaccaaaaggacctagttctgtagaagacattaaagcaaaaatgcaagcaagtatagaaaaaggtggttctcttcccaaagtggaagccaaattcatcaattatgtgaagaattgcttccggatgactgaccaagaggctattcaagatctctggcagtggaggaagtctctttaagaaaatagtttaaacaatttgttaaaaaattttccgtcttatttcatttctgtaacagttgatatctggctgtcctttttataatgcagagtgagaactttccctaccgtgtttgataaatgttgtccaggttctattgccaagaatgtgttgtccaaaatgcctgtttagtttttaaagatggaactccaccctttgcttggttttaagtatgtatggaatgttatgataggacatagtagtagcggtggtcagacatggaaatggtggggagacaaaaatatacatgtgaaataaaactcagtattttaataaagta

SEQ ID NO: 631189 - DNA, 839 bp, Homo sapiens
ccacaacacaagacaaggaagcagtgaagagtagctagcatccatggcgtgcatcaataccttgcagagctgctccatgttcaaaggggccaagagtaaggccagaagaggtagagccagtggcgggacctttgagtgccgggcgtccacgttcatggacgggagcgggctccggctcgggctcgacgagaaccccgatgccatcatctccggggagtggcccgagaacttctccctcctcagctacgacgacctccgcgcatacctccagtcacagcagcagcagcagcaacaacaaccatcccatgccggcgatcagcagcgggggcctctcctgcgtgaggccatgtcgacgcccgtgctgatggtcacagcggagcaggcgctggtggaggttgaaggccacttccagctcgtgtcaggcctcccggttgtcgacagtgcccgccgatgtgtcggggtcgtcgtcaagagcgatcacgtgagggcttcacatgggccaaagacgaagattgcagatgtgatgacatctccagcaatcacgctatcatgcgataaaacagtgaccgatgccgcagctctgatgctcaggaagaagatccacagattaccgatagtaaaccaggacaatcaagtaataggtatagttacccgcgatgacgttcttcgcgcgttggaggccatgctgaagttttagaagatgcaggagtccatgcccggtacttgtggatctgtaaatatgtgtgtccgcggtactttgagtagcaggcagatcctatagtctgtaacagtgtttgcagtctgtatcgcaaaaaataagcctgggagcatttaggaga

SEQ ID NO: 631190 - DNA, 1233 bp, Homo sapiens
  misc_feature (1207)..(1207): n is a, c, g, or t
ccctggtgtgattccgtcctgcgcggttgttctctggagcagcgttcttttatctccgtccgccttctctcctacctaagtgcgtgccgccacccgatggaagattcgatggacatggacatgagccccctgaggccccagaactatcttttcggttgtgaactaaaggccgacaaagattatcactttaaggtggataatgatgaaaatgagcaccagttatctttaagaacggtcagtttaggggctggtgcaaaggatgagttgcacattgttgaagcagaggcaatgaattacgaaggcagtccaattaaagtaacactggcaactttgaaaatgtctgtacagccaacggtttcccttgggggctttgaaataacaccaccagtggtcttaaggttgaagtgtggttcagggccagtgcatattagtggacagcacttagtagctgtggaggaagatgcagagtcagaagatgaagaggaggaggatgtgaaactcttaagtatatctggaaagcggtctgcccctggaggtggtagcaaggttccacagaaaaaagtaaaacttgctgctgatgaagatgatgacgatgatgatgaagaggatgatgatgaagatgatgatgatgactgaagaaaaagcgccagtgaagaaatctatacgagatactccagccaaaaatgcacaaaagtcaaatcagaatggaaaagactcaaaaccatcatcaacaccaagatcaaaaggacaagaatccttcaagaaacaggaaaaaactcctaaaacaccaaaaggacctagttctgtagaagacattaaagcaaaaatgcaagcaagtatagaaaaaggtggttctcttcccaaagtggaagccaaattcatcaattatgtgaagaattgcttccggatgactgaccaagaggctattcaagatctctggcagtggaggaagtctctttaagaaaatagtttaaacaatttgttaaaaaattttccgtcttatttcatttctgtaacagttgatatctggctgtcctttttataatgcagagtgagaactttccctaccgtgtttgataaatgttgtccaggttctattgccaagaatgtgttgtccaaaatgcctgtttagtttttaaagatggaactccaccctttgcttggttttaagtatgtatggaatgttatgataggacgtagtagtagncgcagcgggatcctctagacgaccag

SEQ ID NO: 631191 - DNA, 1615 bp, Homo sapiens
ccctggtgtgattccgtcctgcgcggttgttctctggagcagcgttcttttatctccgtccgccttctctcctacctaagtgcgtgccgccacccgatggaagattcgatggacatggacatgagccccctgaggccccagaactatcttttcggttgtgaactaaaggccgacaaagattatcactttaaggtggataatgatgaaaatgagcaccagttatctttaagaacggtcagtttaggggctggtgcaaaggatgagttgcacattgttgaagcagaggcaatgaattacgaaggcagtccaattaaagtaacactggcaactttgaaaatgtctgtacagccaacggtttcccttgggggctttgaaataacaccaccagtggtcttaaggttgaagtgtggttcagggccagtgcatattagtggacagcacttagtagctgtggaggaagatgcagagtcagaagatgaagaggaggaggatgtgaaactcttaagtatatctggaaagcggtctgcccctggaggtggtagcaaggttccacagaaaaaagtaaaacttgctgctgatgaagatgatgacgatgatgatgaagaggatgatgatgaagatgatgatgatgatgattttgatgatgaggaagctgaagaaaaagcgccagtgaagaaatctatacgagatactccagccaaaaatgcacaaaagtcaaatcagaatggaaaagactcaaaaccatcatcaacaccaagatcaaaaggacaagaatccttcaagaaacaggaaaaaactcctaaaacaccaaaaggacctagttctgtagaagacattaaagcaaaaatgcaagcaagtatagaaaaaggtggttctcttcccaaagtggaagccaaattcatcaattatgtgaagaattgcttccggatgactgaccaagaggctattcaagatctctggcagtggaggaagtctctttaagaaaatagtttaaacaatttgttaaaaaattttccgtcttatttcatttctgtaacagttgatatctggctgtcctttttataatgcagagtgagaactttccctaccgtgtttgataaatgttgtccaggttctattgccaagaatgtgttgtccagaatggaaataaaactcagtattttaataaaaaaaaaacaacgaaaaagaagaacacatcaaacacgactgaaaagcaccctgaacagcactggaatgggcacgcgaaaacgaataagaccgagcaccacaccgctcgcagcccgtgccaggcacccagccgcgcccacacctcgtagcgttcccacagaggcgcacccacgagcttagcatcaggccaggagaaaagcacgaaccaaagccgccccaatagcagcgcgaagccacccacaaaagggcacatgggaggggagaaccaaagcttgcacgcaacacaagcgaaggagcacccacacctggacaaccaagatccggcgcacactccacggtgcagagaagcaacccgctccgcgcgccaatccggcaccacggcaccaaagcgatgccggacgagtatacaggacggacacagcgaagcagtaaaacacggaagaaaaag

SEQ ID NO: 631192 - DNA, 1176 bp, Homo sapiens
ccctggtgtgattccgtcctgcgcggttgttctctggagcagcgttcttttatctccgtccgccttctctcctacctaagtgcgtgccgccacccgatggaagattcgatggacatggacatgagccccctgaggccccagaactatcttttcggttgtgaactaaaggccgacaaagattatcactttaaggtggataatgatgaaaatgagcaccagttatctttaagaacggtcagtttaggggctggtgcaaaggatgagttgcacattgttgaagcagaggcaatgaattacgaaggcagtccaattaaagtaacactggcaactttgaaaatgtctgtacagccaacggtttcccttgggggctttgaaataacaccaccagtggtcttaaggttgaagtgtggttcagggccagtgcatattagtggacagcacttagtagctgtggaggaagatgcagagtcagaagatgaagaggaggatgatgaagatgatgatgatgatgatttgatgatgaggaagctgaagaaaaagcgccagtgaagaaatctatacgagatactccagccaaaaatgcacaaaagtcaaatcagaatggaaaagactcaaaaccatcatcaacaccaagatcaaaaggacaagaatccttcaagaaacaggaaaaaactcctaaaacaccaaaaggacctagttctgtagaagacattaaagcaaaaatgcaagcaagtatagaaaaaggtggttctcttcccaaagtggaagccaaattcatcaattatgtgaagaattgcttccggatgactgaccaagaggctattcaagatctctggcagtggaggaagtctctttaagaaaatagtttaaacaatttgttaaaaaattttccgtcttatttcatttctgtaacagttgatatctggctgtcctttttataatgcagagtgagaactttccctaccgtgtttgataaatgttgtccaggttctattgccaagaatgtgttgtccaaaatgcctgtttagtttttaaagatggaactccaccctttgcttggttttaagtatgtatggaatgttatgataggacatagtagtagcggtggtcagacatggaaatggtggggagacaaaaatatacatgtgaaataaaactcagtattttaataaagta

SEQ ID NO: 631193 - DNA, 327 bp, Homo sapiens
gtgtataagcgtcaggaagggaaatagagcagatttttttaggacagtgaaattattctctatgattctataatggtgaatacggtgttgttacacatttgcccaaacctatagaatgtacaccactaagagtcaatcctaatgtaaactatgaactttgaaggagaatgatgtgtctatgtaggtttataaatgtaacaaaggtatcactccgtggggaaaagaaagagagatcagactgttactgtgtctatgtagaaagaagtagacataagaaactccattttgttctgtactaagagaaattcttctgccttgagatgctgt

SEQ ID NO: 631194 - DNA, 429 bp, Homo sapiens
  misc_feature (191)..(191): n is a, c, g, or t
gcggggggacgggggttgtagctaaattgatgtagtgcctagttaacatgtaggagatcctgcattcctccttcagcattgccagaagttattaattaaaaagaaaaccttaagatggctttggtggtgcaccttaatcttagcttgtggaggagggcaggaaggctccagttcaagttcaccgtcattgngtagtgagttagaggccaacctagactccatgagaccacgccacgccacgccaaaaaaaagtgggagaacagaagaatcagcatacaataacatgcatatgtataccgtacacacacacatacaataacatacatgtgtatattgtacacacacgtataataacatacctttgtatattgtacacacacatacaaaaacgtgtgtatattgtacatacacacaacatgcagtcgacgc

SEQ ID NO: 631195 - DNA, 1401 bp, Homo sapiens
  misc_feature (248)..(248): n is a, c, g, or t
  misc_feature (276)..(276): n is a, c, g, or t
  misc_feature (278)..(279): n is a, c, g, or t
  misc_feature (284)..(284): n is a, c, g, or t
  misc_feature (340)..(340): n is a, c, g, or t
  misc_feature (343)..(344): n is a, c, g, or t
  misc_feature (347)..(347): n is a, c, g, or t
  misc_feature (351)..(351): n is a, c, g, or t
  misc_feature (424)..(424): n is a, c, g, or t
  misc_feature (428)..(428): n is a, c, g, or t
  misc_feature (434)..(434): n is a, c, g, or t
  misc_feature (442)..(442): n is a, c, g, or t
gtgcgggtgatctagaggatcccgctgccgctactactacctaagtgcgtgccgccacccgatggaagattcgatggacatggacatgagccccctgaggccccagaactatcttttcggttgtgaactaaaggccgacaaagattatcactttaacggctgcgccgccacctttaaccaacctttggccgaacccccttcgggcccaaccaaccccaccccaccccttggccaacggcccacccagnttactccttctctacacgccacacccgngnntcagntttagcgcggctggtgcaaaggatgagttgcacattgttgacacgggggccccccnaannggnctantggccaatgaattacgaaggcagtccaattaaagtaacactggcaactttgaaaatgtctgtacatgcccaanaaanccgggnggcctctntccccagccaacggtttcccttgggggctttgaaataacaccaccagtggtcttaaggttgaagtgtggttcagggccagtgcatattagtggacagcacttagtagctgtggaggaagatgcagagtcagaagatgaagaggaggaggatgtgaaactcttaagtatatctggaaagcggtctgcccctggaggtggtagcaaggttccacagaaaaaagtaaaacttgctgctgatgaagatgatgacgatgatgatgaagaggatgatgatgaagatgatgatgatgatgattttgatgatgaggaagctgaagaaaaagcgccagtgaagaaatctatacgagatactccagccaaaaatgcacaaaagtcaaatcagaatggaaaagactcaaaaccatcatcaacaccaagatcaaaaggacaagaatccttcaagaaacaggaaaaaactcctaaaacaccaaaaggacctagttctgtagaagacattaaagcaaaaatgcaagcaagtatagaaaaaggtggttctcttcccaaagtggaagccaaattcatcaattatgtgaagaattgcttccggatgactgaccaagaggctattcaagatctctggcagtggaggaagtctctttaagaaaatagtttaaacaatttgttaaaaaattttccgtcttatttcatttctgtaacagttgatatctggctgtcctttttataatgcagagtgagaactttccctaccgtgtttgataaatgttgtccaggttctattgccaagaatgtgttgtccaaaatgcctgtttagtttttaaagatggaactccaccctttgcttggttttaagtatgtatggaatgttatgataggacatagtagtagcggtggtcagacatggaaatggtggggagacaaaaatatacatgtgaaataaaactcagtattttaataaagta

SEQ ID NO: 631196 - DNA, 188 bp, Homo sapiens
catgcctcttaacgacgcatatgccatatgccaccttttttttaaatttttttatttcactttcccttctttcatgatcatttgcaccattcggatagaacttttttccactatttggatatccgtgaattcgattaagatacaatacccagggtagatgtttaaaatggaaaatatctgaactttag

SEQ ID NO: 631197 - DNA, 1243 bp, Homo sapiens
ccctggtgtgattccgtcctgcgcggttgttctctggagcagcgttcttttatctccgtccgccttctctcctacctaagtgcgtgccgccacccgatggaagattcgatggacatggacatgagccccctgaggccccagaactatcttttcggttgtgaactaaaggccgacaaagattatcactttaaggtggataatgatgaaaatgagcaccagttatctttaagaacggtcagtttaggggctggtgcaaaggatgagttgcacattgttgaagcagaggcaatgaattacgaaggcagtccaattaaagtaacactggcaactttgaaaatgtctgtacagccaacggtttcccttgggggctttgaaataacaccaccagtggtcttaaggttgaagtgtggttcagggccagtgcatattagtggacagcacttagtagctgtggaggaagatgcagagtcagaagatgaagaggaggaggatgtgaaactcttaagtatatctggaaagcggtctgcccctggaggtggtagcaaggttccacagaaaaaagtaaaacttgctgctgatgaagatgatgacgatgatgatgaagaggatgatgatgaagatgatgatgatgatgattttgatgatgaggaagctgaagaaaaagcgccagtgaagaaatctatacgagatactccagccaaaaatgcacaaaagtcaaatcagaatggaaaagactcaaaaccatcatcaacaccaagatcaaaaggacaagaatccttcaagaaacaggaaaaaactcctaaaacaccaaaaggacctagttctgtagaagacattaaagcaaaaatgcaagcaagtatagaaaaaggtggttctcttcccaaagtggaagccaaattcatcaattatgtgaagaattgcttccggatgactgaccaagaggctattcaagatctctggccgtcttacatttctgtaacagttgatatctggctgtcctttttataatgcagagtgagaactttccctaccgtgtttgataaatgttgtccaggttctattgccaagaatgtgttgtccaaaatgcctgtttagtttttaaagatggaactccaccctttgcttggttttaagtatgtatggaatgttatgataggacatagtagtagcggtggtcagacatggaaatggtggggagacaaaaatatacatgtgaaataaaactcagtattttaataaagta

SEQ ID NO: 631198 - DNA, 701 bp, Homo sapiens
ggcaaactgagctgacatctaaaagcctttcatagtgataaataagaagtggggcacaccctactctctgcagacaggagatgatgaaccacttcatggacatcctgctgctccatacgctactgatgcgttactccctaaaactcttgaacaagcactgcacctctactagcagataatcattcacggttgaaagggacctgatcacactatcctccgatgcacataagatactgacgccctatcaatatgtcatactcaaaaccaagcaggacaatcaggatatacacaagcatggcatggaggatacagctcacagatgcattgtgactgagtaccaagaaatcatacctcttgggagaactgcgagaaccgagtagatatttacagctatgtatataagcgagaatgcagaaatcttggatgctccaatttcagtagataccgcttgacctgcctataccttaaagatgcacgctgcacacgagtcatatattaagacatacttgaaagttactgtacctcaacattcatgcactacaaagacataactatctgcgctggcgaggataaaccatggccacattgcacatgtcgtcttgtacgatgaacatgtataggcccgttgttactgggtactacccaccaaataggggttgttgccttcagactggacatataaccgtctgcctacattgggt

SEQ ID NO: 631199 - DNA, 450 bp, Homo sapiens
ctcgtagggtaattctatgtttaactttttgaggaactgccaaattattttttacagtgcctgaactgtttggggttcccactagcaatgcacaagagttccagtttctcccacatcctagccaatacttgttactttccatttttaaaagtaaataatagcagccaggcagggtggctcacacctgtattcccagcactttgagtggttgaggcagggaggatggattgaggctgggagttcgagaccagcctgggcaaaatggcaagacctcacctttacaaaaaaatttaaaaatttcctgagcatggtggcatgtgtctgtgatcccagctactccataggctgaggcgggaagatcatttgggcccaagaagtcaaggctgcagtgagccatgacggcaccactgcactccagcttgggctaccttgccccaaaaaaaaccacat

SEQ ID NO: 631200 - DNA, 1743 bp, Homo sapiens
  misc_feature (891)..(892): n is a, c, g, or t
  misc_feature (906)..(906): n is a, c, g, or t
ccctggtgtgattccgtcctgcgcggttgttctctggagcagcgttcttttatctccgtccgccttctctcctacctaagtgcgtgccgccacccgatggaagattcgatggacatggacatgagccccctgaggccccagaactatcttttcggttgtgaactaaaggccgacaaagattatcactttaaggtggataatgatgaaaatgagcaccagttatctttaagaacggtcagtttaggggctggtgcaaaggatgagttgcacattgttgaagcagaggcaatgaattacgaaggcagtccaattaaagtaacactggcaactttgaaaatgtctgtacagccaacggtttcccttgggggctttgaaataacaccaccagtggtcttaaggttgaagtgtggttcagggccagtgcatattagtggacagcacttagtagctgtggaggaagatgcagagtcagaagatgaagaggaggaggatgtgaaactcttaagtatatctggaaagcggtctgcccctggaggtggtagcaaggttccacagaaaaaagtaaaacttgctgctgatgaagatgatgacgatgatgatgaagaggatgatgatgaagatgatgatgatgatgattttgatgatgaggaagctgaagaaaaagcgccagtgaagaaatctatacgagatactccagccaaaaatgcacaaaagtcaaatcagaatggaaaagactcaaaaccatcatcaacaccaagatcaaaaggacaagaatccttcaagaaacaggaaaaaactcctaaaacaccaaaaggacctagttctgtagaagacattaaagcaaaaatgcaagcaagtatagaaaaaggtggttctcttcccaaagtgganngccaattcatcatnatgtgaagattgcttccgatgatgaccagaggctattcaagatctctggcagtggaggaagtctctttaagaaaatagtttaaacaatttgttaaaaaattttccgtcttatttcatttctgtaacagttgatatctggctgtcctttttataatgcagagtgagaactttccctaccgtgtttgataaatgttgtccaggttctattgccaagaatgtgttgtccaaaatgcctgtttagtttttaaagatggaactccaccctttgcttggttttaagtatgtatggaatgttatgataggacatagtagtagcggtggtcagacatggaaatggtggggagacaaaaatatacatgagaatggaaataaaactcagtattttaataaaaaaaaaacaacgaaaaagaagaacacatcaaacacgactgaaaagcaccctgaacagcactggaatgggcacgcgaaaacgaataagaccgagcaccacaccgctcgcagcccgtgccaggcacccagccgcgcccacacctcgtagcgttcccacagaggcgcacccacgagcttagcatcaggccaggagaaaagcacgaaccaaagccgccccaatagcagcgcgaagccacccacaaaagggcacatgggaggggagaaccaaagcttgcacgcaacacaagcgaaggagcacccacacctggacaaccaagatccggcgcacactccacggtgcagagaagcaacccgctccgcgcgccaatccggcaccacggcaccaaagcgatgccggacgagtatacaggacggacacagcgaagcagtaaaacacggaagaaaaag

SEQ ID NO: 631201 - DNA, 883 bp, Homo sapiens
atggcctataaggatgtctaccactaggtgggcgacaggccagactctatgaagcctttaccttccttaagggtctggagagctgtgatcttggtccatgcagaaaatggagattggatagctcaggaacaaaagcggatcctggagatgggcatcatggggtcccgaaggccatgcggcgagcaacctgaaagctggagcgccgaggcggtgtgccgggccatcaccattgcgggtcggatcaactgtcctgtgtacatcaccaaggtcatgatcacagcagtgcaggcgacatcatctgctctggccaggaagaaacgggcccctagttttaggagagcccattgctcgcatctggggaccgatgggagccattactgggagccagaactgggccaaggcatgcggcgttcgtgacttcccctcccctgagtccggaatctagcaggtcggcgagctacttgacattcctactggcctgtgaaggacttgcaggtcaacaggcagacggaccattgtccctacagagtgcccagaaggcggtgtgcaaggacaactttaacctgatccccgagggtgtcaacgggatagaggagtggatgacggtcgtatggcaccagggatgtggtatggccacttgcatgacgatcgacggatacgggtgacccagcaacgatgcagcaggaccatgatcggtgccaaggacggccgacgtgagaggatcagattccgagggacatctagaacccgaaaggtgaaagccaaagccaaggccagaggaggggacaaacacaagaagaggccgacccagtgacaccacgccagagacagaacacgaaaggagcacaacaaagaccgaacaacacgacaacaaacggacgac

SEQ ID NO: 631202 - DNA, 1223 bp, Homo sapiens
ccctggtgtgattccgtcctgcgcggttgttctctggagcagcgttcttttatctccgtccgccttctctcctacctaagtgcgtgccgccacccgatggaagattcgatggacatggacatgagccccctgaggccccagaactatcttttcggttgtgaactaaaggccgacaaagattatcactttaaggtggataatgatgaaaatgagcaccagttatctttaagaacggtcagtttaggggctggtgcaaaggatgagttgcacattgttgaagcagaggcaatgaattacgaaggcagtccaattaaagtaacactggcaactttgaaaatgtctgtacagccaacggtttcccttgggggctttgaaataacaccaccagtggtcttaaggttgaagtgtggttcagggccagtgcatattagtggacagcacttagtagctgtggaggaagatgcagagtcagaagatgaagaggaggaggatgtgaaactcttaagtatatctggaaagcggtctgcccctggaggtggtagcaaggttccacagaaaaaagtaaaacttgctgctgatgaagatgatgacgatgatgatgaagaggatgatgatgaagatgatgatgatgactgaagaaaaagcgccagtgaagaaatctatacgagatactccagccaaaaatgcacaaaagtcaaatcagaatggaaaagactcaaaaccatcatcaacaccaagatcaaaaggacaagaatccttcaagaaacaggaaaaaactcctaaaacaccaaaaggacctagttctgtagaagacattaaagcaaaaatgcaagcaagtatagaaaaaggtggttctcttcccaaagtggaagccaaattcatcaattatgtgaagaattgcttccggatgactgaccaagaggctattcaagatctctggccgtcttacatttctgtaacagttgatatctggctgtcctttttataatgcagagtgagaactttccctaccgtgtttgataaatgttgtccaggttctattgccaagaatgtgttgtccaaaatgcctgtttagtttttaaagatggaactccaccctttgcttggttttaagtatgtatggaatgttatgataggacatagtagtagcggtggtcagacatggaaatggtggggagacaaaaatatacatgtgaaataaaactcagtattttaataaagta

SEQ ID NO: 631203 - DNA, 1018 bp, Homo sapiens
ccctggtgtgattccgtcctgcgcggttgttctctggagcagcgttcttttatctccgtccgccttctctcctacctaagtgcgtgccgccacccgatggaagattcgatggacatggacatgagccccctgaggccccagaactatcttttcggttgtgaactaaaggccgacaaagattatcactttaaggtggataatgatgaaaatgagcaccagttatctttaagaacggtcagtttaggggctggtgcaaaggatgagttgcacattgttgaagcagaggcaatgaattacgaaggcagtccaattaaagtaacactggcaactttgaaaatgtctgtacagccaacggtttcccttgggggctttgaaataacaccaccagtggtcttaaggttgaagtgtggttcagggccagtgcatattagtggacagcacttagtagctgtggaggaagatgcagagtcagaagatgaagaggaggaggatgtgaaactcttaagtatatctggaaagcggtctgcccctggaggtggtagcaaggttccacagaaaaaagtaaaacttgctgctgatgaagatgatgacgatgatgatgaagaggatgatgatgaagatgatgatgatgatgattttgatgatgaggaagctgaagaaaaagcgccagtgaagaaatctatacgagatactccagccaaaaatgcacaaaagtcaaatcagaatggaaaagactcaaaaccatcatcaacaccaagatcaaaaggacaagaatccttcaagaaacaggaaaaaactcctaaaacaccaaaaggacctagttctgtagaagacattaaagcaaaaatgcaagcaagtatagaaaaaggtggttctcttcccaaagtggaagccaaattcatcaattatgtgaagaattgcttccggatgactgaccaagaggtctattcaagatctactggcagaggaggatgtctctttgaagaacatcagagggttctaatctcgtctgaaatat

SEQ ID NO: 631204 - DNA, 311 bp, Homo sapiens
tagtgggggtggcagaggtctctttgcttcattcagccctagctctgtagagaaatgcaaacctcgactctcaaggatgtgaggagcacaagttcatttctgctgccgcgccgaccctgcaggctccattgtgcccaggttgaactctgttgtgttgctcaggttctaggagtccctatcctgaaaatatgcgggttcgtcataggttccttctcaaagtagtaaagcttttccacttttatacgtgcccagtaaatgctctgattctggcaattaagacgaataatttaataaaacacatgttgcttctt

SEQ ID NO: 631205 - DNA, 1373 bp, Homo sapiens
gagtccggtggtgagtccgcggtgcctgacgcagggttagtgcgtctgagtaggctacgactgatgtcttgttttatcctacgcgatgcacgctcttgtgctcatcgcatatcacgttagacgttgcgattgcctgcacacacacgaatgagaacgattcggatgggacaatggagcagttgagcgcacccatgatggaccactagggaagctatcgtgtgtcggttgtgaactaaaggccgacaaagattatcactttaaggtggataatgatgaaaatgagcaccagttatctttaagaacggtcagtttaggggctggtgcaaaggatgagttgcacattgttgaagcagaggcaatgaattacgaaggcagtccaattaaagtaacactggcaactttgaaaatgtctgtacagccaacggtttcccttgggggctttgaaataacaccaccagtggtcttaaggttgaagtgtggttcagggccagtgcatattagtggacagcacttagtagctgtggaggaagatgcagagtcagaagatgaagaggaggaggatgtgaaactcttaagtatatctggaaagcggtctgcccctggaggtggtagcaaggttccacagaaaaaagtaaaacttgctgctgatgaagatgatgacgatgatgatgacgaggatgatgatgaacgatgatgcatgatgatgacttttgatgatgaaggaactgaagaaaaagcgccagtgaagaaatctatacgagatactccagccaaaaatgcacaaaagtcaaatcagaatggaaaagactcaaaaccatcatcaacaccaagatcaaaaggacaagaatccttcaagaaacaggaaaaaactcctaaaacaccaaaaggacctagttctgtagaagacattaaagcaaaaatgcaagcaagtatagaaaaaggtggttctcttcccaaagtggaagccaaattcatcaattatgtgaagaattgcttccggatgactgaccaagaggctattcaagatctctggcagtggaggaagtctctttaagaaaatagtttaaacaatttgttaaaaaattttccgtcttatttcatttctgtaacagttgatatctggctgtcctttttataatgcagagtgagaactttccctaccgtgtttgataaatgttgtccaggttctattgccaagaatgtgttgtccaaaatgcctgtttagtttttaaagatggaactccaccctttgcttggttttaagtatgtatggaatgttatgataggacatagtagtagcggtggtcagacatggaaatggtggggagacaaaaatatacatgtgaaataaaactcagtattttaataaagta

SEQ ID NO: 631206 - DNA, 123 bp, Homo sapiens
tcacttggcttaccctaaactggagctaagacacttcatctcacttttgacacccccagcccccaaaatatgtgaagcccagtgagcagccaggcagcactttcatagccagcaggcttcaaa

SEQ ID NO: 631207 - DNA, 276 bp, Homo sapiens
tcagatgcaacatttggtatccattttacctttcatgtactgccaaactagcacaagtgttaaaattacttgtctctacaaaaatttagtcacagcggagtggaatctctccatcttgtaagattacttttaacacgttggcatcctgaggtggttgtgaattattctgaagactgttggtaaggaacatctttctatttactgctatgggaaagaagaggatgaccgcgtgaatatgtgtgcctgtgtatgtgtgtatttgtacggtgtcgctat

SEQ ID NO: 631208 - DNA, 1784 bp, Homo sapiens
gatattaaacagaacggtcagccttcaaaaaaaaaaaaaaaaaaaaaaaaaaaaaaaaaaaaaaaaaaaaaaggggggcaaatataaaaaatttcaccacaaaaaggggagccaaaaatataacaacaataccaagatatttgtgtggacaaaaaggggagtcccacatataaaggaggagtagtgaaattatagagacacatgggccaagtagcacagagttataaaaagctgaaaaaggtgggagcacaagtttggcaacacaggggcacatctgatggtgtaaaggaggcacactattatacatcttgtaggggggtgagacacaactatatgtgagcaaacacaattaacaccataacaaacaaatattttaaaaaacactctaaaaaagaggaacaatagtatacagagaatcttatcaaaaacgagattaattaccacgggagtgcttaaaaaacacacctgaggagcgggacatactagatgtcgctagcaccgccggtgtaccgacaccaactcttattagcccacacactcacagcaacgtacatgtgatcacgattcgactcagcagaaaccactcttagtatactccacacacaaagagagagagagatagcggcgacacaccactgcactcgcgatcacagagacataaaaatatcaaaaaaaataaatatacaacaacaaatacaacacacccaaaaaataaagcaaaacaatcactcacacacgtacatcacgtcaatctaaacagtcaaaaaatataaaaaatacacacattctatcaacaaaaacacgaaaacaaaaaaagaaaaacaacacaaaatcaaaaacaaacataacttaaaacaaacaacaatcatataataaaaaaaataagagagaagacaagacgcagatagagagagacgggagagaaggagacaagacgagagccgacgacacgaacgaggcacgacataggaaggagaaaaggtctaccgaggtgcgaacacccagactcaagatcgaagggaatcaaaacggaccgacagaagaacacagaggcgaccacgacagatacgaagacgaaccgagaacaacaaagagacacaagaacaaacaagaacaacaaaacaaaagcaaaacagccaaggccagacgacacacaccgaaaacatgcgaagaaatcggacacgacaagaagagacagagcacggaagagaagacgagagagcaacagcacaacatcgaagaccagaagacaccagacaagagccgaccagcccagaggcaacccaagtagagcgcgtacgacaggaggatgaccggacgagcgtagcggcagcgagatggaaggccacgacgtcagctgccgcgagtcggcgaacgcaggcagacggtgcacgagcaccagacaacgcgaatcgaagcagacgcgacgaagagcgaacgcagagcagcacagaaaacggcacagataggaaaggagatagagcgagaagaggacaggagcgggagcaggccaggacggagagaaaaaagacacaagaaagagagagacatagagacgaagaagaggaacggtgagacgcagacgagatgagaggcgagatggagaggaggagagggtagatgagctgacgggggatggtcacgaaagaggcgagagtaagctaccacgatcaaccactggtacgaggctagaggatgaatagacagcagaagcagagcgagaaggcacaatagaagcagtagcaagcgatgggtaggtcgctttgccaggtcgtcggtgtgcg

SEQ ID NO: 631209 - DNA, 1008 bp, Homo sapiens
  misc_feature (15)..(15): n is a, c, g, or t
  misc_feature (19)..(19): n is a, c, g, or t
  misc_feature (32)..(32): n is a, c, g, or t
  misc_feature (34)..(35): n is a, c, g, or t
  misc_feature (47)..(47): n is a, c, g, or t
  misc_feature (51)..(52): n is a, c, g, or t
  misc_feature (60)..(61): n is a, c, g, or t
  misc_feature (72)..(75): n is a, c, g, or t
  misc_feature (82)..(82): n is a, c, g, or t
  misc_feature (97)..(97): n is a, c, g, or t
  misc_feature (141)..(141): n is a, c, g, or t
  misc_feature (163)..(163): n is a, c, g, or t
  misc_feature (738)..(738): n is a, c, g, or t
  misc_feature (804)..(804): n is a, c, g, or t
  misc_feature (807)..(807): n is a, c, g, or t
  misc_feature (825)..(825): n is a, c, g, or t
  misc_feature (836)..(836): n is a, c, g, or t
  misc_feature (867)..(867): n is a, c, g, or t
  misc_feature (934)..(934): n is a, c, g, or t
  misc_feature (943)..(943): n is a, c, g, or t
aagtgttacgtccgngtangatatgcgacagngnngggctctttcanaaanncttgatgnntgacacacccnnnntcctttngccgacccaagagtntgggagttgtagtaatcatcaagagaatttggggcttccaagtngttcgggccaaggacctgaganctgaagggttgactttacccatttgggtgggagtgttgagcatctgtccccctttagatctctgaagccacaaataggatgcttgggaagactcctatttgtggcttccaagttgttcgggccaaggacctgagacctgaagggttgactttacccatttgggtgggagtgttgagcatctgtccccctttagatctctgaagccacaaataggatgcttgggaagactcctagctgtcctttttcctctccacacagtgctcaaggccagcttatagtcatatatatcacccagacataaaggaaaagacacattttttaggaaatgtttttaataaaagaaaattaccaaaaaaaattttaaagacccctaaccctttgtgtgctctccattctgctccttccccatcgttgcccccatttctgaggtgcactgggaggctccccttctatttggggcttgatgactttctttttgtagctggggctttgatgttccttccagtgtcatttctcatccacataccctgacctggccccctcagtgttgtcaccagatctgaatttgtaacccnctgagaggacagagagaaataagtgccctctcccaccctcttcctactggtctctctatgcctctnctncagtctcgtctcttttancctggcccctntcccttgggctctgatgaaaaattgctgacntgtagctttggaagtttagctctgagaaccgtagatgatttcagtttctaggaaaatctaaaccgcnttgattacntagaactgaaatcatctacggttctcagagctaggaaaataaaacccgttgattactaaacaaaa

SEQ ID NO: 631210 - DNA, 871 bp, Homo sapiens
  misc_feature (15)..(15): n is a, c, g, or t
  misc_feature (19)..(19): n is a, c, g, or t
  misc_feature (32)..(32): n is a, c, g, or t
  misc_feature (34)..(35): n is a, c, g, or t
  misc_feature (47)..(47): n is a, c, g, or t
  misc_feature (51)..(52): n is a, c, g, or t
  misc_feature (60)..(61): n is a, c, g, or t
  misc_feature (72)..(75): n is a, c, g, or t
  misc_feature (82)..(82): n is a, c, g, or t
  misc_feature (97)..(97): n is a, c, g, or t
  misc_feature (141)..(141): n is a, c, g, or t
  misc_feature (163)..(163): n is a, c, g, or t
  misc_feature (601)..(601): n is a, c, g, or t
  misc_feature (667)..(667): n is a, c, g, or t
  misc_feature (670)..(670): n is a, c, g, or t
  misc_feature (688)..(688): n is a, c, g, or t
  misc_feature (699)..(699): n is a, c, g, or t
  misc_feature (730)..(730): n is a, c, g, or t
  misc_feature (797)..(797): n is a, c, g, or t
  misc_feature (806)..(806): n is a, c, g, or t
aagtgttacgtccgngtangatatgcgacagngnngggctctttcanaaanncttgatgnntgacacacccnnnntcctttngccgacccaagagtntgggagttgtagtaatcatcaagagaatttggggcttccaagtngttcgggccaaggacctgaganctgaagggttgactttacccattgggtgggagtgttgagcatctgtccccctttagatctctgaagccacaaataggatgcttgggaagactcctagctgtcctttttcctctccacacagtgctcaaggccagcttatagtcatatatatcacccagacataaaggaaaagacacattttttaggaaatgtttttaataaaagaaaattaccaaaaaaaattttaaagacccctaaccctttgtgtgctctccattctgctccttccccatcgttgcccccatttctgaggtgcactgggaggctccccttctatttggggcttgatgactttctttttgtagctggggctttgatgttccttccagtgtcatttctcatccacataccctgacctggccccctcagtgttgtcaccagatctgaatttgtaacccnctgagaggacagagagaaataagtgccctctcccaccctcttcctactggtctctctatgcctctnctncagtctcgtctcttttancctggcccctntcccttgggctctgatgaaaaattgctgacntgtagctttggaagtttagctctgagaaccgtagatgatttcagtttctaggaaaatctaaaccgcnttgattacntagaactgaaatcatctacggttctcagagctaggaaaataaaacccgttgattactaaacaaaa

SEQ ID NO: 631211 - DNA, 222 bp, Homo sapiens
caactctattgccttccatgccattccattcgattacattccatgcgattccattcgaaatcgaatcaattacattgcaatccattactattgagtccgttttattccagtccactgcattctggtccattccatttgattccattccattctattccattccatacagttgcattccattggattccattctatatctataaattcaattcgaggtcgacg

SEQ ID NO: 631212 - DNA, 284 bp, Homo sapiens
tacatagatagaaactgacattactcagatgaaggatgatgagaaaacggcaccagttgagagcagcagatggagaacatgcagcaatgacattgcacagtacaccccctgatagagggctcctatgccccccgcaggagagagttcatgcattgccaaatttgtagatggagaatggtaccgtgcccgcagtagagacagtcgagtctcctgccaaaatacatgtcttctacattgactacggcaaaagagaggtcctgccaatccacccgactgggtcccct

SEQ ID NO: 631213 - DNA, 1287 bp, Homo sapiens
gctcatcgccaggacgtcctcgtggaagtgacatcgtctttaacaccctgacgtggcacatccctgacgcaccgaccgatgatgcccagggaagacagggcgaactggacagtccacactacttccttctgctcatccaactatcggatgattactccgacatgtatcattgtagggagcagacaatgtggagcatccaagcagatgcagcagatcacgcatgtacatatcagcgggaaggctgtggagctgatgaggcaagaacaacatgatgcagcaagagaccatcacgacgggacacactgaaacaacacacacccagacacaggaagcaaccggccgccctcacactccagagggccaccgagccacctacgcagtacaccacacggacaggacctccacccgaacactcccacccaccactgacgaaagggacacaaaaacgagtgccaacaaatgacagacacagaaacaagagaagaacaacaggaaaccaaacgagacacgaccacaggacgacacaaaacaaaaacacaaacggatcaacagagaacaccaaacaaaagacacatcccagacacacacaaaacaggcaaatacaccagcacaacacaaccacaagaaaaaaaagcaccaaagagaaccaacaactcggaacctcccccaacccagcacagcagccagactgcacatcaaagacccgggaagaacaccaccacgaaaagaccaacgacagcaaaaccacacgaacaccccaacggacacaacaaaataatacaacaaatatcacaaagggcagacgagacaatccaaaaacaaagaaacgaaacaaggacacaacacaaaaaacaacaaaaacgaaaagaaaaaccacacacagagaaccaacgaaaaacaagagaacaagacaagagagcacagcaacagacaaacccaaagaaaagacaaaagaaagcaacacaacaaaagatagaccagaaaacacaaaaacaaccccaaagcggagaaacaaccaccgagacaagacataacaacaaaacataccacaaccaaaagccaaaaagaacagacacaagataggagacacaagaaaaagagaaagacacacagccaacaccgaacaacaccaacaacgtacaaacagcacaaaacaagtaacaaacaaacaaaccagcaacaaaaacgcagaagaacaaaaccacagacacacgagtcgaagcacgagacagacaaaaacacgacccaccacactaagcaacaccacgaacgaccaaacagataacc

SEQ ID NO: 631214 - DNA, 348 bp, Homo sapiens
ggacacagaaagtttactgaaaaatattgaattaatagatacactatcattagcatttaccccaacagacaaaaatcttttaataaaggctgaagatttttatttgtctttgggacgaccaattttcaatcctattaattttgaactttacaaaggagaaataatgtccattgaaggcaataacggatcagcgccaactacatcatgtatgacatgtgtcatttgcgagattgcatacacataggcgggatcaaaaaatttctggcatttctactttttcaatggattgtcacattatcttatttccatccttttaatgggtttgggggctaattttactcttaagtt

SEQ ID NO: 631215 - DNA, 463 bp, Homo sapiens
ctgggcaaaatacgcccacgtacggtccctgatcagaactttgccgcacacgctgctcccctgacggacgacgcagggacgcgccgacagcacgaacccgcgcgacgacgtgtagtgcgagcacgagcaccgcgcctcgccgtcgggacgtcgccgcagcacgcgcgcgtgagcgtccacgccgcacacggggcgcacgcaccgcgcgggccgtgctggctgcgcccatagcgcatgtggacgaggtcgtgagcgtgcacgcgcgccagacaagtgcacggccgcgagcttcacgacgtgtgcacctggcgcatccgacgcacccgcgggcgcacgcacgtcctggacggcgacgacggcccgcccccggtcgcagcccggagtgcgtgcccgggagtgggctgacctggcctgctgacgggcatgccgttgcatggtcggcccggcgtctgcccgcacccag

SEQ ID NO: 631216 - DNA, 1810 bp, Homo sapiens
  misc_feature (295)..(295): n is a, c, g, or t
  misc_feature (650)..(650): n is a, c, g, or t
atagactgtaaacacttcgaggcatatttcacctccgctaccataatcatcgctatcgaccactcgagacgatcagaggtatttagtctgctcatcgaccagcgactcgcatcggaagtcaagtatggaaatgagtcgtgcgtggcagtatgactcgtgaggcccatagtgcatatacatcatatatcatttatacaaccggtaaagttaggccatgtacatgaacaatagttattgtaggcaaaaccgtgcatcaccgtagcaccgagtcgatatcttagcggcgtaccaacgntacgctacgctcttgtataggcgtgcgagcgtatctcactcatggttccatagctcgaatgtaggtagtgcgtggtaattctgacacaatcgattagtgcatggtcattttcagttacgatcatggagtcttacggcacgtgagtttgcttcgagtgtcattatcaaacacactttatggacacaagacaatctcttagcggaccccagagagagtacgcgaatatattcaaaccataaatccaagataatatgcgacgtccgagagggtggtacccttccatataacttaatatacgtttactcacatctatatccatctctattatctatccgacagacccttatttacccangtattagttggcacccctgtacacgtgttttaccatacggtagaaaacattaaacacacaccggaagtgggccacgataagccagcgccaatccaattgaaagagaatctacttccccttcactgcaagatgcgttgcccaagagggcctccaattctcccacgtttttttccctccgttaaatctatgggctgaggtgttaaacctaattgcggaacgtgccacctccctatccacttggcacgtgctgtgcacgcaaacatgacaccattattccgccattgtcccggaccagctgccggccacaccagccacgttccctattaacaaataaaggttcacggcacagggaacaaccgcccgcgtgcggccaaataaaacaagtgcccgcttgagcaagtcttggggcagcgataaatacttgacggacttggacccccgcccccaaccacaataatcccaacgaaggcacttcttcggcacagaggaaaaaatcccccgggctgtcagttacccacttacactacacttcctagcgaaccgcacatatataacaggagcgaacgccgtacaatgtccggatacagactcctctctcaaaaaaggtcttggcgctcatatccgaagcgtcccaaaaagcccccgaatatggtgccccttctccctgtgccactttttcgctcacaacagcgcgacacgatgacgaagcaccgccatccgccaccatcacctccgcatctcctacatatcatcctcttccaagcaccaccgcattccatctacatccaactcaagaactactcctatccacctacatacatacataccaccccctacatctacttcttcccaccccccctcctctctctacatcacaaaactcgctccaactaaatactatctgcttactctctactaccatcctccacctccctccctctatatacaccccgtactcccaagccacaccatcactacccccactctcttgaacacgcctcctggcgcacctaccacccacaacccacccacaccaactactaccatccgcctcacaccaccacaacaacctctccgtacccaccacctctctcccaccctctcccacctaatcaccccccctcccaacctcacctcctacctaccacacacccgccaca

SEQ ID NO: 631217 - DNA, 384 bp, Homo sapiens
  misc_feature (10)..(10): n is a, c, g, or t
  misc_feature (268)..(268): n is a, c, g, or t
ccttttgaancccccaagattttctttccccctatcattgcctgagccctgctggagcatataattccctatcccattacccatccctcccttttcctttccttaaaaaaagtatttttggctgggcgcggtggctcacaccctggaatcccagcactttgggaggccaaggcgggcagatcacgcagtcaggagattgagaccatcctggccaacaagggtgaaaccccctctctactaaaaatacaaaaaatcagctgggcatggntgcatgcgcctgtagtcccagctacctggaaggctgaggaaggagaatcgcttgaacccgggaggcagaggttgcagtgagacgagatggcaccactgcactccagcctgggcgac

SEQ ID NO: 631218 - DNA, 328 bp, Homo sapiens
gcgtatataggaggctcggtgtacagaagaggaggggctgatgtaacatctgtcattcaggcggatgacactcccgtacgatgagaggccggcccctcccgcttctgacaggaccgtgaccgggactgtgagcgggagcgcagagagcggagctgggagcgagacaaggagcgagaacggcgacgctcccggctcctgggaccggcggaggggctcacggagtcggtataaggagaaactgccacatgaaaaacaccaaaatcaagcttattgtggcattgcgccgtacattccaagagttggaggaccctcaagatgcccctcctcc

SEQ ID NO: 631219 - DNA, 426 bp, Homo sapiens
ctgcggcttgtgctgacgctgtatgctcgcgcacgtcagctgtcgtgggaactaccctctgtagctgagaacggcttgtttattgctaccgagactctattgacattgcgcagcttcagcggcagcagcttcttacggtataaagctgatgcttgctgaagaggctacaagcatacttccgtaggactggtgtaagctttgagcctctagcaggggacatgccttgatgacggattctgcgccggcgtaatgcgagagccgcagaggagaaccgcagcaatcggagaattcaggcctcagaggcctacgagacccttatggacgcctctgtggtagcgagcacccgtgaagacgaactgagcggacccgagggagacccgagcactccagaggaggcctctaccaacgctgaaggcctcggccctg

SEQ ID NO: 631220 - DNA, 1422 bp, Homo sapiens
  misc_feature (491)..(491): n is a, c, g, or t
agcgggctgagctagcgcgttcaggcttggagaggttagtgtggcccgggtcgtccgctcctcgaagcggatgtggcaggccccgagccatggctctcgccgtccagagatcgtatattgtggcgctatgaaggctacaaagtaccgagtatcttcagcatcacagaatgaaagttatgatagatgaagttccaccagagctcggccgtggtacattcctgctggcgagtggaactcacccgatggcgcaccggcgtttcttctggaacgtggattggggtaagacccgaggaaatggttcgattcagcgtctacatggaaaggatagagtggcgaatgagctagcggtgagacaacagaaagagcaaatgctttcatgacatgtatgcgtcgagcccggcctagtctaacagcacggcacttgcgcctcagggagctgaactgacggctcccgtggaaagggtcaaggatgcttccgaaggggaactctnttgaaacgcaggacgtcctcacttctttcaaggctatgatctgccttctctaatgggagtaggagacacggtacctgaagaaatatggtcctctgttggggagcacctcttggggtacatttcttccgcctgaatagttatccttcggttgacccgttgcattgctttgtgggagcgtccacgcaagggatatggaaccgactcctcgcgggcttcctttgttggcacattcctagaagtcccgcgggaggaagattacgtcgtttgttgattcctagtttgattctttgcccacctggggagattctccaacaatcaatactcactaagacccttgcgtacaatgggtgcactcgggttgggatgtatcccattccaataattcttgccgtatgtagtcgattagccacccaatttgattctttcccgcccgaagttcttgttcaccccccattgggcgagattttctgtgcggggggggaacataactcttcgcaggcgcccttcaagcgtgccaatttcggcttttccttcgagaccgtggtggcgccaaggcccctgagacggaacgcaacgggccagttcaacgacggaatttggggaggtttgtggcgattttcctttggattttgttttggacagaaacggtttgtgggctaagaccccggttgcacaaccagactcttcggaccttagaaattatttcggcggaagttggcaactttgacaacccaaaacagaacacgcgtagacacgacactcgctacttccaaagctctgcgctgggagaattcgcgaggacgcaatcacacaggggcgcactgtggaagaacaccctgtattacgaacaagaaggggagtgagacgcacgagattaacaccacaaggagtttgtggttcccccctgtttacacctagacacgagagtcaa

SEQ ID NO: 631221 - DNA, 541 bp, Homo sapiens
gtaaagaaatcaatccaattaaaaatgggcaaaagatttcaagacacatttcaatgaagaggatttacatatggcaaacaaatggaaagttgtttaacatttctagctaatagggaaatgcaaattaagaccatgagatattataacacatttattagagaaccactaaaataaaaaatggtgacaacattaatgctggcaaagatgcagacaaactgatttctcatacattgcaagtggaaatgcaaaatggtttaaccactctggagaattgtttggaagtttcttaaaaattaaacatgcagctatcatatgatcaaactgttgaactactaggtatttattccagagaaatgaaaacttatgttcacacaaatacatatacacaaatgtccaaagcagctttatctgcaatagccaacaaccaaaaacaatcaaaattgtcatcagtaggtgaatggctaaacaaactatggtcatcagtatgctgaatggctaaacaaactgtggtacattcttactgtggaatattacttagcaa

SEQ ID NO: 631222 - DNA, 237 bp, Homo sapiens
catgaggatcccgagagacacgggggattactgcctgccatcttagcactttgagaggccaagacggacagatcacttgaggtcaggaatttgaaaccagcctgaccaacatggtgaaaccccatctctactaaaaatacaaaaaaaaaagttagccaggcttggtggcaggtgcctgtaatcccagctactaggtaggctgaggcaggaaaactgcttgacgggtacctgagctcg

SEQ ID NO: 631223 - DNA, 174 bp, Homo sapiens
tggataaatctggctagattatttgtcacagaaataagttcgttatggaatgtagcataaaaattgtaaatgcccaaaataagaaagttaacagaaaaaaacacaaatgcctagtgatacatgtgtatattcctacaaatatcgcaagcacacattctgaaggttgatttagca

SEQ ID NO: 631224 - DNA, 413 bp, Homo sapiens
aaaattggtagcgataggcggctgggccgagtgggtgtctaggtgccggcgttatgggctacgggatgttgtttggcgacttgtgcttcaagcggtgtcttgctttttggggcagagttttcatcggaggcatgcagagagttaggcttttctcagcaacttgcttttgcagctcttgtgatcttctcggcacagttcaacctgcgttccagctggatcctgatttgcagaggatgcttgtccaggcaggaagccacaatttgagaagccgaaaaaatgctggtattgcacgtgaagcctcatttctttggcaccgtccttggtgggcttgcacaaatttcgcgggaacgctggttcccctttcaaagttcccaaaggtattgttccgggtgggttcacaaacccctggtatc

SEQ ID NO: 631225 - DNA, 209 bp, Homo sapiens
ggaacccaaccggtgtgcgggacagagccagatcctgtgtctccacaaatcctcaaaccaatccgggtgtgttagcacccacacctgtgcccagatacttgcgaggttgtaacgacaggatttgatgatcgcacgagtctgaggccaccatgtctcatgttgacgccgctgcagtccatgattggcagacgacttagatgcttttacga

SEQ ID NO: 631226 - DNA, 1415 bp, Homo sapiens
ccccctccgcgcgcgtggtcgactatagggggtgtatctgtgctttcggtccggtgtttctgcttgctgtcgcctagttgtcgtggatcgcgttggtactgcgaacggtgtttttgtctttggtctgttgttcgggtggtgctgtctcttcagttgcgtgttgctgctgtttgctgctcccttggtggcttgtggtcttgtgtctcacggtcgtgtccgctgtttgtgtgcctttgtttgcagctctcatgctcttgtgttggcttttgttgtcgtgtatgtgtctctgtgccgcttggtgtgcttgcccttctgtttgtcctaggtgttttagtggtcgtgatagattttgtttgggtggcgctggtacccaccgggcacaccgttgtggcctgtggccccattgtgtgtccccatccggttggtggccccgtattggggttgtccgctgcgctggggtgatgtgtggtcgtctgtggatattctctgttgagatattttttatgctctctatggtggggagtatacttgttggccccccccttcttgtggggttgtcaatgtgtggggccccacttgggtactttaataagggagtcccacaaatgagtgttgaaaatagttgataatcccaaataagtgtttgaatgtggtttttccttgaaccttttcctcccgttgtaaccacattcaccggtatgtgactataaaagagatatatatgtggaaacctgccccccggtatggatggaaactgtggggaaaaatttataagtgcctggcttgacccatagtgttaatttttcacactttaataatcgtttttgttaataggctttcatcccaggccacactgttcttgttaaaattgtggggttcactctaatgaaagattccccacgctatctttgggcacgcctcactaggttggtaggaccccacaatttggtgtccacgggcgctcgttttgggcttgggacactggttagaagccacccacaatacccctcttttatgagggagccccccccccatttcatctcgagtattgagaccaccacgtgttccgaggtgcacgttcacgaggcacttcacgaggccacgtagccactgggcacaataccacatgtggtatgactctcttggagagaatgttccccgggccacaatgttcacacagaataagaaaagcttgtgtaatatactatatgtgttatcttggctcttgaaaacttattgagctttaatgcgttttcccacgccctccgaatcacctgactggggccttttgtgtcccccgcaactgactggccgcactgcgcatatcctgcacgtatcccctttacccatatttaaagccaaatttttaattttctaaaccgaattaaactgttccataaaaaatgctcgtccca

SEQ ID NO: 631227 - DNA, 255 bp, Homo sapiens
tgggccagtacgattggactagcagcttgtgctctgtgagcacagcagcagcagtgtgatagccagctcagtgcccatgctctgcagcagctgaggaagctggaccagtgaggggcaggtgtatggtgcctgcgctgaagttctacgaggctgttcccaagggccagtgtatcagagctgacaggcacggtgcattgggcctgctgagcgccgtggagctggcgttcagtgtgaactggggggcagagctgtgca

SEQ ID NO: 631228 - DNA, 436 bp, Homo sapiens
ggcgggcgacttagaggatcccagctccaacaagagaaggtacacaattacaatgacacttcagttgaatgtacacttcacgtctcttcagtggaagtgtcctaaatggatcaccttggatatctggttggctgaaactgagtagataatatttattattcctcacacccacgtggtgtaataatttgcctaagtctctggtatccactcgtttagccttccaaaatttcttcatccattcatggcaccaaaggataatatattagcctcaataaaaatatcatcaattatcaatttggacatacttctacaaagtaaaactgctacaagcgttagatattaatatgttttacattcacaaatcactccaatattcatggaaaatgaccactttaggagttaattagaattccacatacttttggtttctataata

SEQ ID NO: 631229 - DNA, 119 bp, Homo sapiens
agagacagcaagagaatgaagcatgagactgttggccctgggccgagaagaaggctgttggcaaagtgggactgtccaacgaagagaccacctgtccttcgagcagtgagcaccttcag

SEQ ID NO: 631230 - DNA, 178 bp, Homo sapiens
tcgagccggtaccgtgaacgatgtagcgagcgtgatgagggattcattgcgggttgcgagcaggatctggcggtgaaaattctggtcggctgcgcgtcctccatcgtctggagtccgcagcgccgcatttcctcgagcgcatgacccatgcgtgaaatgtcctgcgtatcacggcgca

SEQ ID NO: 631231 - DNA, 316 bp, Homo sapiens
aaggtcaggatcgtagagaagatatcatcagatagatgtgttgcgaactcgatgagctagggatagagcggatgagatactacattgggtgtgacttaaagtaagacgagaatacaagacatataaacagcagaatatcatcaggcagggcatatcacagtaggatcgaaatagccttggagtagccactaaaggctagaaagtgtcatagtggtagataggctccctgaaagaaactgtatgcggaatatgagaagaagagaaaattgggcctcgcctaataaggctgggcatcactgatgggaggaagactgcg

SEQ ID NO: 631232 - DNA, 559 bp, Homo sapiens
ttaagcctgaggcagagcatggcccacaaggaaagtggagtctgtgtcatgggccaagtcttactcctcaaaacagtgtgatgactctgtatggagagctctgtgtgaatactgaagctccatagctgatagctgtcggtgtaagcctactgtcactgtctaaaaataaccatcactgtctaaaaataccgtcactgtctaaaaataccatcactgtatcgatagctgtctgtaaatactggaactctgtggagcacgctctgtaaatactggaactctattgctagctgtaaacggtgtaactcagtataactataccgtaactctaaaaataccataactatgtgtcgacagctgcctataaatgctataactgtattggtagctatgtataagcagcctactctgtatcaatagctgtctgttagaaagctgacatcacattgttgatctaaagcaagcttgtccaacctgcggcccgtgggccacatgcagcccgggacggctttgaatgctgcccaacaccaattcataaactttcttaaaatgttaaaaaaac

SEQ ID NO: 631233 - DNA, 174 bp, Homo sapiens
aaaaaaaaaaattttttttccctttttttttgggggggggggggggggccccccctttttttttggggggggctttgccccccaaaattttttaaaaggtttttttttcccggtttttttgtttttttttttttttttgggggaaaaaaatggtgggggcccccccccccccca

SEQ ID NO: 631234 - DNA, 510 bp, Homo sapiens
  misc_feature (174)..(174): n is a, c, g, or t
atcgtctcccgtggctgggcccaactggtccaggtatggaacccggctaactccaaacttaagaccaaccccttggccccacaggctatttgaacacgggggctgtctctcccaatggatccctctgtgcttttggaggccaggatggcccggccctgttatggggtttccacnaaggccaaccccctttccccctaaatggtgggggcatcatcaaccccctgtggttcaaccccaacccctactggctgtgttgtgcccccggcccccacctccaaatttggggttttaaagggaaggtcccttgttaatgaacttaagccaaaagttttcaggtcccccagcaaggcagaaccccccccgggcccccccccggcctggtttgtttatggcccaactctgttttctggccacccggaccacctggggcgagtgtggccggtggcccttggccccccctaaaagtttttggccgagcctttccaataaaaaaaaaaccggcttttttta

SEQ ID NO: 631235 - DNA, 100 bp, Homo sapiens
aacctgatccacatacccaggcatacctcatgtcaacattcgcagcaaacgcatattgctgccggtccagaactagtacaacgtagttgtatttgattgg

SEQ ID NO: 631236 - DNA, 158 bp, Homo sapiens
  misc_feature (34)..(34): n is a, c, g, or t
ttgaggaccaggagattcacactttctgtgtatnagtaagcattgatttattctggttcttctgtactgaacgtgtggttaacttataattactcccataatgaattatccaatgttctgaaataatcgaatatcttcaaagactatgatctccaaca

SEQ ID NO: 631237 - DNA, 531 bp, Homo sapiens
acaaatggggtaactcttataaaaaccatcaggtctcatgagtcattcactactgtaaaaacagtatgggaaaaaccactgccctgattcaattatctcccactgggtccctcccacaacacatgggaattatgggagctataattcaaaatgagatttggccgaagacacagccaaaccctatcattccacccctggttcttcccaaatctcatgtcctcacatttcaaaacaaattatgccttcccaacagtcccccaaagtcttaactcatttcaggttgaactcacaagtccacagtcaagtctcattgagagaaagtaagtcccttccacctatgagccagtaaaatcaaaagcaagttagttatttcctagacacaatgggggtgcaggcattgggtaaatacacccataccaagtaagagaaattggccaaaacaaggaagttagaggccccatgcaaggccaaaattcagcaaggcagtcaaatcttaaagctccaaaatgatgtcctttgactccatgtctc

SEQ ID NO: 631238 - DNA, 621 bp, Homo sapiens
tttctggtatcgtatatagatttcttcactgggctttttcttcagcttcctcatcatcaaaaccatcatcaacaccaagatcaaaaggacaagaatccttcaagaaacaggaaaaaactcctaaaacaccaaaaggacctagttctgtagaagacattaaagcaaaaatgcaagcaagtatagaaaaaggtggttctcttcccaaagtggaagccaaattcatcaattatgtgaagaattgcttccggatgactgaccaagaggctattcaagatctctggcagtggaggaagtctctttaagaaaatagtttaaacaatttgttaaaaaattttccgtcttatttcatttctgtaacagttgatatctggctgtcctttttataatgcagagtgagaactttccctaccgtgtttgataaatgttgtccaggttctattgccaagaatgtgttgtccaaaatgcctgtttagtttttaaagatggaactccaccctttgcttggttttaagtatgtatggaatgttatgataggacatagtagtagcggtggtcagacatggaaatggtggggagacaaaaatatacatgtgaaataaaactcagtattttaataaagta

SEQ ID NO: 631239 - DNA, 514 bp, Homo sapiens
ccctggtgtgattccgtcctgcgcggttgttctctggagcagcgttcttttatctccgtccgccttctctcctacctaagtgcgtgccgccacccgatggaagattcgatggacatggacatgagccccctgaggccccagaactatcttttcggttgtgaactaaaggccgacaaagattatcactttaaggtggataatgatgaaaatgagcaccagttatctttaagaacggtcagtttaggggctggtgcaaaggatgagttgcacattgttgaagcagaggcaatgaattacgaaggcagtccaattaaagtaacactggcaactttgaaaatgtctgtacagccaacggtttcccttgggggctttgaaataacaccaccagtggtcttaaggttgaagtgtggttcagggccagtgcatattagtggacagcacttagtagctgtggaggaagatgcagagtcagaagatgaagaggaggagaatatgagcggggtcccgagctcga

SEQ ID NO: 631240 - DNA, 583 bp, Homo sapiens
ccctggtgtgattccgtcctgcgcggttgttctctggagcagcgttcttttatctccgtccgccttctctcctacctaagtgcgtgccgccacccgatggaagattcgatggacatggacatgagccccctgaggccccagaactatcttttcggttgtgaactaaaggccgacaaagattatcactttaaggtggataatgatgaaaatgagcaccagttatctttaagaacggtcagtttaggggctggtgcaaaggatgagttgcacattgttgaagcagaggcaatgaattacgaaggcagtccaattaaagtaacactggcaactttgaaaatgtctgtacagccaacggtttcccttgggggctttgaaataacaccaccagtggtcttaaggttgaagtgtggttcagggccagtgcatattagtggacagcacttagtagctgtggaggaagatgcagagtcagaagatgaagaggaggagttcagaagatcacctcagtgcatattagtgacagcacttagtagctgtggaggaatatcactgaggggatcttctgaacatcctctgatcttcg

SEQ ID NO: 631241 - DNA, 819 bp, Homo sapiens
gcatggggtgggggattccatcaaaactgttgtttatgccccatgatttttctttggtcagtaggaggctggatggagtggtgattattcccctggagctaagctcaggagcccgaagggagagactgagactgactcccttatctcttcatattctttattccctaccagatggattgtttattttttgtttttgggagacgggagtctcgccctggtcggccgaggctggagtgtaggtgggcatgatctcgactcactgggaaaatcttgcctcccgggttcaagcgattctcctacctcagcctcccgagtaagctgggattacaggcatgtgccaccacgccaagctaattatgggtactacttacacgtaagagagggggattaacaccatgtgggccaggagggatcatcagaatctctggaccctcgcggaaactggccggcactgaggacctcccaaagtgccggggataacaggcgtgacgccaccagtgcccaggaccccaagagtggcattctcacatttgggactactaacggaggtaacccgcgtccacacaggaggtagtccatcaccgtacgccacacagggaggggagggcacattctggaactctggatactgaaatctgtaccaagccacgaaattaggcgggaaataatatcccatagatcgggacaaccgaagcgcaacatggaggaccattctgtacaaccgtgtcccctccgcaaaattccgaaggatcagaaaacacccccgatatcgggcatgacatacagtcccataaccgggggagaagaagctccatggag

SEQ ID NO: 631242 - DNA, 779 bp, Homo sapiens
  misc_feature (27)..(27): n is a, c, g, or t
  misc_feature (69)..(69): n is a, c, g, or t
  misc_feature (87)..(91): n is a, c, g, or t
  misc_feature (93)..(94): n is a, c, g, or t
  misc_feature (192)..(192): n is a, c, g, or t
  misc_feature (237)..(237): n is a, c, g, or t
  misc_feature (307)..(307): n is a, c, g, or t
  misc_feature (340)..(340): n is a, c, g, or t
  misc_feature (343)..(343): n is a, c, g, or t
  misc_feature (346)..(346): n is a, c, g, or t
  misc_feature (350)..(350): n is a, c, g, or t
  misc_feature (352)..(352): n is a, c, g, or t
  misc_feature (368)..(368): n is a, c, g, or t
  misc_feature (370)..(370): n is a, c, g, or t
  misc_feature (377)..(377): n is a, c, g, or t
  misc_feature (385)..(385): n is a, c, g, or t
  misc_feature (393)..(394): n is a, c, g, or t
  misc_feature (400)..(400): n is a, c, g, or t
  misc_feature (447)..(447): n is a, c, g, or t
  misc_feature (456)..(456): n is a, c, g, or t
  misc_feature (458)..(458): n is a, c, g, or t
  misc_feature (473)..(473): n is a, c, g, or t
  misc_feature (479)..(479): n is a, c, g, or t
  misc_feature (520)..(520): n is a, c, g, or t
  misc_feature (552)..(552): n is a, c, g, or t
  misc_feature (618)..(618): n is a, c, g, or t
  misc_feature (691)..(691): n is a, c, g, or t
  misc_feature (753)..(753): n is a, c, g, or t
atatccggtgccacctcctcaaaagantactgcagattagacaggcagactgcaaagaacaaagaaagnaaataaaggaattaaaannnnntnnttttttttgagacagagtctcactttgttgcccaggctggagcacagtggcgtgatctcagctcgctgcaacctctgcctcctgtgttcaagcaattntcctgaggaggcagaggttgcagtgagctgagatcttgccatcanactccagcctggaggacaagagcaaactctgtctcaaaaaaaaaaaaaaaaagttgtcagcttaaaaaanaccttcaaagagagctttcttatgctctaaaanctntcncttnantttaaaactgtctgcngngtttgangggaaganagataatnngcaaanttacctcgcaatataaggatttgagctggactcctgggattaaagantgtggtttngntcaaaaaaaaaaaanactgcngatgtgaggtaatatggtttttttagttaaaagaggtgttnggaatgtatgcccactcacatttaataaaagnttatgtagcacacaactctgcagcataataccaacaacaggagtgttttaaagcaggatggagaanaaagtagacaatacaacttaaggtttcctttgtcctttcccctgttttcaccatgagaattcagctgaaaaanaactctccagaatgcccacccatattgtcctttgacccaccacattccaaacttctgacttntgatcccaagctcttggagccttagc

SEQ ID NO: 631243 - DNA, 1512 bp, Homo sapiens
caggatcatcgtggccatcatggagaccaacccgtccatcctggaggtcaagtagaggcaggaaggtccagcctgagctggattcgggactccaacaccctggagtggttccgtcagaccatgaggagccaagaccagcaggtcccacagccgacagtgcccagagcatgcagggaaccctcgtgcagctgagctggggccgccaaagaccggggctgccaaaggggcagagggtggtggagaggagagggagaaagggaagtcccagggcccggggtccacagaggatgagggttgtggcagggccgtccatcagcgctgaccttccgggggcccagagcttcccagccctgagtcaagctggccatgaacgcgtacacttcagttcagcaggatgggctggagagcctctctgtgcagcggtgtggggtgagccctgctgtggcctccttgtggtggtccctcttcccacgtgcagccctgttgggaagaaaggaagaaaacaggtccctccaggggtgctgctgcctaagccacccacataagtacgctggtgccgtgtcacccatgttgagccgctcctgatggctgacgggctcccagaccctcacctcggacatggtggtgggggaaggacgggtgggcaaggctggtgcgttccccagctctccctacgctgctcgggccattgcccagccagatgtggtcacctcagtccagctctggggcctccaggccatgtggctgttcccacggcccagtcctcgctgcagtaacccctgggggctctgaccacctatgggggccgggcaggagcctctggggcctccactccgacatcaggacctgagatgaccgctgtgtggcgctctctccctgggcagggtggatgccacaggcccctctggctcccaggtgctgcttctccacaggtgcggcctggcccggcctcctaaaggccacaccctccccacgcacttcccaggccagaatccaaacatcgggaaccctgttttcttctgggtgtgtctcacttagaaatcgtggttcttccccgagggtgcatgttgcaggagggagagggcagggaagactcacagcagagcaggagggggcctgcgcttctcggggtctgcaccccaggcacagcggtgtcaccccgcaggaccgcgggcctgccccaacccccagcattcccgggtgggcccagaccccatcaccaagactggccacccgctgcgtgtgtgtgcgcgcgcgtgtgtgtgcgcgcatgtgtgcgtgcgtgcacgtgtggccccacatccgccgccttccacgctaggatgtaagaggtcgcctcctattgtacatttggggaaagccttgggtgtaaatcagtgtaaacttggaggagagatttttctatcatgtagagtaggtattttttatagattgaaggttgatcaattttttaatactttcaagagaaaactgtgtatacacatgaaatatatatatatatatatatgtata

SEQ ID NO: 631244 - DNA, 275 bp, Homo sapiens
aaatccagatcaaatctactcaagggcaaaatgtcatccccaacaacaatgcaattcggttcagagctatgttgaccactttcctataaatggccttgaagccagtgttatctactgtcagagctatagtaacactttctgctgtgtatttccacatctctaagcaaaaggggaactatgcctggtcaatataaaagttgtatctatgaattccagtgggcgtcatgtagatgtaaagcactggttctcatggcgggggtggggcaatttccctc

SEQ ID NO: 631245 - DNA, 1724 bp, Homo sapiens
caggatcatcgtggccatcatggagaccaacccgtccatcctggaggtcaagtagaggcaggaaggtccagcctgagctggattcgggactccaacaccctggagtggttccgtcagaccatgaggagccaagaccagcaggtcccacagccgacagtgcccagagcatgcagggaaccctcgtgcagctgagctggggccgccaaagaccggggctgccaaaggggcagagggtggtggagaggagagggagaaagggaagtcccagggcccggggtccacagaggatgagggttgtggcagggccgtccatcagcgctgaccttccgggggcccagagcttcccagccctgagtcaagctggccatgaacgcgtacacttcagttcagcaggatgggctggagagcctctctgtgcagcggtgtggggtgagccctgctgtggcctccttgtggtggtccctcttcccacgtgcagccctgttgggaagaaaggaagaaaacaggtccctccaggggtgctgctgcctaagccacccacataagtacgctggtgccgtgtcacccatgttgagccgctcctgatggctgacgggctcccagaccctcacctcggacatggtggtgggggaaggacgggtgggcaaggctggtgcgttccccagctctccctacgctgctcgggccattgcccagccagatgtggtcacctcagtccagctctggggcctccaggccatgtggctgttcccacggcccagtcctcgctgcagtaacccctgggggctctgaccacctatgggggccgggcaggagcctctggggcctccactccgacatcaggacctgagatgaccgctgtgtggcgctctctccctgggcagggtggatgccacaggcccctctggctcccaggtgctgcttctccacaggtgcggcctggcccggcctcctaaaggccacaccctccccacgcacttcccaggccagaatccaaacatcgggaaccctgttttcttctgggtgtgtctcacttagaaatcgtggttcttccccgagggtgcatgttgcaggagggagagggcagggaagactcacagcagagcaggagggggcctgcgcttctcggggtctgcaccccaggcacagcggtgtcaccccgcaggaccgcgggcctgccccaacccccagcattcccgggtgggcccagaccccatcaccaagactggccacccgctgcgtgtgtgtgcgcgcgcgtgtgtgtgcgcgcatgtgtgcgtgcgtgcacgtgtggccccacatccgccgccttccacgctaggatgtaagaggtcgcctcctattgtacatttggggaaagccttgggtgtaaatcagtgtaaacttggaggagagatttttctatcatgtagagtaggtattttttatagattgaaggttgatcaattttttaatactttcaagagaaaactgtgtatacacatgaaatatatatatatatatatatgtatatatgggtactatataagggctggcaccctgcctctctgtgcccaggcccagccctggagacatggccccggtcagcagtgctgtcactgtaagcatggactcccagtagacagtgtgggaatcgctcctgctttaactccccgagaaacggctcttcgtgcctgggggcaggagggcaggggcctccaccgtttttttctgttactgcacaa

SEQ ID NO: 631246 - DNA, 949 bp, Homo sapiens
tacggccggacgggagttccccgaaagaagtgatcctgcagcccgagtcccgtcctcaggcttccccaatccaggggactcggccgccgggacgctgctatggacgacattttcactcagtgccgggagggcaacgcagtcgccgttcgcctgtggctggacaacacggagaacgacctcaaccagggggacgatcatggctttctcccccttgcactgggccttgcctgagagggccgctctgctgatggtctgagatgtagatcatgcatgggggcacggactcaatgtaatgaaaccgtggggattgacaagccccactgacacttcttggcagccaggtcaatgggaacaaccgtgcatacttgtacagacagctattgcagtacacaggcacagacatcatatgcagtgcaatgaacatgggaattgttgccccttgcgcatagtgcctgtctaatatgagggccaagcatcaacgtggcaagaaggaccctggtgtgcacacactggagggcccctatggtcaacgcactcgtgtaacacaacgtattggagaagactgcctgttgggaacacaagccaaacggcaccccgtgaagcagacgcattcttcacgaagacgcaggagcgcagagacagactggggccacagaatcctcaggccggtattaccagtacacgggcacagcatttcttggaaagggggaccaacgcatgcacatcgagccccggaacatggaacccttgagccagacagtctgggccgttcgaccttgcaaacgcagccttcacactttccttgacgaaagcctccaagcgagaaaatcacgtctgagaccagcctaatgcgcaagggccgcctggcccagggccagggcacattggtccgtgcacggtgcctgaagggttccgccaactgggacgttcacaggcacgacgcacggac

SEQ ID NO: 631247 - DNA, 849 bp, Homo sapiens
ggcgcccacggcctgtgaccccggcgagcggctcgccagatgacgagagagcggggccgggcgctgctccggcctgacctgcgaagggacctcggtccagtcccctgttgcgccgcgcccccgtccgtccgtgcgcgggccagtcaggggccacgtgtctcgatgcggtctaggtctgcagacctacgatggtcgcccgcacatgccggccgtgtgtgcgctgggagctgcctggctgcgggccgggtggggatgcctctgcgacgtgaagtggccgttccccgcaggtgccgcgctcacctggaccctggtcagcagcggtcgtcatgggcttggtgggcacctacagctgcgttctggaccaagtacatgaaccacctgaccgtgcacaacagggaggtgctgtacgagctcatcgagaagcgaggcccgggcacgcccctcatcaccgtgtccaatcaccagtcctgcatggacgagcctcatctctgggggatcctgaaactccgccacatctggaacctgaagttgatgcgttggacccctgcaagcttgcagacatctgcttcaccaaggagctacatcccactttcttcaggcttgggcaagtgtgtgcctgtgtgccgaggagcagaattttccacgcagagcaatgaggggaaaggtgtctagacacaggcaggcacatgcccaggttgctgcgcaaaccggaagcagagcaaacgaccatggcgctctaccggaacgggggatcgaccacccaagcgacgacgcataacaaggggccacagaacacgtatgataccccaagcggacgagccaacccgtacgagtccgcccgcctgccgg

SEQ ID NO: 631248 - DNA, 324 bp, Homo sapiens
ttaacaatcactggcatattattacccaaaatctataatgtacgttagtggccactctttctgttgtacattttatgtgtttcagcagatgtataatgtcatgtatccatcattacagtattagacagaatagtttcactgccctatatggtcccctgtgctccaccaactctattcctccccaccacaatctcttggcagctgctgatctttttactgactccactagttttgccttttccagaatgtcatatagttggagtcagacagtatgtggccttgtcagactggcttctttcacttagcaatatgaatgtaaggttt

SEQ ID NO: 631249 - DNA, 333 bp, Homo sapiens
agtacaagtcgattgctattggctctcagccacgctcactgttgggaaacccacatatccaaatgacgatacaatcataaagagttcttagtgtcttacgttcgtggggtgtcggtggtggaatatgaatctgctatggcaactgtcataatacctgaggacaggtagtgggaaaacctcgtggttgtcgggacatggaaccaagaagagcatattgaatgggctaagaagaatactgctagagcttatcatcttcaagacgatggtacccagacagtcaggatggtgtcacatttttatggaaatggagatatttgtgatataactgacaaa

SEQ ID NO: 631250 - DNA, 465 bp, Homo sapiens
tttccaattcctaaagcccgccgcaaaaacaaagggaagttagggcagtttagtggctttaccttgtggggcgagcccatcaccccaccccgcaatttcgcaaaagccaagaaaaagcccccggaaaccaccttgtgccccaaattatggatttattgtacaaaaatcattttcccattttgggggggggtcaccccgcaccctttaggccccctttttacggggaaaatggacccttgggggattttttttttttttttttaataaatcaaaaacagggtccattcccccagggtttttttttgcctgcaccttcggtgatttttaacaggattttggggccaaggtttcagtttagggcaacggcaggccagtttttggttttccacccgtgtttggcctcaggggtggcaaccggtttttggggcaacccatttgttttttttaataaaggtcaaagttgga

SEQ ID NO: 631251 - DNA, 402 bp, Homo sapiens
acagacagtacagtcctatccttcctatgccacaaccggttgtctcgcctccttttttaaggaagtggtgaggagatggtattctgaaaagcccagtatcagcatgacttgtggcttctttttggatttgtttgccatacctgtccacaccaaagagggtaggtgggaaaaattagggatttgtgccctgatggttggacccactccactgatccattagttactagtaatctcactttttcctttcaatataatatatgtgttttacattaactagctttttaaaaattacctattaagatgaaacagagtatcattgaatggacaatgtatttcccaatcacatctctccactgttctggctttcagttaatttttctcttaggatctacagttaaagcc

SEQ ID NO: 631252 - DNA, 405 bp, Homo sapiens
tacgtaacccttccccagtttttttttatactttaaaccccgctcctcattgcctggcgcttactgaagctgcttcctcttataaaatagctttggccgaaacatcgtttttttttagcagatcccaaaatataatgaaggggagggtgggatattggtgtctgtgtgcttataatatattcattcattcttcctgggttctcagaaaaatcagcataaatatatttttttccaggcaaatcagtgtggtgtatccagttggcatgtggctgggtggttgagtgagtgaatttccatgtggcggggtgggttttggcctttaactctgtgccttgttcttggtgccttctgatggggctggcaatatggagggggatggttctaccctttctggcttctgtaggg

SEQ ID NO: 631253 - DNA, 182 bp, Homo sapiens
ggcttgttcaaagttcattggtagggaaacgcccatcacgttaattggttgtgaacaggaattagtgagttaacccgccaaatccaaagaacaatttcaagtccgttaggcatacatcaccggtatttgaaccaccaagttccaccctagtaggtagtcgtccatcatcatgtcagtctttg

SEQ ID NO: 631254 - DNA, 730 bp, Homo sapiens
  misc_feature (5)..(5): n is a, c, g, or t
  misc_feature (83)..(83): n is a, c, g, or t
  misc_feature (119)..(119): n is a, c, g, or t
  misc_feature (166)..(166): n is a, c, g, or t
  misc_feature (168)..(168): n is a, c, g, or t
  misc_feature (170)..(170): n is a, c, g, or t
  misc_feature (175)..(175): n is a, c, g, or t
  misc_feature (179)..(179): n is a, c, g, or t
  misc_feature (200)..(202): n is a, c, g, or t
  misc_feature (204)..(204): n is a, c, g, or t
  misc_feature (208)..(208): n is a, c, g, or t
  misc_feature (222)..(222): n is a, c, g, or t
  misc_feature (224)..(225): n is a, c, g, or t
  misc_feature (231)..(231): n is a, c, g, or t
  misc_feature (239)..(239): n is a, c, g, or t
  misc_feature (252)..(252): n is a, c, g, or t
  misc_feature (268)..(269): n is a, c, g, or t
  misc_feature (294)..(294): n is a, c, g, or t
  misc_feature (299)..(300): n is a, c, g, or t
  misc_feature (304)..(304): n is a, c, g, or t
  misc_feature (308)..(308): n is a, c, g, or t
  misc_feature (312)..(312): n is a, c, g, or t
  misc_feature (317)..(317): n is a, c, g, or t
  misc_feature (374)..(374): n is a, c, g, or t
  misc_feature (412)..(412): n is a, c, g, or t
  misc_feature (461)..(461): n is a, c, g, or t
  misc_feature (513)..(513): n is a, c, g, or t
  misc_feature (663)..(663): n is a, c, g, or t
  misc_feature (685)..(685): n is a, c, g, or t
aatanactgattaaggattcatggaacaaacatatataaacaaaggccaataatattccaccccatgcagaatcctatcaaancaatccattaattaattaaagcaataaaaaaaaaanatccacctcaaaaaagcaacaaatccaaccaaaaaaaaataaaaaanantntacantaanctcaaccatgcactgaaaaannnantaantaaaaactttttananntcagtntcaaacangttatccttatcnccatcaaggcaatccnntcactctcatgaagcagtcaaatantcaannccancccncttnagcanccacacaaaacacacacggaaaccaatcacacaaaatccatcccgtaatcccactcnccaggccccacactctcgctgaatacagacctcctccnttactgtccagaactctcccgcttcactgtccagaaactggaagcagantccaaataagaatcccatagcttgattccactctcaccaaaagctgactccntttttcttaggaatgtctatagccttgggaggtaaaaataaaataaaataaaatcaatgggtgtaaagttcatagcatcatccattgattttatgaactttacacccagtctggaattccaaaaatattcctccattgctcaggagtgtngctgaatcctacccagccaggnttgctgtactgcagggaatgaatgtccagatctatggatcgccag

SEQ ID NO: 631255 - DNA, 339 bp, Homo sapiens
gcttaaaaacaagtgtgagcccaaaacaagcccatgttattctcccacagggtcctctataaaaggggtgggtgtctgtttggccaggatgttaaaaagtccttataagacgcatgctcagtgttgccaaaaggtttttagaaagtatgccaaaaatgttgttttggctatgaggggaccataaaaaagccagcccccttttaaagggttttttttgtccggggttaagggttttaaaaaaaaaaaaccctgttttttgcctagttaaaaaagggttttaaaaagggttttgaagccaattaggttatgtttttgggccaaaaaaccccccttgcccta

SEQ ID NO: 631256 - DNA, 727 bp, Homo sapiens
caagacatggatgtgccccagctggtgtgccctccgagttcattcgtgagatctagacttgctcagccctagtcagagcttccgtgtatcgagcctagaagcgacagcaggttgccttcggtgatcatcgcgacaagtgacggggtatcacagcatctcaacccttgtaccagccttgctcatgctacagagcaacgaccacagaaggaaccaatgatcagattcaggcagagcaatctctttaagatacagaccagactacagcatcatcatcccgttcctgctgcgtctcagcgcgtcaagtatttcaggctgggacaagcaaacctttacatagcacgggaatcaatgtaaatgcagctccattccaatccatgcaaacggtgttcaatatgaatgcccccgagttcctccgtgtcgagagtgaaccagaaactttaagagcgagcaaaatcagtaccaggccagttataaccgagagcttgggctagtcagccgtcaccaagtagaacaaacagagcttcagcaagaacagcttcaaacagtggtcggcacttaccatggttcccctagaccagtcccatcaagtgactggtaaccaccagcagctcctcagcagaacactggatttccacgtagcaatcagccctattacatagtcgtggagtgtctcgtggaggctcccgtggagctagaggctgatgaatggatacggggcctgcaatgc

SEQ ID NO: 631257 - DNA, 85 bp, Homo sapiens
gggtccaccttactacctcttccttcgtggcgggctcaactgaaagatgtggggttctaaggacaggcttcccgctggggaagga

SEQ ID NO: 631258 - DNA, 85 bp, Homo sapiens
aattcggaacgagggtacgctcccagcgccgtgaggttggcccagagctgccaggaccatgaagccaggacagaggccaggagcc

SEQ ID NO: 631259 - DNA, 170 bp, Homo sapiens
  misc_feature (11)..(11): n is a, c, g, or t
  misc_feature (151)..(151): n is a, c, g, or t
  misc_feature (166)..(166): n is a, c, g, or t
tttaaggccanagagggtcaaggaaatttacctgttcgaggcacaattcctgatatgattgcagttttatatatttgcctgaatctgcaatcatatcaggaattgtgcctcgaacaggtaaattccctgaataatgattgcagattcaggnaatatatataactcnatga

SEQ ID NO: 631260 - DNA, 211 bp, Homo sapiens
atcagctactgaataggtgaatattcctgacagagaatgctatctaaccatagttcacgttagggggaagcattttccatcagtttctttaaacttggattgtccggtgagttttgatattaaaccttctgtagctaagtttataatatagcattacttaataattaatcaatctatatacacaggcccatacttcagacagtccaatcat

SEQ ID NO: 631261 - DNA, 92 bp, Homo sapiens
gtcagtcgcttcgcctgttcattccgctcacatttatctagcacccattctgtgccaagcattgtctctacctcagtttgccacaaatatga

SEQ ID NO: 631262 - DNA, 395 bp, Homo sapiens
  misc_feature (391)..(391): n is a, c, g, or t
ttagaacccttgcactgggtttcaactttccccttgaaccctagtgatcttcgtttttatcccatattcccatattgtatttctgttattgtagccctggttaagaaccatgttggccgggcccagtggctcatgcctgtaattctagcactttgggaggatgaggcgggcagatcgcctgaggtcaggagtttcataccagcctagccaacatggtgaaaccctgtctctactgaaaatacaaaattagccaagcatggtgcgtgcgccgttaatcccagccactcaggagtctgagacaggaaaatcacttgaacctgggaggctgcaataagccgagatcacgccattgcactccagcgtgagcaacaagacggaaactccatccatnatat

SEQ ID NO: 631263 - DNA, 279 bp, Homo sapiens
cccccttttttttccccccaggtttgggcccccccccccccccctttttggggggggggtttttttttttgggggttttaaatttcccccctggggccccccccttttttaggtccaagggggggggggggtttttgggcccttccccttttccccccccaaaattgggggcccccccctctttttttgttttgggacttgggggggggaaggaaatgtggtttttttttttttcccctttcccggggggaaaaaaaaaggaggggggttcgcccccca

SEQ ID NO: 631264 - DNA, 184 bp, Homo sapiens
aggctatccactcctcctactttgactggggctggcattgccctcaacgaccactttgtcaagctcatttcctggtatgacaacgaatttgtgctacagcaacagggtgtgtgtgacctcatgtgcccacattgcctccaaggagtaagacccctgtgaccaccatgccccagcaatgagcaca

SEQ ID NO: 631265 - DNA, 374 bp, Homo sapiens
  misc_feature (40)..(40): n is a, c, g, or t
caatgtttttcctttttttggggcggtttgcatttggttncttcactcccttccctgtcatcggatttttttttaggttctgtagccagagtgtatgtgttttacgcgctctggctttttttgcgcttcttacttaatggatgttttacagttcggtatcagaccaggccagctggttgctgtcgcttggaggcagcccatccatgaggttctgggcttgccccagatctgccagctcatcacctgttttgtcggcatcggggtgttggccagccttgctcgtgttccatcgtgagatagatagacagagagtgatagacatatagagagagagagagagacacagtgagtgagatagtgagagagatagagag

SEQ ID NO: 631266 - DNA, 208 bp, Homo sapiens
aggtctgatctagcaggatcccctttccaaacgcggcagatcggaggacatgaccacaggtacagaatcagaaaccaatgggccttcatggctgtgtgcattgacgaccagccaagcgctacaatctggatgactacctggacccctggtgttcatccttccgagcaggctcttgcagccatccatttatccttgcaggagcaatgca

SEQ ID NO: 631267 - DNA, 185 bp, Homo sapiens
  misc_feature (48)..(48): n is a, c, g, or t
gtgatttctaagatgtcaagagaggctacatcacagcttttcttgctnaggctaccaagatcttgtatcctcaccaagctagtcttcagataagtgagcatgcagagtatagtctgaaatgttttgaagtggcacagtgcaccgcaaagacccaagatgtcagatatctaaaagaagttaaagga

SEQ ID NO: 631268 - DNA, 565 bp, Homo sapiens
tgggcttgattcaagcataagagtgcctgcagtctaagagggaggcagaagaagaggtcagaagggggatctgcaaacgacttgctgcaggcttcgacaatagaggaaggaagctggaaacagccctcagccagcaaaacagaccttggtcctacagcctcgaggaactgagttctgtcaacaatctaaatgagcaggaaagaaattcccccctagggcctctagaaaggaacgcaaccctgctgacaccttgatttagaattggacttctgacccacagaactaagataatcatttgcactactttcaacctgtaaatttgcagtcatttattttggcagcaatggaaaactaaaacaatgacataaggattcctgactacagggtatggttccattttctatcagtggacattatcttctcaggcagaagcgaaaatgtgcagtatcacatgagtggtggttgatgactatcatgtggctagagtccagccatttcatatgttcctcacatgagataaccttatttaatcctcaaaacagctccaggaggtactatgccagtt

SEQ ID NO: 631269 - DNA, 132 bp, Homo sapiens
  misc_feature (109)..(109): n is a, c, g, or t
cttggaccacaaccgagcaaaatctcaaattgctcttaaactcggtgtaaccgcttgatgatgtaaagaatgtcattatctggggaaatcattcatccgacccagtatncaggatgtcaatccttgccaagg

SEQ ID NO: 631270 - DNA, 405 bp, Homo sapiens
caagattccattccttggaatctgtgaggccaagaaccccaggttagagaacctgaggcttgccaccatcttagaagcggcttgccaccatcttggaagtggctcgccaccattttggcaaccaggaagggacctccaaagcggctcatcaaaaactcagaagaatgaaattatttgcctcttatctacctatgacctggaagccccctccccacttcaagttgtctgacctttctggactgaaccaatgtacatcttgcatgtattgatcgatgtcttatgcttccctaaaatgtataaaccaggtgtgccccagccaccttggacacttgtgagaagctcctgaagctgtgtcacagggacgcacccttaactttggcaaaataaagttcccaaattgactaa

SEQ ID NO: 631271 - DNA, 196 bp, Homo sapiens
ggagatctcatagaggatccccgtatctaaaaaatgcctaaaatataaatatacaccttaaataaattattatactgtgaacactcactgtatcactactcagatcaagaaatagttgctggtatctctagcaagcccatagtcctcttcccaagttacaatcctaccttttcccctgccataaaattgtgcagcg

SEQ ID NO: 631272 - DNA, 770 bp, Homo sapiens
tgccctcatttacataaatatatactagcatttaccatctcacttctaggaatactagtatatcgtcacacctaaatatcctccctaattatgcctagaaggaataatactatcgctgtccataatagctactctcaataactctcaaaacccattccctcttagccaatatggtgcctatggccatactagtcttggccgcctggaaagcagcggtggccctacgccttaatagtctcaattctccaacaaaatatggcctaagaacttactgtacaataaaccctaaaatcctactcccatgtggctaaacacttaattcggtcccaaaaaattattattaactaaccaagtggacaattgacttttcccaaaaaaacacgcaccattattctggaatcaaacaaaaaacaaccccaacaaggctctaaaataataaggcattcatccctcttattaatttttaaacccaattcaaacaaccaaaactaattaaggttggtacccccaaatcttttttcctgccggactccccatataaaaaaaccccgctttccttaatatactaaactaacgttggatatcttaacccctttcaagatgtcagtggaaaggcaaacggccactttttattccgggtgaacccattaattactggagaacaacaaccatacagtgacacaccaatattgtgtggggcgccatcgccccaaaacagttttcaaacacaatgtgttggcgggcggcccatagcagtagactggcaaact

SEQ ID NO: 631273 - DNA, 1019 bp, Homo sapiens
  misc_feature (210)..(210): n is a, c, g, or t
  misc_feature (309)..(309): n is a, c, g, or t
  misc_feature (328)..(328): n is a, c, g, or t
  misc_feature (396)..(396): n is a, c, g, or t
  misc_feature (399)..(399): n is a, c, g, or t
  misc_feature (408)..(408): n is a, c, g, or t
  misc_feature (468)..(468): n is a, c, g, or t
  misc_feature (539)..(539): n is a, c, g, or t
  misc_feature (542)..(542): n is a, c, g, or t
  misc_feature (545)..(545): n is a, c, g, or t
  misc_feature (548)..(548): n is a, c, g, or t
  misc_feature (582)..(583): n is a, c, g, or t
  misc_feature (671)..(671): n is a, c, g, or t
gctgttactggtccgacattcgcggtactgcagagaagacaacgtgcagaaagcaccatgagtgggggcccaatgggaggaaggcccgggggccgaggagcaccagcggttcagcagaacataccctccaccctcctccaggaccacgagaaccagcgactctttgagatgcttggacgaaaatgcttgacgctggccactgcagttgtncagctgtacctggcgctgccccctggagctgagcactggaccaaggagcattgtggggctgtgtgcttcgtgaaggataacccccagaagtcctacttnatccgcctttacggccttnaggctggtcggctgctctgggaacaggagctgtactcacagcttgtctactccacccccacccccttnttncacaccttngctggagatgactgccaagcggggctgaactttgcagacgaggacgaggcccaggccttncgggccctcgtgcaggagaagatacaaaaaaggaatcagaggcaaagtggagacagacgccagctaccccnacnacnaanaccagccaatgaagagagaagaggagggctcccnnccctgcccctgcatccaggtggagaccaaggaggccctccagtgggtccgctctccctggggctggcgacagtggacatccagaaccntgacatcacgagttcacgataccgtgggctcccagcacctggactagcccagctgataagaaacgctcagggaagaagaagatcagcaaagctgatattggtgcacccagtggattcacgctttctagccagtgggtctggaccccacgaatgggctttgtgcgtgtacaaccctcaacgcagaagcatgggaagcttggcctaccggccggtatcagggaggaccgatacaccaagccgtagaccttaacttattacgactcatgagccagtgttcatgtggcagcacgcgcaatagctctcggccaatagcggcgcgcgcatatgcggtacacgtgcccggcctat

SEQ ID NO: 631274 - DNA, 381 bp, Homo sapiens
tctggcctcccaaagtgctgggatcaagggaggagaccacccctcatattgtcttatgcccaatttctgcctccaaagaaagaagaagtaaaaactaaaaggcagaggtggacagcccagcgctgccgcaccctggtcctggttaaagatcgagccctgacctaaccagttatgttatctatagattccagacattgtatagaaaagcactgtgaaaatcccgtcctgttctgttctgttctaattaccggtgcatgcaacccccagtcacgtaccccctgcttgcccaattgatcacgaccctctcacgcagactccctagttgtaagcccttaaaaaggtcaggaattgctcactcggggagctcagtttttggagacg

SEQ ID NO: 631275 - DNA, 424 bp, Homo sapiens
  misc_feature (67)..(67): n is a, c, g, or t
  misc_feature (169)..(169): n is a, c, g, or t
  misc_feature (353)..(353): n is a, c, g, or t
  misc_feature (361)..(361): n is a, c, g, or t
  misc_feature (385)..(385): n is a, c, g, or t
cacacgttgaaatggtaatattgtggatatagtagggtaaataaaacgtgctattaaaactcatgtnttttttaaacattgctactggaagtttacaattacataggaagcttatatttctactggacagcacttttcaaacattctaaactaaaaggaaatatataangagattaatttatgcaaaggaaaagagagaaataaattacgtattaaaaagtaaaatatggctgggtgtggtagctcacgcctgtaaatccccgcactttgggaggccaaggctggcagatcacttgaggccaggagttcgagaccagcctggccaacatggtgaaccccgtctctactaaaantacaaaanttagctggctgtggtggctcacgnctgtagtcccagctactcgagagggatgaggcaccaaga

SEQ ID NO: 631276 - DNA, 115 bp, Homo sapiens
tgctggaagggggaacactgcataacaggagagcacagcagtcttctccgtgcgggaactgaggtaccgctgcacctaagcctggttcaccccgtataaggagagcatcatgaag

SEQ ID NO: 631277 - DNA, 214 bp, Homo sapiens
ctttaggcatgttgagcgaggtggtctcgaactcctgacctcggatgatccacccacctcagtctcccaaaatgctgggattacaggtgtaagccaccgcggccggccttgactaccatattttaaatttactggaggacttttttgttctcttctgggggctttttttaatagcatcccgctcttatttcagaataaaaaaatttttaaggta

SEQ ID NO: 631278 - DNA, 457 bp, Homo sapiens
gaactctagtagctgaaattggtggataggtaggatcccaggatggggaatgtacctttgaatggtcgtggttctaatctggctttgccatctgctgctgttctcttgactagaggtctcatcctccctggtcgtgcttggctgatgattgagtgttgggtctatgaagacgcctttccagctgtcacacggtgtttggagcaagcaagctgggggtaactcccagctcccatttcttgttcctgtgaccttcgactagatgcttcacctcacctgtcaaatggagctcatgatagtgcccacttccttaagttgttcagaggagccagcactaaagctctcggtcacaggcctgatgcatagcaagctctcggtatctggtggtgttgcaaccaaggtgtttctgtacttcaagccactttgaaaccaagcctataaacgcctagttgctgcccgg

SEQ ID NO: 631279 - DNA, 156 bp, Homo sapiens
agtgtagacgagtcatctggtttgcgttgcggctggtgtacgggacagctctcggcctttcgcacgggccgctcgtccagagtggactcctccggtgcttattcgacggctgctgctgtcaggcggcggttcatccacgtcttccacttctcgggc

SEQ ID NO: 631280 - DNA, 406 bp, Homo sapiens
gaccaggtgggactctgactggtccctctgaacctcaagtttctgttctttctcccatcctcctgtgccctccacccatccttccatccatgtgcctcacatattcctcagcacttcctcattgaacatagaatcatcctgtgacccctcaaacaaatactttacattaatgtgcataacagcttcattcacaatagccaaaggtggaaacagcccgagtgtccgtcggtggatgggtgggtaaacaaaatatggtctatccatacgagcgaatattattcaatcacaaaaaggataagataagtagtgtttgatagcacaacagggtgactacagttaactataattaattgaacatttaaaaataaaggattcctttcaaatgctgagaaaagaaaatatcaaa

SEQ ID NO: 631281 - DNA, 323 bp, Homo sapiens
atttttcctgttttaaaaaaactgggcctttaaaggttatatgtccggtccccgtatgttttaagtcggggttaatgccaacagtgttgaaaacaaaatttcatgagatctaattgtggttgcccccatagggagcaggaaagtaaagttgcatttccccctcgccccttttacccccaagggcctaaaaaatctccttgtaagtgggtagtgttcccggaaacccttgtgttcccccgggggaaaacccgtatatatttttccccaaaaattaacgtttaaactttcatgtttgaaaatttaattaaaaaaattttttttca

SEQ ID NO: 631282 - DNA, 242 bp, Homo sapiens
tcccctcgagagcagaagcgtcgccatcatgttccgcttctgacgctcgcgaagcatgacaatggacgggtcgtcgctcggtccttcgacgccgaagttagagctgtaattcgcatcggttccgtcggcattgccttccttgttgtccagattgtgtttggcctcatagctgacgaggtcttcgagcgtgaagccgtcatgtgcggtaatgtagttcaagctggcggtcggccggcggccgc

SEQ ID NO: 631283 - DNA, 832 bp, Homo sapiens
  misc_feature (508)..(508): n is a, c, g, or t
  misc_feature (649)..(649): n is a, c, g, or t
  misc_feature (664)..(664): n is a, c, g, or t
  misc_feature (666)..(666): n is a, c, g, or t
  misc_feature (671)..(671): n is a, c, g, or t
  misc_feature (707)..(707): n is a, c, g, or t
  misc_feature (717)..(717): n is a, c, g, or t
  misc_feature (746)..(746): n is a, c, g, or t
  misc_feature (754)..(754): n is a, c, g, or t
  misc_feature (762)..(762): n is a, c, g, or t
  misc_feature (769)..(769): n is a, c, g, or t
  misc_feature (782)..(782): n is a, c, g, or t
  misc_feature (788)..(788): n is a, c, g, or t
aacttccggctctcactgctaggggcttaagcggagggagtcgagccagcgtcgccgcgatggtgttgttggagagcgagcagttcctgacggagctgaccagacttttccagaagtgccggacgtcgggcagcgtctatatcaccttgaagaagtatgacggtcgaaccaaacccattccaaagaaaggtactgtggagggctttgagcccgcagacaacaagtgtctgttaagagctaccgatgggaagaagaagatcagcactgtggtgagctccaaggaagtgaataagtttcagatggcttattcaaacctccttagagctaacatggatgggttgaagaagagagacaaaaagaacaaaactaagaagaccaaagcagcagcagcagcagcagcagcagcacctgccgcagcagcaacagcagcaacaacagcagcaacaacagcagcaacagcagcacagtaaagggcatacatttcctgctttcaccaattaaccactgnattgctattttttccttttggccagatagctaggtttctggttccccccacagtaggtgttttcacataagattagggtccttttcggaaagaatagttcccagtgtttgataggataagttgtggtgaagaatctagttnattttgcatttggcnantgggnctgtctgcatgggtaaaaaaccccggggtattggtnaaaagccccngaggcatccctgggaaggggaaccttccnttaaacangcctggtnacaagcnctggccccttaancccttncccaaccccatttaaaaaggcctggggaaaaccaccaaaaccct

SEQ ID NO: 631284 - DNA, 982 bp, Homo sapiens
cggacagagggctggaaagaagacgctccagaatcaggagcttcccctcaggaaatagcatcctgtgtccccgcactgcaggttgtctggtctctccagtcatgttaggtactatccggctgctgcaatgcgtgtggtggtgattggagcaggagtcatcgggctgtccacgcgcgcctctgcatccatgagcgctaccactcagtcctgctagccacttggacagtaaaggtcgtacagcggaccgcttcacacccgactcaccatgcaccgacgtggtctgccgggctctggccagtccctgtaccttgtctgactcccaacaaccctacaggaggcggtaccgtggtagccagactagaagctgtggatcgtattctcctgaagccatggtccaagttctccgcaacagtctagtaaaaccttgggcctggattccctaatcctcgtggctacgaatcatctttcccatgaagcgctattccgggacctcttcgcttggcacagggacgaccagtatcgtgggaatgtgctggagagctgagcccgcccagagcacgctggagtagtgtttcgccatgagtttaacaggcttagtgtgcctgggtttcggcacgacggaaggccctatatttacgtggcacgggggacatagaagcttagtctaacaagttgggcattgaacgttgacacacggttagaccttggacgcatgcgccggagctggaaaagcgttcgtttgcccgaagcgctagacaacggtgcgaagctccatcaccggaggcgcaggtgggccaacggaggaaatggggcgccaagaaccggtggaacttggtcaaagcaagcccacgtgagagcggtaaatcgcggcctagaggcgccggctaaccaaggcgaacgtacgccccccctaggcatggccaggcccaagggcccgcgagcgcgcgcacaagccatccgttgaacgggtgggaaccgcccc

SEQ ID NO: 631285 - DNA, 432 bp, Homo sapiens
tggatcatttgaggtcaggagttcaagaccagccgtctgaactattagtagagaccagccgtctctactaataatacagaaaaattagccagacgtggtggcacacgcctgtaatcccagatactcaggaggctgaggcaagagaatcgcttgagcccaggaggcggaggctgcagtgagccgagattgtgccactgcactccagcctgggcaacagagtgagactctgtctcaaaaaaaaaaaaaaaaagagactctgccaccaagattggtgagacgtgggatgggatggctgggagctaaaagaaaccccggggtaacggggggataggcgcgccgggggtaaggagcggctcccattctgagcctggcctctatgtcaggtaccggggtaccggagctcagattccggtaatcaggggtcataggctg

SEQ ID NO: 631286 - DNA, 788 bp, Homo sapiens
  misc_feature (508)..(508): n is a, c, g, or t
  misc_feature (649)..(649): n is a, c, g, or t
  misc_feature (664)..(664): n is a, c, g, or t
  misc_feature (666)..(666): n is a, c, g, or t
  misc_feature (671)..(671): n is a, c, g, or t
aacttccggctctcactgctaggggcttaagcggagggagtcgagccagcgtcgccgcgatggtgttgttggagagcgagcagttcctgacggagctgaccagacttttccagaagtgccggacgtcgggcagcgtctatatcaccttgaagaagtatgacggtcgaaccaaacccattccaaagaaaggtactgtggagggctttgagcccgcagacaacaagtgtctgttaagagctaccgatgggaagaagaagatcagcactgtggtgagctccaaggaagtgaataagtttcagatggcttattcaaacctccttagagctaacatggatgggttgaagaagagagacaaaaagaacaaaactaagaagaccaaagcagcagcagcagcagcagcagcagcacctgccgcagcagcaacagcagcaacaacagcagcaacaacagcagcaacagcagcacagtaaagggcatacatttcctgctttcaccaattaaccactgnattgctattttttccttttggccagatagctaggtttctggttccccccacagtaggtgttttcacataagattagggtccttttcggaaagaatagttcccagtgtttgataggataagttgtggtgaagaatctagttnattttgcatttggcnantgggnctgtctgcatggttatatacgtcctggattcatcgattgaccagtctctgttagacgttcgtctgtgaagagcaagctatcattagccatggtctgcttatccagcagaaccaaaag

SEQ ID NO: 631287 - DNA, 752 bp, Homo sapiens
  misc_feature (434)..(434): n is a, c, g, or t
  misc_feature (444)..(444): n is a, c, g, or t
  misc_feature (530)..(530): n is a, c, g, or t
  misc_feature (537)..(537): n is a, c, g, or t
  misc_feature (547)..(547): n is a, c, g, or t
  misc_feature (578)..(578): n is a, c, g, or t
  misc_feature (595)..(595): n is a, c, g, or t
  misc_feature (599)..(599): n is a, c, g, or t
  misc_feature (613)..(613): n is a, c, g, or t
  misc_feature (620)..(620): n is a, c, g, or t
  misc_feature (656)..(656): n is a, c, g, or t
  misc_feature (683)..(683): n is a, c, g, or t
  misc_feature (743)..(743): n is a, c, g, or t
aacttccggctctcactgctaggggcttaagcggagggagtcgagccagcgtcgccgcgatggtgttgttggagagcgagcagttcctgacggagctgaccagacttttccagaagtgccggacgtcgggcagcgtctatatcaccttgaagaagtatgacggtcgaaccaaacccattccaaagaaaggtactgtggagggctttgagcccgcagacaacaagtgtctgttaagagctaccgatgggaagaagaagatcagcactgtggtgagctccaaggaagtgaataagtttcagatggcttattcaaacctccttagagctaacatggatgggttgaagaagagagacaaaaagaacaaaactaagaagaccaaagcagcagcagcagcaggcaggcaggcaggcagcgctggcgcggcaggcaggcanagcaggcagncaagcaagcaggcaggcaagcaagcaggcaggcaagcaggcaggcagcagtgaaagggggcattacattgtgcctggcttttgcanccaattnaaaccactgnaattggctcattttttttgccttttttgggncagcataagactagggntttnctgggtttcccccncaacagntagggtgtttttacaacatacagcatataggggttnctttttgcgcaaaagaaatagctctgncagctgcttttattaggcatagcttgctgcgtaaagcaatactcagtttttattttttgncattttgcg

SEQ ID NO: 631288 - DNA, 239 bp, Homo sapiens
caagtattagaaaaaaaagaaaaaaaaaagctttcttcactaaaaattctgatttctgtacatctgagttggcttgaatatcaatatgttgtatttttaccaaaatgtgtttttattcacatcctaattttgacaaagaataaccgtgttcccattatgcacatccaccatctttacattaaatttcatttattgggcaccctttttccattttgtcagatcctcttccctgtaaatgt

SEQ ID NO: 631289 - DNA, 174 bp, Homo sapiens
  misc_feature (123)..(123): n is a, c, g, or t
gtgatgtatccccaacactcatcatactgttgtctagcattgcctggctagtctcatgtgcttatttttcccattaacatttagaatcattttgagcaagtttttaaaaaaatgacttcatanagtacaatgagcgaaaatttttacctatttacaatagaggtatctttgaat

SEQ ID NO: 631290 - DNA, 643 bp, Homo sapiens
  misc_feature (319)..(319): n is a, c, g, or t
  misc_feature (460)..(460): n is a, c, g, or t
  misc_feature (475)..(475): n is a, c, g, or t
  misc_feature (477)..(477): n is a, c, g, or t
  misc_feature (482)..(482): n is a, c, g, or t
  misc_feature (518)..(518): n is a, c, g, or t
  misc_feature (528)..(528): n is a, c, g, or t
  misc_feature (557)..(557): n is a, c, g, or t
  misc_feature (565)..(565): n is a, c, g, or t
  misc_feature (573)..(573): n is a, c, g, or t
  misc_feature (580)..(580): n is a, c, g, or t
  misc_feature (593)..(593): n is a, c, g, or t
  misc_feature (599)..(599): n is a, c, g, or t
aacttccggctctcactgctaggggcttaagcggagggagtcgagccagcgtcgccgcgatggtgttgttggagagcgagcagttcctgacggagctgaccagacttttccagaagtgccggacgtcgggcagcgtctatatcaccttgatgaagaagagagacaaaaagaacaaaactaagaagaccaaagcagcagcagcagcagcagcagcagcacctgccgcagcagcaacagcagcaacaacagcagcaacaacagcagcaacagcagcacagtaaagggcatacatttcctgctttcaccaattaaccactgnattgctattttttccttttggccagatagctaggtttctggttccccccacagtaggtgttttcacataagattagggtccttttcggaaagaatagttcccagtgtttgataggataagttgtggtgaagaatctagttnattttgcatttggcnantgggnctgtctgcatgggtaaaaaaccccggggtattggtnaaaagccccngaggcatccctgggaaggggaaccttccnttaaacangcctggtnacaagcnctggccccttaancccttncccaaccccatttaaaaaggcctggggaaaaccaccaaaaccct

SEQ ID NO: 631291 - DNA, 161 bp, Homo sapiens
taaattatttcaggggaagagaagacaaaacgagtcgttcatacggtgtgaacctttctcagtaatgttatctgaaaaaacaccttgtgtgatttaatgaaatgataaagaatgtgatgtgggatttcctttgcacagaaataaaatatctccaaatgtta

SEQ ID NO: 631292 - DNA, 331 bp, Homo sapiens
ttttttttggatatggagtctcactctgttgcccaggctggagtgctgtggtacgatttcagctcaatgcaagctctgcctcctgggtttaagcaattctcctgcgtcacgctccccagtaggtgggactacgggtgtgcaacacaacatccggctaatttttgtatttttcgtagagacagggtttcacatgttggccaggctggtcttaaactcctgacctcagttgatccacctgcctgggcctcccaaagtgctgggattacaggcataagccactgtgcccagctgcattgttgctgttttttattgttagttaagagaggtcgac

SEQ ID NO: 631293 - DNA, 345 bp, Homo sapiens
gactctagacgatcccgtccacggtagattttttctatttcttcatttgtacatttattattatcattttttgagataaggtcttactttgtcacccaggctgagtgcagtgatgtgatctcggctcactgcagcctccacttcccggggtcaagcaatcctccaacctcagcctcccaagtagctgggacaacatgcgtgtgccaccacacccagctaattttttgtagacatggggttttgccatgttgctcaggctggtcttgaactcctgggctcaagtgatccacctgccttagcctcccaaagtgctgggattacaggcctgagcaccgcgcccgcgcc

SEQ ID NO: 631294 - DNA, 187 bp, Homo sapiens
cagctgttccagaggatccctctactaacaaatacaaaaaatatagccggagcatggtggcaggcacctgtagtcccagctactcgggagctttgagacctgctccgtttaccgacctgggccggtatacacccgctaccttaagtgcaacctggtaggtaccccgcgctacccgtgtgaggtacac

SEQ ID NO: 631295 - DNA, 109 bp, Homo sapiens
gtagagtatcccttacttttctgattatcaagttttttgttgagactcaaagcatccccaaaacattggagatccagcttgagacactgcgactgggtacctgagctcg

SEQ ID NO: 631296 - DNA, 126 bp, Homo sapiens
agccaaggacagctcaggcaggaatctagacaaacaatgacaggttaaaacacagaaaatacagccaactactatgtaataccttgcccgcattgcagatggcacaaaatgtgggttttttagctc

SEQ ID NO: 631297 - DNA, 330 bp, Homo sapiens
gtgcacaagggtatgggtatcacaagtgcacaggtaacagatcctgtacgcgaggcatctaccatagagacagatagagcattcagatgaggaggacacattctagagatagtatagcatagatttcccataacaggaggcaggtgatagacactcatatcagaaaagtagtgttgagaaaaacacaggcagagcctggccatttgcctcctagcataggcactatacatgatggtggccacgtgccaggggaccacaccctatgtacaaagcaggagaatgaatgctcccagctagagctgcaggactgggcgtgcagtgaggggactc

SEQ ID NO: 631298 - DNA, 239 bp, Homo sapiens
gcgaataccgggaaacatggctgaagccggtttcgcgcatgtttccctccaacctacctcccattcagtcctgttgagccactgtgttaatccacagaagtatttcttgccaacaatagtatgatcaccagacagcaattcccatgctatagcttcagagactatgaatgttcacatatgtgactttctaccaccattcataattggtttacttgcctaattccattcctcctgtaaca

SEQ ID NO: 631299 - DNA, 555 bp, Homo sapiens
  misc_feature (277)..(277): n is a, c, g, or t
ccatgcagttggaaatcatggacactggatgttctaaatctctggtttttaaaaaagtgataaattggtgttaggtccttggagctttcttctttcccagcccgggatcccttcctccttcagctcttgtctgcacccccactgcccccacccctcaggaccgattaaggaaggaaatagcaaactgacaaaagcctagcctccactagcaaaatagaaaaatagacgtctggaagtaggaggtcgcctcaaggttttcctttgttactgtggaaantctgcccacagagcaggttagcctacttgggagactgctgctctaaagcgggtacccagaccagtgagggtttgccaaagcgccatctgctggacataaaggggaagtgcatcttgtccctagctccctgagaaacctccaattctgtggccactgttccttgtacaaacctgacacaaagactgtcagaaaacactgtggctagaaacccaaagggccacctctcccattgtcctacatcctaaggtcagagcaagactaacaccatgcacaaatag

SEQ ID NO: 631300 - DNA, 343 bp, Homo sapiens
ttgcctggcagagcacgaggccaagatgagctcgccaagtcagagcatgagaaaggtgcaggatagcaaagctgaaaggggggcccacgacagaaaaggccaagaagagattgtgacactgcatgccgaaattaaagcccagaagaaggagctcgacacaatacaagaatgcattaagggaaaacatgccccaactgtcagctttgaggagcgcgagagaaaacataaagcagcagagaaagaactaaaagaccagctagcagagcagacacagaagctgtagtgtcacgagaagaagaaggcaagaaaaacaaggaaaagctgagtacatcagcctggcaga

SEQ ID NO: 631301 - DNA, 119 bp, Homo sapiens
  misc_feature (38)..(38): n is a, c, g, or t
  misc_feature (47)..(47): n is a, c, g, or t
  misc_feature (89)..(89): n is a, c, g, or t
aaattatacaaaactagaagcagcagattgcaggaganttgcttgantccgggaggcagaggttgcagtgagccgagatcatgccactnttctccagcgacagagtgagattccgtctc

SEQ ID NO: 631302 - DNA, 453 bp, Homo sapiens
cttcccacctctcttttctcttcccttttccacatgcctctctgctggcccacagccagtcccggctctgcagccctctccgcagcctgttcagttctctccaagctcctgtccccaagtccttctgccagtctctccgccccagcagtacaacatggtataaactccattccccctttttgtcttgttcatgtgtggcctgtatctgtaggtatgtctgggtcagtctgtgatggccttgtaagcatgttgtgcttttggagggcatattgaaagctatttcttcttgagggaccagcacaggctgaactatactccatgctaatggcctcatcacagcacatcaaaagatgcttaaatgtaagacagaggaacactgtgttcccccaagtttcaggacagagaatgaaattggatgttggtataacctaggctcctcatctctacgatgta

SEQ ID NO: 631303 - DNA, 108 bp, Homo sapiens
cccctgtttgactaatttctcccatttggacatggctatatgtaccctatacctgtaccccgcgattgtatctaggaagtaacatagcttgcttatgttctcttatct

SEQ ID NO: 631304 - DNA, 107 bp, Homo sapiens
tactgtgcgacttcgcattgatggctgctgactgcttagggtggtggttgctgaaggttgggtgacagtggtaatttcagtgattttggttttgttttgtttcttta

SEQ ID NO: 631305 - DNA, 139 bp, Homo sapiens
ttatttctggggatttttttcttttgctaaatctggcaaccccaacccggggcctggtgcaactttggggtgatcagaattttttaccctggtttgcagtggttgcctttgtcaaaactcccttaattataccccaaag

SEQ ID NO: 631306 - DNA, 210 bp, Homo sapiens
gctggtccccatcggcgaacggggctgacggctggttgcggacaggatctggcccgaagtcggcgacagcaggccggcgatggcgcggccagcgtggtcttgccggaacccgagccgcccaccaccgccaccacttcgcgcggcttgacgtgcaggtcgatgccattgagcgcgcgcttggcgccggtgcgcgagaacaggcgctggtgg

SEQ ID NO: 631307 - DNA, 289 bp, Homo sapiens
ttattctccaccattcctcaggtatgtttgatcaccccagcctgctttcagcaagaatcctattatgtcagtttggccagaatccccacttagccctaatgtttgcttttagtacttttccatccattgatcccccccctgctccttggctataaattcccacttgcccatgctatatgtggagttaagcccaatcacttttccctaccgcaaaatcccattgcagtggtcctgtatacctatggaggtagttcccacatacaccccttaaataaaggatgcctcatca

SEQ ID NO: 631308 - DNA, 1075 bp, Homo sapiens
  misc_feature (396)..(396): n is a, c, g, or t
attaaggatgatgtgattgaaaaatgtaataaacatggaggagttatttcatagttgtactggtttgacattgaaatctcagctcagggcaatgctgtaatgtgaagtgcccagtcaattgctgcatgctattgctcgcttgtcaatgcacttgtcatggccagggtgggtgtggtctggttataactgatatacagcacgtctactatgtacctactataccatgctgtaaccaacaatccctggtctccgtgcattctatgcatcagtacaacaacaggctaactggctaccaatgttagacgcactgacaggaatagattattagatcccttatgatatatactcttaattttctcttttcttgagaagaattcagtcttgagtagattcttnttaattttcaggattagctagataagaatgaggtcatagggtatgtctaatcttgtgcattatgtatgggcaatattaccgtcgtatacactatgcagaaaattataggaatcgtttaacgagtgagcaaagaaaaagaacaaaaaaaaagaaaaaaacaaaaattgtgacgcggacagaacacagagagagacacaccgcacgaacaaagagggcattcgaacacagacacacagatcagaccgaagaggacggacatccctggtaggcaccaacacagaagaggcgagaaaaggaagaacaatgggggccaaaaaaagagagggacacccacacatagggggaaaaccacggggcgaccaactaagacaatagcatgcgtgcgtaggagagacacagcgacaacgcccacacatgaaacaaacaacatccgccaccacactcgacagagggagtaaccacagagcccgaggaacgggatcagtacgataaacgaagcaaacttctcacgtaagaagtgcaaaggattacagagagagagggaacgaccaccagaacaagcgcgaggcgagagtagccagaaagcaagccacgaggggggacacatcccaccacagagcgagccacctcgcagaaatccatagaaaagcagaacgcacgccgaagccgcgggggcacc

SEQ ID NO: 631309 - DNA, 854 bp, Homo sapiens
ggaaaaggggaagtacttaaggaacattggtcaagtggaggtagtcagcgaggttctcgtggtcctttacacagattttacagctttgggtttcatattaggtattaagctaaagtcatggggaccaaactcttcaaattttacggaactttaagatttggcaatttattaaaaattgattgtgattattaacagttgagataagcttccttaatcttgggtttgaacaggtggttcatttgagtcaaaggttaaagcgttggaaacacaatttttaacaagggttgggttagagaaatcttatccccaaccaatagaacgaggatattaagatattggtaagaagactacacaaacgtttatggatgcttgaaccaattcttgggacacaggttaaccaaaaccaagggcgtcacacgcaatgtggcgaaaaccaacaacctgggacatacctcaaaatttggtgaggcccaacgcttacggggactttatgcatattatagattgcagtaggcaaaatttaggtgcatcgaaatttataatggcacccattggccgattataaaacaaccatatcacgccaccaggatacacttcttgggaggataaaaaccgaaaaagataatagcaagaaggatttctaaatttctgtacacttctaatgggtgaaggtgaacctttatgtaaaacgcacctacaagttataagcttgctctacaacagtggtgtatcccttcccgaagcaacagtgtggaaacaaacagccatagtgaagcactttctgtacagcgacttcggtgtactcgggcgaacatatatcacgacacagggtgaaaaagctgctttacaggcct

SEQ ID NO: 631310 - DNA, 1442 bp, Homo sapiens
ccgtgccactctgctcctccatagtataactagacaacgatggcttggacacagatgtgatgcacatgaccatggtggtgaggatgaacgggtccgtggctcctggagaggttggcgtgcatcgtaagttgcggcgacgtatgtccaagtgctcgactggctggaggtattcgcctaggtagggagtcataagtgttctcatgcgatcgcacacgcactatctctcggaagacatcaagctaaggactcgccgttggagcggtcgcttgcgcgaagtaccgtataacgctgcctattttgaaataccctgtagctcttcactgttggagagtctgctgaatcaggaggaatctctcgttgatcctcagggcctgtgcctcgtgcggccctacgtatcctactataccaggatgctgatctatgatacgcatgtggctggcatggccgagccgccagactcacggctggtggaggacgacccgcgtgatatgtcgggccaacgctagttggactgacgtggcttggggccgtcctaattgagtcggggcctgggcaggcgccatagttgtgtaccactccataacgtgcgtgcccccacacgtgctggcctgtagctgcttgcgcgcatcgtcagcgcataggggcgttggtagacgcacatctatactagcatgtgactggggacaggccaccgtaccggactcagtacaagtaaccccgacaaatgtgcttcgcatgcaccatgggttaggccggaggaccataacgtgacatgtacacgttcgacacgctcgttgtgagccaagaagggctaaccaattcccaacttaggaacaagaaacaccttttgtcgtttctcccgatctcaagaaccggggggatcgtaccaagtccgtaacactatcgacgatggcaccacttgtcccgagtgcaatacccgtcggcgaaacactccacgaagagggcgaacgatcgtaagttggccttgggtaccccccgttaaccagcggggagaaaacaacccataggaccgtacgtttagaactcgcggacgcgctggcgaggggctatctatcggcctagaaagaactggacttccacttcgcccttttgcccataccttagcgtgggggctcgacttggtcactatgggggtttgatggactcgaggcaaaaccggggtcaaagtgcaccacgtggggagcgttcactggtacaacccgtgagctacccaggccttccaaagctgtgggacactcatgtgacgccattcacgggatgcgtttcagccccacacctttggacccacagcgggctgagaacaaaagcattggatggtatgggacccctgttgacatcttgtacgcaaatgctcgacactactggtacacatcggagtgtcccatatagaatccggcatgtgtgccccttacattatacca

SEQ ID NO: 631311 - DNA, 991 bp, Homo sapiens
cttttcctcggtgcaacttcggttgatctggcagccattgttagggtgtctgaactctttcctgacactccttttaattcgtatacagatagcgctctatgtggccacctctgttcctcttctagaacctgttccaaatattcgcccctcaaccaatgcttccctgtcgatgttctaaacttccaaaacttatccttgcccgcaagtttctccttttttgtgtggccatattcgtactcattcaggcctgcttgggccattgtctgaaggcaacgatatagttgatcaggctacccaggtagtggcttctgccttgtctaccactcctcttgccgccgctcaaaaggcccatgatttacacaatcttaatgcccataccttgagacttaaattttccatcaccggcgaacaggcacaagaaattgttcggcagcgtaagggctgcctgacccttttgcctaagccacatgtgggagtcaacccccacatgctaattcctgctgagttgtggcagatggatgttacgcactatgctccctttggaaagttaacatatattcatggctctgttgatacttttagtgattttatctgtacatctttacagatgggggaggccacttgacatgtaatcagtcatgtctctcctgtttggtggttacaccacaaggcaagattcttcaggccagataatgccctgggatatgctaggtcccggcttaaaccagtttggctcaaatggggttttagctttttatgggtttcctattaaccccgaggcaaggtcgtacaagggctaatcacccctaaaattgccctaactacgccggggacagcattcccatggagagaacctctattcgacattgttcattccataacacggcatctcaactttacctcacatcatcactgaggtctacacacaacactgacgcctagacacaacacaacaacaaccctctctactgcttcttgtcttccttttctg

SEQ ID NO: 631312 - DNA, 963 bp, Homo sapiens
gtaaaacccagcccatgacccctaacagtgtgccctctcagccctcctaatgacctccgtgcctagccatgtgatttcacttccactccataaccgctcctcatactagtgcctactaaccaacacactaaccatataccaatgatggtgctgctgatgtaacactgatgaaatgcacataccaattgccaccacacaccacctgtccaaaaatggtgccttctgatactgtgtgataatcctatttattacctcagaagttttttatcttctgcagtgatattttcttgagcctattatacacactaccagaaactaagacacccatacacccccaaattaagagagtggcacttggccccccacacatgtgcaatacaacaacacctgacttaaatccacactaaaaagtcacacacatccatcaacacaacatacccgctatatactacgaccatcatgatgtaatacaatacacactgaatactacaccaatacgtctcaactagaaacacacaaacccgaaaaccgaaataaaactacaacgccacttgccttcatcacacaatctcttcaccatgggctctactaatttacaaccccttaccatcaccaaagcccttcacgacgtaactctccgcatgtactcccccattctcaacaccaactttatacctggactgtgacaatacataccattgctccaagaccactaccatccattgtacagcgcaaccatgtgcacttccccacctatcaacctatcccaccgtacaacatacatttggccatcaacactattaccccatcacactaatacatgcaatccaatcaccgcccaaccctacactactaataccatcctctatatcaattccaacaaacactcaccgtatcgccctacgaaacaccagccacgactgactacattgtgcatacatacacactctcctattccaaccc

SEQ ID NO: 631313 - DNA, 134 bp, Homo sapiens
cccggtagcgaagaaaggcgggcggtcagtagcaggtgcgtccacctccgcatgacaacagacacattgacgtggtgggttacccgccaagcgtcgatggtcttctgtgtgaaggccagcggagggcctcgtgg

SEQ ID NO: 631314 - DNA, 328 bp, Homo sapiens
atggaatgtgtgtgtgagtgtgtgaatgtgtgtgaatgtgagtgtgaatgctggtgtaatgctgtgaagtgtgtgaatgtgtatgtgtgaatgtgtgtatgtgtgaatgtgtgtgaatgtgtgtgaatgtgtgtgaatgtgtgtgtatgtgtgtgaatgtgtgtgtatgtgtgtgaatgtgtatgtgtgaatgtgaatgtgtatgtgaatgtgtatgtgtgaatgtgtctcaatctgtgtggtgtgtgtgtgtgtgtgtgtgtgtgtgtgtacacgcgcatgcgttgtgtaaagtgtaggcctatatgggtgtacgctgaagcgggtg

SEQ ID NO: 631315 - DNA, 630 bp, Homo sapiens
cagatttagggaagttttaccttattacactttaatctctggatttaccccatctcatttctcttttaggaaaactgtttgtatgtggtggctttgatggttctcatgccatcagttgtgtggaaatgtatgatccaactagaaatgaatggaagatgatgggaaatatgacttcaccaaggagcaatgctgggattgcaactgtagggaacaccatttatgcagtgggaggattcgatggcaatgaatttctgaatacggtggaagtctataaccttgagtcaaatgaatggagcccctatacaaagattttccagttttaacaaatttaagaccctctcaaactaacaggcttagtgatgtaattatggttagtagagcgtacacttgtgaataaagagggtggggtggagtatagtatgttgctaacacgcaacacaaagctttgtgcatatgtgcatagatattaaaacatgcctgtacattactgttttgggtttagtttggaaaaggaagtgcaaagaatgaagagtttgtttgttggtgtgactgtttagagacgtttgcgttatttttcttaatatagaacaagcaataaactcaagagattgagttgggaaaaatcaaaga

SEQ ID NO: 631316 - DNA, 259 bp, Homo sapiens
  misc_feature (219)..(219): n is a, c, g, or t
tcaaacaccgcaatcgacctatttttatttttttagacaagagtctcactctgtcgcccgggccagagtgcagtggcacaatctctgctcactgcatcctccacctcccgggtcaagcaatcctcccacctcagtctcctgagtagctgacactaaaggcacgtgccaccacacctggctgatttttgtgtatattttatttttttttttggtagaaancgggttttgcgctatgttcgcccatgtctggtctcaaact

SEQ ID NO: 631317 - DNA, 802 bp, Homo sapiens
gttctgttcgcatgtcagtgtagacgctgcacctggatgtacctagcattcgatctcagtatcgtatcacagggtgaaggcgagaggtggttactacactgcaattagaagactggcatagtggttctgtagtactcatttagagcacatggctgtggcagggttgatgagggaacgagcttgtggggcgtccgtgagagtgatggatgagtcctactaatgatgagccttctattctagcatcatgcacatcttgacttaagatgtgctcgtgtttgatatatctatgttttcgctcagatgcatagccgtgcgtcgcaccgacggagttctcagtgtctcaatgcctctttgttcgcttactatcattgctttgatgatgtcgcgtcgtattctgactgtatatgttagctgttgcctatctcgtcgatccgagatctgatcttccagttgcgcgctccgatatctccaggtagtgttcctctgtgcgagatggtctccgggcttcttcactcgagcctccagggcggattccaggaagactccttggtactctcccgataggtccagctctagcagtctcttctggctctccttagatccttctcgtacgcagatcatcgacagacgggatggcgcgtcccgctccaaatgccaaatcacctaaccagcagattgggcaaggtagaggaaaatggcggggcccatctgcctcacgatcacccatagtgcacattgggtatactccgccccggacctgtggccagggtcacgttcatgggattctttcccctcctgggaa

SEQ ID NO: 631318 - DNA, 308 bp, Homo sapiens
tgagtccttacgacgaagcgtaaattattggtgacgtttaagatgggggcagcacattggaagtccctcatgagtgcgggcccgccacttgtccagagggccacgagtgggtgcactgtacttgagcccacagccatctgggatgagccggttttcagtcacgatgtcttctatttcatcagcattgaacttggtgaagccccatttctttgaggtgtggatcttctggcggccaggaaactatgaagttaggacttgagcaggtcctctgtcagatgctccatagttctacgagcttcgtcgagtca

SEQ ID NO: 631319 - DNA, 904 bp, Homo sapiens
ggaactagtctcgcgtattttttttattatatattaaaggtatgtgagggggaatgcgggaaatggtaaggggtatggagacaatatcatataagtaaggctagggtgagtggtaggaagttttttccataggaggtgtatgagtgggtccgtagcggaatcgggggtatgctggtccgaattcataagaacagggaggttagaagtagggtctgggtgacaaaatatgtggtgtagagtccaggggagagtgcgtcatatgttggtccctaggaaagatggtagtgggcgagagggttgtccataatagataaggtcggggatatcggctatgaagaatagggcagaaggggcctgcggagtatccgagtgtgagaacgcctgaaacaagtctcgagactcccctatgccggcaaggtccagcacgggggagtcacaggaagggcctacatggacaagtggtgggaagacacactcacatcatgaatgggccaaagggtccatcagacgggcaaggaagtaacaccaagaagtgggaaccaagaaagcaggcagacaaaggcggtagagacaagagtatacaaaggagagggcacactaaattcaaagagaaacgtagcacaaaaacaagcacaagaaacgatgaaaagcggggacaacgaggcgcaggaaacacaaccaataaactggcccacacaattgatcatgagggcgagcaacatcattgaacatacgaagacacaaacacgcaagacggaacaccaaacagcgacagagcaacataagcaggaaaataagagggaaaggcgaaccaccgcccccagcgaaaaacaaaacaagagaaaagggaggacaaccagacgacaagaggcgaccaccccacacgaggggactagaaaaaaaa

SEQ ID NO: 631320 - DNA, 353 bp, Homo sapiens
  misc_feature (195)..(195): n is a, c, g, or t
  misc_feature (227)..(227): n is a, c, g, or t
  misc_feature (231)..(231): n is a, c, g, or t
  misc_feature (249)..(249): n is a, c, g, or t
  misc_feature (251)..(251): n is a, c, g, or t
  misc_feature (260)..(260): n is a, c, g, or t
  misc_feature (311)..(311): n is a, c, g, or t
agatggagcctaggtctgtcaccaggctggatggagtgcagtggcactatgttggctcactgcaacctctgcctcccgtgttaaagtggttctcctgcctcagcctcccaagtagctgggactacaggcacatgtcaccacactcagctaatttttgtatttttagtagagatggggttttagcatgttggccangatggtctcgatctctcaaccttgtgatctgnccanctcggcctcccaaagtgntnggattacangcatgagcaccctgcccagtcgcattatttcttaaaaaataaacacaagtngttctctgaaaactgtcgacgcggccgcgaatttagtagtag

SEQ ID NO: 631321 - DNA, 304 bp, Homo sapiens
tctaatgacacaggacagtgtgtggagcgttaagagctcggtggtaaacgtgcactgaaatacagtcatgctgtgcagaagctctctagtttcattagataccttttgtcaattttggcttttgttgccatttcttttggtgttttagtcatgaagtctttgcccatgcttatgtcctcaatggtattgcctaggttttcttctaggatttttctggttttaggtctcacgtttaaatctttaatgcatcttgagttaatttttgtataaggtgtctgcaaggaacccacgcgggtaccgagct

SEQ ID NO: 631322 - DNA, 141 bp, Homo sapiens
  misc_feature (88)..(88): n is a, c, g, or t
gtgtatattgctgtgatatgtgttgcaatgttgaaatggactgtgctggttggctccagcgggaggtgcacttgaaaagaggatcagncgtagttgtgacaggcagattttctggcttgcttatgtttggggtggactctg

SEQ ID NO: 631323 - DNA, 102 bp, Homo sapiens
cactccgacggaagcaatatgaaatgatctgctgcagtcgtctgagccctaaggattcatcttatcttttcacctgtaggtgtgcctgcttgggcattgtat

SEQ ID NO: 631324 - DNA, 320 bp, Homo sapiens
cgccatttacaactatctcagataggtacagggagcactgcaatggagtcttgcagttggggagagagattgggctctactctatatactacaagtaaaagcgggaatttatagacaaggatgtgggtgtggttggtggatggaaaattactagggggcaacattaggaataagagaggattctggccaaactgacctaacagggttcttgttgaaggcaggccagggtgatcagacatcacctggaggatggtgaaggatgaggaacctaatcagatatgaggatgatcagatagttgtaaatggcggggtaccgagct

SEQ ID NO: 631325 - DNA, 198 bp, Homo sapiens
tcagaaaagctgttgacttttcttaaatcagcttccctgctgggcccctgaaaatggactgggtgattctgtttggcaaaaagtggggaaaaaacccggtttccagcttgcagatttgttaagtttttcaggcagattttgactttcagcctttcaaacttggttaagcaaccatttgtattaaatgaagttttttga

SEQ ID NO: 631326 - DNA, 392 bp, Homo sapiens
accatgtagaagacgaacagacattgaatgctactgtaaacaactacaggccaaagtagatgcataagaaaaatccaggacactaaactagacagaggagcttgcagtagcaaacaacaggatcattaccttacaagaagaaatggaacgagtacagaggaaagtcctacatactggaatccaatcggaagggtcccaagcgacagacagaactgcagaagggcaagcactaagtgaagcaagcaaagcatttaaaagaagagacacaattacgattggatgttgagcaaagcaactggagatgcagatcagcatgcggcaggagatggaattggctatgaagatgctggagacggatgtctgtgagaagcaggatgccctggatatctctt

SEQ ID NO: 631327 - DNA, 134 bp, Homo sapiens
ttatatttggctttttgactcttttaaaacaatcagcctgcatttatataacttttataaataatatcttaacttgacccaaattatattattatttataaaagttaagatattaaaagttcctttcagcattg

SEQ ID NO: 631328 - DNA, 149 bp, Homo sapiens
ccccctgggggtgctgcccgggcctcctgagttttggaacaagtggatgttggaaaagccagccccttttcccagcacaggggtgcctgacattgagccccccctttccaagtttttttgtgaaaacaattaaaggtcctgccctccca

SEQ ID NO: 631329 - DNA, 564 bp, Homo sapiens
cagtaaactactattcagcacgtctgttttgtacataaagttttactggaacacaggcgtattcatttattcttatattatcccatgctgctttagcacaataatgacaaagtatagttacaatagaaactttatagcatactaaacctaaaatatttactatctggcctttaatagaataagtttgtcaacccctgatacagcacaatcttgaaagcccctagatgtacaataagaaccagactacaagccaggtgcagtggctcacgcctgtaatcccagcactttgggaggccgaggtgggcagatcatttgaggtcagaagttggagaccagcctggccaacatggtgaaaccccatctctactaaaaatacaaaaaaatgagctgggcatggtggcgcatgcctgtagtcccaggtacttgggaagctgaggcaggagaattgcttgaacccaggaggtggaggttgcagtgagacgagattgtgccactgcactccagcctggtgacagagtgagaccctgtctcaaaaaaaaaagatacatccctaagcatggatct

SEQ ID NO: 631330 - DNA, 433 bp, Homo sapiens
  misc_feature (40)..(40): n is a, c, g, or t
gctgtggatgatctaaggatcccttggggctccatacagnggtcggctccattcagggtcccactcatccccctttcatgcacgattttctgatctggtgggtgggcacagagcagctctgcaaaataatggggtaatggcttctgtagtcggggtaacgaggcttcagctgtacaatcttcttagacttgtaaaccaagttctgccacctgaggctggtatccaaggcatttctctcgttctttctccaggggcttgatctggtccagcaggtgcggcaggggcatgttctggtggcaggggtacttcttccggatggagtccgggagccccttcaggtatgcttcagaagacggcgcctcttcaaaaactggaaagtaggcagcattttctttcagatgaccatcaatgcactgggtgatctgaagaatcc

SEQ ID NO: 631331 - DNA, 315 bp, Homo sapiens
  misc_feature (28)..(28): n is a, c, g, or t
  misc_feature (181)..(181): n is a, c, g, or t
  misc_feature (251)..(251): n is a, c, g, or t
gaactacacagattgactccagtaaggnagccccatgtggaggtgatagaggcaggaggcagagaaactctaggcagacaggggtaggtccctggcaaaaccccaccttcaaaccaaaaagtctgaaacccatggcccaaagtgagaacttttatcctggtttgcccactgtctcctgatnggttctttccgaataatatctttttaccaatcgaattctgcgttttccaaaactacctatggcccacccnatcccccatcctgtgcctataaagaccccagactcatctggtagtaggggagaagtggctggat

SEQ ID NO: 631332 - DNA, 120 bp, Homo sapiens
ataaagaaatcatgagatataatgactcatagaatcctcacacctactatttaacagagatgccagtggggcttgagattgcatcacttgccccactggcatctctgtaaaatagtaaga

SEQ ID NO: 631333 - DNA, 277 bp, Homo sapiens
  misc_feature (193)..(193): n is a, c, g, or t
  misc_feature (202)..(202): n is a, c, g, or t
ggtggttcttgcagaatgggggcaggtgccatcaagtggatggcgctggagtcattctccgcggggttcaccaccagagtgatgtgtggagttatggtgtgacttgtgtgggagctgatgacttttgggtgcaaaccttacgatgggatcccagcccgggagatccctgacctgctggaaaagggggagcggnttgcccagncccccatcttgaccattgattgtctacatgatcatggtcaaatgttggatgattgactctgcaaggaaccctgag

SEQ ID NO: 631334 - DNA, 250 bp, Homo sapiens
cattgagcccctgatgctagaaaatcagctgtgcgcttctgattcaagcttctagattcacaactattaaacggttctcaagttactacgttatttgttgtccaaatgcctctagcctctgacatgaatcccaccttttcccccttcctgttttgcctgtttacaagaggtgtctgcatgtcactattagccccctcccccaatgagaacaggattttgtttccggaaactggatcagcttctcctcagt

SEQ ID NO: 631335 - DNA, 174 bp, Homo sapiens
  misc_feature (129)..(129): n is a, c, g, or t
gtagaactcgtgcggggtcagtgcgctcctccagctcccggtaccacagcttcagcagggacgcagggacgtgggggtcttccagtgcctgtgtggcaccttccactggtccacctgcagcttcagttncattcacctcgctcaatgtccccaggaacccgttgagcgccaggt

SEQ ID NO: 631336 - DNA, 167 bp, Homo sapiens
cggtttttttgtttaaataaaagattacaatttgaatgttgatgtgataaattatttttgtaatgcattgccccaacatgttgttgtacctttctttattccgattaggcacttgggttttagatgactatatgtatgatctacatttgatgtaggtcttttttgat

SEQ ID NO: 631337 - DNA, 327 bp, Homo sapiens
  misc_feature (75)..(75): n is a, c, g, or t
gggtttcaccatgttggccaggatggtctctatctcctgaccttgtgatctgcctgcctcagcttcccaaagtgntgagatgacaggtgtgagccatcagacccagcatttttttttttaatttaaatttaaattttttttcatttttttgagaggttttttttgttttgttttgttgttgttgttgttgttgtttttgagacagtcttgctctgtcacccaggctgggagtgcagtggcatgatctctgcaacctctacctcccaggttcaagcaattcttgtgcctcagcctcccaagtaactgggactacaggtgcacgctacc

SEQ ID NO: 631338 - DNA, 220 bp, Homo sapiens
cttcgacaaggacgacagcgcccggctggtcatcgacgaactgctggccgcctcgcggcgcggggtgaaggtgcgggtgctgatcgatcagctgtcggcgatctccgacctgcagatcctcggtgcattgtccggtgcccacgagaacttccagctgcgggtctacaacccgaccttcggcaaggcccggctgaactacttcgactacgccggcagcgtg

SEQ ID NO: 631339 - DNA, 434 bp, Homo sapiens
attagaaaatcattactaattactgagaccaggaggtaaagctgcagtgagctgtgatcatgtcagtgcactccagcccagacagcagaatgaggcccctgtttcaaataaatacattaataggttggaaactaacttcctctatttttgccttttggtgccactgctgtttctattctgagcatatttatagcaacaaccatcaccaacaaatacatacaccattagaaagactctctggaactaaaccctttcaaaaggaccctaattttcaccttctacttctgtaaagcatgtggggcttgaagaagttgaacaacctgtgccagaaggtgtgcttctaaggggcaggaccggaactgatctgctctgtgtcctttgctgtaacccagtgtggagactgggtctccaccatagatgtacgcttaaagggt

SEQ ID NO: 631340 - DNA, 352 bp, Homo sapiens
  misc_feature (175)..(175): n is a, c, g, or t
  misc_feature (318)..(318): n is a, c, g, or t
ggattatcccgtcagctggaaaaagcaatacagtaagattcaggtctccctgacaagtctgtagtagggagcgaataaagccatacatctcaagatgcaagcccagcgctgagccacacgcagtgttctgagccccttgatctctgcaaccgttgatttttatcacaaagcaganggaactgcaagaaacggtttgcaattcagatcagagagactttcgcagacctgccacacagaaggaggccttctctttcattctatctcattaggaaatgtatttattcattctaattcatacataaaaatttgaagtcctanaatttgagacaggtctcatttaacttcgaaagct

SEQ ID NO: 631341 - DNA, 864 bp, Homo sapiens
  misc_feature (200)..(200): n is a, c, g, or t
  misc_feature (254)..(254): n is a, c, g, or t
  misc_feature (262)..(262): n is a, c, g, or t
  misc_feature (296)..(296): n is a, c, g, or t
  misc_feature (316)..(316): n is a, c, g, or t
  misc_feature (320)..(320): n is a, c, g, or t
  misc_feature (326)..(326): n is a, c, g, or t
  misc_feature (332)..(332): n is a, c, g, or t
  misc_feature (335)..(335): n is a, c, g, or t
  misc_feature (346)..(346): n is a, c, g, or t
  misc_feature (350)..(350): n is a, c, g, or t
  misc_feature (359)..(360): n is a, c, g, or t
  misc_feature (380)..(380): n is a, c, g, or t
  misc_feature (382)..(382): n is a, c, g, or t
  misc_feature (384)..(385): n is a, c, g, or t
  misc_feature (397)..(397): n is a, c, g, or t
  misc_feature (399)..(399): n is a, c, g, or t
  misc_feature (402)..(403): n is a, c, g, or t
  misc_feature (415)..(415): n is a, c, g, or t
  misc_feature (458)..(458): n is a, c, g, or t
  misc_feature (492)..(492): n is a, c, g, or t
  misc_feature (623)..(623): n is a, c, g, or t
  misc_feature (639)..(640): n is a, c, g, or t
  misc_feature (647)..(647): n is a, c, g, or t
  misc_feature (649)..(650): n is a, c, g, or t
gacggacctaccactgccctgcgtatgtggtgcagcctctcttcaatccctaagaatggttctttcaaagcatgtatttctgaagaaactttagaaccacgttattttaaaagaacgaatggagaaaacaaatcgattaatgctcacagcttcttgggtgctttctcacgggtaaagccatggcatccgtaccttccatnggttgccttctagccagaaatcagtattatcgaaagtccagtgtttcttcagtnagttcttnaactagctctgattctgttaacttcatagatgangaaaaccacagaagggttgnctgnagtggnagaatncanctgggtggttnaacnactcgtttnnccattctgaacctgtgcttncnanntgtgagaataanangannctgtctgctacntggcatgaacagttgattctgacaatcaagatcctctgcctgntgcagtggtccatacatgaacagtccccttcagngccccagtattccaggactcttctccattgtacagaagaccgaaatgttgtctgagatctcatttatgaggacacagatcacaggcagccactgatataacgaagaacgtttaggcatttttctccaacanaagactatcgtggaanntggactngnnacctggtgcatctttgaaaggtgtgcctttaaaaacaagaccccctttaacgtatttgtcttccatgttgtgcttccctaaagtcgcccttacttttacatcatcttacttcacacaccttcgttaacccttctgcgggaggcggaatataggctaacaggtgcaggccacacggtacaggtgacgcattcaaactggcacacctcacacggcg

SEQ ID NO: 631342 - DNA, 349 bp, Homo sapiens
  misc_feature (49)..(49): n is a, c, g, or t
ccagtagtggtgtatatcatcctggccaacattgtgaaaccctgtctcnacgaatgctataaattagctgggcgtcgtggtgcatgcctataatcccagctactctggaggctgaggcaggagcatcgcttgaacccaggaggtggatgttgcagtgagctgagattgcgccactgcgcttcagcctgggcaacagagtgagactctatctcaaataaataaataaataaaacccacaaaaattagttggatgtagtggtgtatgcctgtaatcccagctgttcaggtagctgaagcatgagaatcacttggacccagaaggtggaggttgcagtcagccaggattgcg

SEQ ID NO: 631343 - DNA, 620 bp, Homo sapiens
ggcggtcctgaccttcttggtgtgttggaaccgtgagatccactccgaagtgagatcactagatgatctcgtatcgtcatcttgcacctgctcagagcttacagtcataatgttgctgctactcgaaacgatctctactgttcatcaagaatcgcagaacacaatactaccagaaccttcactgccagtttcaaccgaacaggttattgcttctaacttacaagacaggaagagatcctcacattttacatattgtcatgtaccacttaacaccaggccatacaaaataggtacaagcctgaatgtgatgtatatgtcaccgagtaaggtacgaccactagttttcacatcctttgaaatctgatgcactagataatcagaggcccttctttgtcactgccaaatagtttcttagtccttttggggaaacagggtacatatccataatacattttccgtccctttcatttgcgcagattcgtcataatatacttgaatcgtcaattctcttactgaacttaagccatttctatttcctggaccatttgaacggcatatgcctgctgacgctgcttgtttatcttgcagacaccaaggagcgtccggctcttcttggtgtg

SEQ ID NO: 631344 - DNA, 107 bp, Homo sapiens
acaggaaatagatcgccatcgatctctgttccctgcttttcttcaaaggttttctctgctccagcttctgtcttaacattcactataagccctccctttacttttcc

SEQ ID NO: 631345 - DNA, 340 bp, Homo sapiens
  misc_feature (17)..(17): n is a, c, g, or t
  misc_feature (24)..(24): n is a, c, g, or t
  misc_feature (38)..(38): n is a, c, g, or t
  misc_feature (45)..(46): n is a, c, g, or t
  misc_feature (88)..(88): n is a, c, g, or t
  misc_feature (137)..(137): n is a, c, g, or t
  misc_feature (155)..(155): n is a, c, g, or t
  misc_feature (164)..(164): n is a, c, g, or t
  misc_feature (197)..(197): n is a, c, g, or t
  misc_feature (225)..(225): n is a, c, g, or t
  misc_feature (238)..(239): n is a, c, g, or t
  misc_feature (262)..(263): n is a, c, g, or t
  misc_feature (266)..(266): n is a, c, g, or t
  misc_feature (276)..(276): n is a, c, g, or t
  misc_feature (287)..(287): n is a, c, g, or t
  misc_feature (303)..(303): n is a, c, g, or t
  misc_feature (316)..(316): n is a, c, g, or t
  misc_feature (320)..(321): n is a, c, g, or t
  misc_feature (324)..(324): n is a, c, g, or t
  misc_feature (329)..(329): n is a, c, g, or t
  misc_feature (331)..(331): n is a, c, g, or t
cactaaaggacgaaccngctctcntatactagtatccntaatccnntttattgccacaactaacctcctcggactcctgcctcactcntttacaccaaccacccaactatctataaacctagccatggccatccccntatgagcgggcgcagtgnttataggcnttcgctctaagcttaaaaatgccctagcccacntcttaccacaaggcacacctacaccccntatcccatactanntattatcgaaacatcagctactnnttnaaccaatagncctgggcgtanggccaaccgctaacantactgcaggcacnactnnatngaccnanttggagggc

SEQ ID NO: 631346 - DNA, 215 bp, Homo sapiens
agcggatcccatcgtaatatgtaccatttcatataactaaatataggtcatgaactgtgtaagggcatgcttataggatcagttttaaagttaaattctttgatattaataccagaccaaagaccattttctgtttcctggaaaaaaaaaatgaatccaggttaggctttaggtgagagtaccttttttaccaagtagctatagtggttacatat

SEQ ID NO: 631347 - DNA, 192 bp, Homo sapiens
  misc_feature (8)..(8): n is a, c, g, or t
  misc_feature (26)..(26): n is a, c, g, or t
  misc_feature (73)..(73): n is a, c, g, or t
  misc_feature (141)..(141): n is a, c, g, or t
  misc_feature (166)..(166): n is a, c, g, or t
  misc_feature (183)..(183): n is a, c, g, or t
gagacagngtgtcattctgtcccccnggctgaagtgtggtggcacaatctcagctcactgcagccttcacctnctatgctcaagtgatcctcccacctcagcctcccaagtagctgagactacaggcatccatcaccacgnccagctaatttttgtttgtcacagngacaggggctcattctntcccccagg

SEQ ID NO: 631348 - DNA, 308 bp, Homo sapiens
  misc_feature (11)..(11): n is a, c, g, or t
  misc_feature (48)..(48): n is a, c, g, or t
  misc_feature (143)..(143): n is a, c, g, or t
ctcgtgcgttntggtttctttgagcaaaggagaagttgacaggatgantcgccagcaccctccccacccacaaatcctgtttttggattgttggtgtaccatacttcagtctcccaccccacctcccacacccatcacttctnttctgatgaagtgcttttaagaaaatcatttttgtatttaattgattttaatgttgaactctggaagttgaccatttccttgaattttgggagaaaactccaatagatgtcagagacatgcactgtccagtataactgccactagcccagcatgtgggtatttaa

SEQ ID NO: 631349 - DNA, 126 bp, Homo sapiens
tgagctaacactagtagtctcactctccaagacatatggactagactacgtacataacctaaacctaataccaatgctaaaaactaaatcgtaccacaacaattatataactaaccactagacatg

SEQ ID NO: 631350 - DNA, 372 bp, Homo sapiens
atttgcggctgcaaaattactgggctcagcaggccgggcttttcaccatgagcgccagaaaggccatgctggcacatcctgaggtggactataacctgcagtacagtcattacaacggcacggtacggaaccagctggcagcagaccaggcgcagcagcgacaggccattgcgaaactggctgaacactacggcatcatgtttttttaccgggggcaggaccccatcgacgggcaactggcgcaggtcattaatggcttccgggatacgtatggtctgagtgttattcccgtttccgtggatggcgtgattaatccgctgttgccggattcccggactgaccaggggcaggcgcagcgccttcgcgtgaaat

SEQ ID NO: 631351 - DNA, 929 bp, Homo sapiens
tactgcaacagctcttgcttctgtaaattgttccaaagaagctcgacgtgtaacgttggtcccagaacagatgggaataagtgcacagtgaattggatatggtgaaactgaatgtgcgagtgatgtccgccatacttgagtggagaagttactcactgggtttgacaatccatgaatgacatggagctacttgccgtaaactctattaataaccaggttcggtgacgtagtgctgagaggaggtactcatgggatccgctgacttgatggtcggtggacaacgaagatgtacactgttgagctaccatccatgtgaagctgaggactttagaatgaagtgctactcctcgggatatgaagaggtttactagagaaacacgtcaatggaatttccggacgcgcacactacgaaccctaagaatggaacggccactccaagtgaactactacaagatgacgccggtgcataggcccacatgcgtcatcgaatgcttccatcgcatgctgaaagctacccacgtcgccgcggagtaagccatagggggctcaccatctgggaagatactccatacgatccaggggaaataccatcgaactccttgtcacggtctgtagagagttgtcaatggctagtccgaggattcgtgacttgtaatctatacaacgttggtaaccccatgttctgcatcgcactagcatgaacatagtctaggccgttggtagatataccatgaagatagcctccacgtttggccgcagaaaagagaaccaatgccaaaacctctagcctctagagccatctgcatattgattgatccatgtctagttctacgagaaccaatgggtcagcgagcacccaatcaagaccatgaggtcttgccacccattaagtcccagcaaactcaataccatgtcgaactgaccaaatc

SEQ ID NO: 631352 - DNA, 263 bp, Homo sapiens
gctcacagctggccgtcacttgtgggggtccacgggacgatggtttgcagcttaaagtaaccggatggcggacacctgccccgaggtccccggccgccgccctgctgctgaccagcctgttttaagttcttgatgcatttctctgggtatttggggctatttttaaaattttatatgggtctttttgtgtgatttagacactttttgactcacgtacattttgatgtagtagtaattaccaaaagtacactcctattagtaca

SEQ ID NO: 631353 - DNA, 1022 bp, Homo sapiens
  misc_feature (19)..(19): n is a, c, g, or t
  misc_feature (435)..(435): n is a, c, g, or t
catttttatattttatttnttgccgcggcgtggctttcttttttgtgtgtgttttcttattttattatatgtttttagagaggttaagagtataggtggcgtaggacctattcgtcgatgtgatagtatagtctttatgtttgatcgaagataaattatgataaaattaaatcgcatcgcacacgccccgccccgcgcgcacgagagtaggggagaggggacggagaggaaccaccacaaccgacccaggctggccacgtcaactgacgtgagaggaggagggaagctgagaacgcgcaacgctagataacgacccccgggtgcgcgcggagcgaggcgcgggacagggaaaagaggttgtaagagatggtcactccacttacacataacagttaacatggatttgaatattactttttttgtagttggtgttgngccattgctttccccaatatttatttctcgcttcttcaatcaggttaattcacctcacggagtggtgtgggtggtgtggggtttattgagtgtggcatattcgcgcgccggtgtggtctcatggttcgttgaatttatgcgggcgctcaggttggtcgtgcgcacgtgcggcgcgacgatgagggtagtggtacggcgacaaacgggtgacgcgtacgatgtgtaagcctccgataggacgacgaggtagagtagcttcagcgacgattagatggttcacgcccaaagtccggcgaggacgaatgtggtggatagagtgtttgggtattcgagtttcctctgcacagtcttctccttctactctgtttacctgttctagcggctctgattatctgcataaagtattgtatgaagaacttatagtatgtgttgtgggtggatgttgatggtaggtgacgtattgtggatgttgttgctggttggtctcgcgtcttttcataccgcccttgtaatagaatcgataattaaagtgtatcgttgtgggtgagtttaggttgagtcgtgcgttgccgttctacttgtgcgcg

SEQ ID NO: 631354 - DNA, 425 bp, Homo sapiens
  misc_feature (423)..(423): n is a, c, g, or t
agttgatctctagagtatcccctggagcgtttctcgtggttgggttggggctattcctggtcagtctcgtggttgggttgtttgtattcctgtgtcacgtctcgtggctgggttggggtattcctggtcagtctcgtggccgggttggggtattcctggtcagtctcgtggttgggttggggtactcctgagtcagcttaatgtcccttgactgctttctcccacagccatatttaagcctcagtcctctctgctgcatgggctgttacagcagccaatctggcaaagccttccacatagctctatgtgtcccctgtgcaagtgctgggggatcctgactggcaggctttgaaaggctcgaacttgataaaatgtggtcccccgaccagtggagaagtcagcatcgtcccagaacggagccanca

SEQ ID NO: 631355 - DNA, 437 bp, Homo sapiens
aaggtaccgccaccatttgtatataagtgagagcaactgaatacttctttactgagacgaatccttactgtgagtgaaagtatttcgtcttgaatctgaacaatctgtacatgtactgactatggttagttattgctcaccagtcacatactctagaatacttttagtcagacccagtgactatgaccacagtgatagcagaagctggggtgggcacagatgcttatacacaatattacaaaagacgacattcactggcttagagaaactgatgaatgttcattacttttacatattataaggctagctaacttgaacagttaactttagataaatctacttacacagtacaatcaagtcacaaatactaaaaggtctcatgatctaaatggttactacttcccccaaaaccaaaacagagtgcgggtagcttagaa

SEQ ID NO: 631356 - DNA, 680 bp, Homo sapiens
  misc_feature (35)..(35): n is a, c, g, or t
  misc_feature (64)..(64): n is a, c, g, or t
  misc_feature (86)..(86): n is a, c, g, or t
  misc_feature (89)..(90): n is a, c, g, or t
  misc_feature (93)..(93): n is a, c, g, or t
  misc_feature (107)..(107): n is a, c, g, or t
  misc_feature (115)..(115): n is a, c, g, or t
  misc_feature (131)..(131): n is a, c, g, or t
  misc_feature (150)..(150): n is a, c, g, or t
  misc_feature (157)..(157): n is a, c, g, or t
  misc_feature (179)..(179): n is a, c, g, or t
  misc_feature (182)..(182): n is a, c, g, or t
  misc_feature (202)..(202): n is a, c, g, or t
  misc_feature (221)..(221): n is a, c, g, or t
  misc_feature (238)..(238): n is a, c, g, or t
  misc_feature (258)..(258): n is a, c, g, or t
  misc_feature (294)..(294): n is a, c, g, or t
  misc_feature (338)..(338): n is a, c, g, or t
  misc_feature (349)..(349): n is a, c, g, or t
  misc_feature (380)..(380): n is a, c, g, or t
  misc_feature (426)..(427): n is a, c, g, or t
  misc_feature (429)..(429): n is a, c, g, or t
  misc_feature (503)..(503): n is a, c, g, or t
  misc_feature (506)..(506): n is a, c, g, or t
  misc_feature (515)..(515): n is a, c, g, or t
  misc_feature (524)..(524): n is a, c, g, or t
  misc_feature (529)..(529): n is a, c, g, or t
  misc_feature (535)..(535): n is a, c, g, or t
  misc_feature (549)..(549): n is a, c, g, or t
  misc_feature (551)..(552): n is a, c, g, or t
  misc_feature (556)..(557): n is a, c, g, or t
  misc_feature (559)..(560): n is a, c, g, or t
  misc_feature (563)..(564): n is a, c, g, or t
  misc_feature (567)..(567): n is a, c, g, or t
  misc_feature (573)..(576): n is a, c, g, or t
  misc_feature (578)..(578): n is a, c, g, or t
  misc_feature (580)..(580): n is a, c, g, or t
  misc_feature (583)..(583): n is a, c, g, or t
  misc_feature (596)..(596): n is a, c, g, or t
  misc_feature (599)..(600): n is a, c, g, or t
  misc_feature (602)..(603): n is a, c, g, or t
  misc_feature (605)..(605): n is a, c, g, or t
  misc_feature (608)..(608): n is a, c, g, or t
  misc_feature (617)..(617): n is a, c, g, or t
  misc_feature (619)..(619): n is a, c, g, or t
  misc_feature (671)..(671): n is a, c, g, or t
gaaatattatgctttgttgtttgggagtatatggnggatgggggttattgcggaggatgggggngggggggtaatagggcaagggngcnnccnggtttgttaggggngggtcggngaattgtgtaggcggnaggaaatgatcattcgggnttggtgngggggggggtgtttagggggtnggntggggtggggtgtctggggngcctgagggggtctggtgngaatggtgttaatggcngtaaggggggaatgggggangtgggccgagggcgtctttgattgtgtagtaagggnggagggtgattttagcgggatggggggggtgtgccgaggggggngtttggtgccngtgttcgtgcggggaggggaggtggagggcngcggagggcggcagtgaaggggggcgggatgggggggggtgagganngngtgagggtgggactgtctactgagtagcctcctcagattcattgaactaggtctgtcccaatgtatgggatggnggntagtaagtntgtaattantgtgnaaacanagaatgatatttgnanncacnngnngannttnactttnnnngntnttnctatacttccacnccnncnntnttnccatgttancntttctgggtagagaatgttcgtaatataggctcgccgatgtgtaggagaggnagatataaa

SEQ ID NO: 631357 - DNA, 442 bp, Homo sapiens
cgcccgccccacctcgataatgatattgcacatctcgccagttgatagcgtataacgctgttctctacagttcatgcggtatgataaggccatgcttcagcgtctatctgtagagtcatcccggtcaataaggcttggaacgaatgtgtgggaacagatacatcacatattcttagcatggtctgtcgtaaagaacctagataatggattcacatctgcggtgtggagtcattggcctgtattataaacacttgtgggaagctgtgtgcgtgagtagtcctaggctaagagtactcactgtcatcatgttgagcatggtacaggcccgtatgagttaacaatagtttcatcaggcgggtgtgttggtatggcgcctatagtcccagcaattagtgggtataaggcagtattatagcttgaacttgggctcgtgccgaattcg

SEQ ID NO: 631358 - DNA, 870 bp, Homo sapiens
gccgggacctggcggtcaggaactgcatgctgaatgatgaacatgtccgtgtgtgtggcggacttcgggctctccaagaagatctacaatggggactactaccgccagggacgtatcgccaagatgccagtcaagtggattgccattgagagtctagctgaccgtgtctacaccagcaagagcgatgtgtggtccttcggggtgacaatgtgggagattgccacaagagggcaaactcccatatccgggcgtggagaacagggagatttatgactatctgcgccaggaaatcgcctgaagcagggctgcggactgtctggatggactgtatgccttgatgtcgcggtgctgggagctaaatccccaggagcgggcaagttttacagagctgcgggaagatttggagaacacactgaaggccttgtcctcctgtaccaggagcctgactgaaatcctctatgtcgaacatggcatgacgggtgggaggttactcctgaatcccctggagctgcaggagtgagctgaaccaccctaaatctagcagacctaaggattcctgtagctgctcactgcggtgaggtccatcctgctggacgctatgtctctgccgttccagaaccctagtcccgctcagcctgctgataggggctccccagagacccagggcaggaggatggtgctgagaaaaccctccacctggtactccctctcaggatccaagtaaagcactgccacttggggaaaaatccaacttcccattttccaccccacgcttatccacttggagcctggtttcctactatccaactcattccaagaagtcctccttttgtgagagctaccttgaaggggtccctgcaacgaggtggt

SEQ ID NO: 631359 - DNA, 193 bp, Homo sapiens
tctagagtgatcccagtatgctagagaaaaaggaatctcagaagtagatggaaacaggtttttagtattttgatttgtaaagacaaggtcttgtataggtagcccagcctggtgttcttttttttaaaggccagataaatttcttttttcttttctttttttttgagggggggggggttccaaaatttggccc

SEQ ID NO: 631360 - DNA, 205 bp, Homo sapiens
catctagaggatccttagtgagcaagctggcatgattgctgacattgcaggtatatgtgtgagtgcattaatgtcacctcctcgtccaggtaggtagaggttcctagttgtctggatcagcttgttccctctgtaccaaaggtattgacacattaccattttattgggcaatctcctgcttctgggacctgtcagcttgctcagt

SEQ ID NO: 631361 - DNA, 843 bp, Homo sapiens
agctggaaagtcgttatgtcagactcagctccgctccactggaccgcagtatgtaactgaaaagttcctgatcataaagcgtggtgttgcaagtcgaaagttagcaatgttgggagaattagtggatagatgctgacccatacctcaagtatcgccatcagtgattgctggcacgctgctttcattcagcactctacacagtcacgggacaaagctggctgaatcataatacgaaagactggctataccctggaacgtcttaagccttgtctcatggacctacaccagacgtacctcaaagcaccacagcatgacaacagtcaatacgagaaaggtacaaaagatttcaaagtatcctgcggtgtggtctcctcaaacccaccagagacactaaatctgtaacaaatgaaagactgcccttgtttctaagatgtaaatcactcacagtatatggtgtacagttttaaaccttaggtttaactttaacaatcatttctgaatacagaagttgtcggcaagtacaaattatggtatctattacttttaaatggttcaattgtatatcttggtatatgtatctgtcttagatattggtagttttaagtggtttgtaaagtataaatgatgcagtgtcaggatataattgatttggaaaactttgcagtccaatttacttctacggattgttagacaagacgtacttggtgactcattactggaagtgaaacttcttaaataagaaggttggaaaagcctcaattgtattattcaaagactggccatggggcggggaacacatacagcattggaagttgagaaaaaacacacatgcttgaccgttaa

SEQ ID NO: 631362 - DNA, 102 bp, Homo sapiens
gcggccgcctactactactactactgctcgaattcaagcttctaacgatgtacggggacatgaaaccccaataaatatcctcattgacaaccagtaaaaaaa

SEQ ID NO: 631363 - DNA, 126 bp, Homo sapiens
aagggggcctttcccgggctttttttttgtttttgggggggcccccccccctttgttttgggggggggggggcgttttttttttttaggggcccccccattttttaggggccccccttttttttta

SEQ ID NO: 631364 - DNA, 300 bp, Homo sapiens
gtatcacctagggtcgttctgcggtggtaagccatttaccaagatagttgtaggtaaagaagggcagatttattagagaaattgtgaacaatatgttgcagtgggcagctcagcagagaaggggctacctgcaaaagaggcaagggctggagcgaaagttttatacgggtcctgctagaagggtgctacgtgtggccatgaggtcattgttgcccggcaggttgttaggtgattaggctgtctctagacaattgttcatacaagtaattgttcattatttgttctcaacgttgggggctc

SEQ ID NO: 631365 - DNA, 114 bp, Homo sapiens
agctgggctgccccaagttttctgggggacttgccctggcgcgcctgccttcctccagctctcccccatggccacctgggactactccggctgtaaaaagcatttttaaaccag

SEQ ID NO: 631366 - DNA, 930 bp, Homo sapiens
catatttgggattatgggtggcaaactcttggatttttaaatgggcagtgaacataaagcgacaagaggcgattgaagaagggagtgtatatcgtatgtcccgaactgaatagttgggtgatgcgaagagacttacttggtatatgttgaaaaaagtcgtggatacttagttcaacggtgatgctttttccttaccggttacaggagataaaatgtgatcatccaagagacaggctttccgaagagaagtcctactctatgattggtgaaaaacaaggtgatctaggcgggtaacgggaaagatccttggattttgtatctttgatccgtcaaggggttatagcatttgagtaatgatcggaatgctactatccgcgtatcgtgagacattatgggagtgtgcccataacttacctcgtgtgccagtctaataactatatgtatcttcttgaatcgtagttaaggtatgtaaatgacaacatttataaccggtaatttctttaaagaagtagctttccagggattcagaattaagaagagatagtgataaggaacatgagagatacatttccatcaagtgtaatctaccgtctcatgatgacccacaagccctgagaagtatattcttctaaaagctgacacacacacacagacacagcgggcacagcacgcacaccgacagaatcttaccacacttttgctgtacgtggcagtgttcaccatgtcgtacagtccctactagaatagtgcagtcacgcgttctcagagggcaagacttctgtcggttcaccattatactcacagggcctagcaacttaacaggatgctgagtatttggaataatgacctgttatagaaagaaaactcactattaaaggttagtgtttactcagaattgttaatcttggagatgaatctcttgtgaaatat

SEQ ID NO: 631367 - DNA, 117 bp, Homo sapiens
agaatcgatgcacatactggtttcgaggtgcatgggccatgagccgtgtctaaatcctgtgtgtggaacatgacttcatcccctcacccctgtgcttttgcggggaggtccgttcgc

SEQ ID NO: 631368 - DNA, 91 bp, Homo sapiens
taagagacagtcttgttctgttacccaggctggagtgcagtgcaatcctacggagaatttctagcccattagaagaacacatccatgaccc

SEQ ID NO: 631369 - DNA, 125 bp, Homo sapiens
acgtgagtaaagggtaacctcagaagctacaatagcccatgaaggggaagccccattgcagtcgcaagcctgtccttgtccagaggaattggcaggtattcccggatctagccatgtacttccag

SEQ ID NO: 631370 - DNA, 138 bp, Homo sapiens
taccccttcgcgctacccgatgccgggtcgatccacgatcctgcgctcgggctctctaagacgagctggcgacatgccatcattggcactggtcggcgctgcaccgtacatgactggacgtacccgttgtgacggtat

SEQ ID NO: 631371 - DNA, 938 bp, Homo sapiens
cgtcactgtcgctgttcaccaaggagactaatgggtttcttgtagacagatctgctcaaagggggagacctatagaatggggtttttataagggtgtgttaatccctgggggccactaagggccctccattatgtggggaggccgccccggatgttggttgtgaaccccgccggtactatacctcacacgggcgggtgtttaaaaagagacgccctttctactttttaatacgctgggcggaactacacactgtgcatgtgtgaacggacggtcctcacgaaaatctaaattttttgcggacccgaaaaacacgacgtctctgtccaaaagtaaggggcatccatacatttggcggctcaataagtttaaggccccggtttcctacagccacccctttgtgaaagataaacattcttggccccccactaccctccagggtaaagactagaagttggcaactttgttttggcaagacctcctctcccgttcttgttcacacaaggcaactcctagtgtgagtgaggtgcaggtggtgaagtcacaaatctgggaatcccccccccctgtgagacaaggctacccccgttgcaaccctacatggatgcatgataccgaggcgggttactcccgccccactcgtgggcgaactgcagcaggtctcttctcccgcctccccgcgcggtgttctcctgtgtggttagtcttaccaagtgtcttctcccttgtcctcacgctccaccactacaggtcgtgttttcaagcgaaacgatgagtgtcaacagtagattcttgtgtcgccccttcattttgatgtgttagcccgcgtgttgtgccccaagtggccccggggacatggtgagccagggttttcctgagatgttctgcagcggggcctctcccccccccggaaaaaaaaacttttaaaaaaaaacaaaac

SEQ ID NO: 631372 - DNA, 1426 bp, Homo sapiens
  misc_feature (1085)..(1085): n is a, c, g, or t
gactgcttgtattgacctcttgtctgagcgctctgaggacccacataacgtctcgtcctgtgtctctcgcctaggacttgtcctaactcttcatcctcccccactgggtacgagggtcggtgtcgggctgcctgccagtcttaatcttgtctttctccgggcatgctggcctgggctagcgccgcgcgcaagagctgtaagctcggactcgtacattgcttctagtgattgtcgagtcagctgcgcggccgagccgtcgacgggcgtgggggcgcaaggggctgcgggtacctgttggaggctcttcatctttgtgtgcctctatttgcacgtctccaccaggaccttatgttggtcctttaggtttcgtcgtgcatcaattcgggaggggatccctcgccgtgttgcctcttcgcccgtatagatctgaccatcccttatgttccccttcctaggtctgggagagtcgcggggatgaccccgctatggatgtggcggtccatgggaacgggctactcgttgtgacttctcgtacaataacgcaccgtgtgctcccagttggccgcataaggagaccttatcgtctgtagcgttggccaggcgtttggcctctttagtaacgacacccacggacctattccttcgcgttctttctacatatgcaattggcaatcgcaattggagcgctaacatggaccgacaaaattgggtcttcgtcccattgacgagggaattgcaattgctctagtgggtacaggatgcaacgttatggccattctctggggttcttttcccgggaagaacccggggcagtttgttgcctatgggacctacccttgagtaacccccggacccatttctgcaagatggcgaatttttccttttagcgaaccttggtatgctgtgtctttgtagaccctgtcagacaaaattgcgacgcccctgtagagtgtggacacattttgtgaagggtgttggattccctgagtttacaccatacaagagagtggcgaccgtgttgtgcgggtagcaagtacgccaatttttttctcaaaacgccgactcggttatcgcccccatttatntgggtgccaattttccttccctttttgaccggacctagtgccctaccgcccgggggcctacacttggaaggggctctttgtgtgcacgattgcacattggggatgcagggtacccctagcgggtggctcgacaaaggtctccgacgtcattggaaaccgtttggcagcgcgagtttgtgagcgggtatgtgtgtgcaacatgccgtaagcttgtggtgtcaatttcgaacaagtgtatggtattacctgtatctagtcgagcagcacaaagtgtgtggagtttgtacaaccaattgtgtgtgaacggcagacgcgtcactggagcaggagatatacaccag

SEQ ID NO: 631373 - DNA, 181 bp, Homo sapiens
agaggatatcttaaaatgtaattattatgaagtggaggagaatattaaagtaaaggtggacactgtgaggcacctgtgcggagcgcagagcggaagtgcaggcactccagtgctggtagaaccggagagaggatgagagaaggggcgtaggaggagggagggatgggacacaggtggtata

SEQ ID NO: 631374 - DNA, 882 bp, Homo sapiens
gatgaaccatcgactctcatggcttctggtatccgtagccactgaccgccctcaaccgctgtcctgtgcgcctcgtcgtcgaaaccttgcgcataatgacactcgcgcggctaacacatggtttagttggcgccgtctccatctccatatccgatccgtccgatacctagggccacgtcaagcacaacgcagagataggctcagatcgctcacctcattgtgcgcgtatgtcagcacctgcaagcacccggcacaataacgcttaggactccccaacgaatattgcatgcttggttcgccgcgaagagccttgtctactaacaggtgatataactcgtgagtgcttatttaccttgggaggaagattcagcccctgtgccgatgatacttaatgactttgacgcgcatgtccaccctgttctgaggcccttagggcgcatcatcacgagcagaaggcgatggtcttttgggggaccgtagaatgagcttgacttcgggctagaatagctggtcaccaatgcctctggtcagtaggggacatctgcgagatataatctccgtgtcatgtggggggaagcaaaagcctacgcatgaaatgggacagcctggctattctactgagacaggttggttttcccgaaatcaagtaccaaaggtccagacgcatatcaaacgttgaacgggacttgccgacgtcataagggtccgtcctgtgcctagtgcatgcctggtggttgggcccatttggtctacttgcgcaagaattgcgaacgaccccccaaacgggcccaaggaaagtacagtgagaaaaggctccggaaggcatggcttgaaagtcccaacggttttctgatgccggtggccttccaagcacccgtatca

SEQ ID NO: 631375 - DNA, 181 bp, Homo sapiens
cttagtaggtgtgcatggatgcgcagcaggttagatgcggcaacctcctcggtagtgcccttctcctccaggtagcgctgcacactgctcgatgatggcacacacctggccctcatccttcatgtgctccactgtactctgtgggagtagagggtcagatatttggcattaggggtaccga

SEQ ID NO: 631376 - DNA, 204 bp, Homo sapiens
gacacctgaccgtagggttcgccacttagggttaggatgtatattagctcggatttcagatgggataggaaatcccccagtagcgttcagatgataagatattttagagattttggcatgtggtatgatttctgtgctatcacacatgctcgtgcaggctaaaagttggaagggtggttcttgcttacagggtggttctagttg

SEQ ID NO: 631377 - DNA, 203 bp, Homo sapiens
catctagagatccggcgagtgcatggtacgggcaggcgcagcgactcagcactgacaaggggggagtcgctgggtatcaagcacgaggaacccctggcacaggccaccacaacccaatgcgtccaaatttgcccagaagattggtggctccgagctgctgcccccgtatgcagccagggcagtctattgctgcggagacaggt

SEQ ID NO: 631378 - DNA, 416 bp, Homo sapiens
  misc_feature (373)..(373): n is a, c, g, or t
cacgaggcggccctacgttggcgccggaacgcccgagcgctgccgcacccttcatcgtgtttctggcgggcgaggacgttttcttgatttcgactgggtacaggacgccatcggcttcgatcaagagatcgacctccagaaggtctttgtcgcggtagaaataaaatggcgcctgtttcccccggtgccagtaacttttcagcaactccaccatgacccaggtctcgaatatggctccggagagggccccggcttccaagctctgagggctggaccactgggtgaggtagctgcacaagcccgtgtccagaaagtacaacttgggtgtcttgaccaggcgtttggtgagattgctgtgccaaggttgcagtangtacaccaatccagaagcttcgagaatcgaaaggcagcttttc

SEQ ID NO: 631379 - DNA, 223 bp, Homo sapiens
cccgtcacggattactcaaaacaacagagtatgcattcttctcatctgcatatggcacatactctaacattgaccatacaattggccaagaaaccatcttcagcaaattcacaaaatccaaaatttggatcacagcactcttggatcacagtgcaataaaaacagaaatcaatactaagaaaatcacaggcaggtgcactagctcatgcctataatcccagca

SEQ ID NO: 631380 - DNA, 222 bp, Homo sapiens
ccgctggccactggatctgtgtcttcctcatgcgggcggggacactgggctgccatgtgatcgaactgctcgtcaggaaacaagactccttggttgtgactgtggcacacaccccgcaaaacagtcccctttcttccgccacttctgcttccatgcctgcttgcggaggagcctgctacggtgtgcccggacgcggacggtagtgtttctagctccatgttt

SEQ ID NO: 631381 - DNA, 145 bp, Homo sapiens
tgtacctggggccttgctttactagctagggtggtgagagctgaggtgtataatgttagtgagcctagggtgttgtgagtgtaaatcagtgagagtgagtagtagaatgtttagtgagcctagggtgttgtgagtgtaattagtg

SEQ ID NO: 631382 - DNA, 124 bp, Homo sapiens
ggatttgctggtgcagtacaactaggcttaatagggctcgaattcgactcgaattcgagaattcgagcaactaggcttatagggactcgaattcgagtcgaattcgagattcaagcttctaacg

SEQ ID NO: 631383 - DNA, 241 bp, Homo sapiens
taggaccgtgatcgtagtggtggtgatatgcatgttgactgcagttatttgacagtgatatgtgctatgtacgatcaataataatatgtactatgtaatattaataataatatgtacatgcttatatgcatggggactagcaattaatgcacgacgtacatagggttatagtatattagattttttaggttttcaatgtgtaaaatttttggggtcacatatttgtatgttcggagcagtt

SEQ ID NO: 631384 - DNA, 286 bp, Homo sapiens
catggtccgagagaaattaggatattaaaagtgtacaggtaatgaataatagtggagacagaataaatcgccagtgacttcagagtgctagagacgattagcttcgaaccatattgaggtactggtgctagataaaggacgtagcttgggtatattactgtgatggtaagtacaatggttgtgttgtagaaagggaaccagagtatgaagaaaatcatggggactcaaaagtacaagttccttgaggacatctatacaggcatttctaatttctctcggaccaatg

SEQ ID NO: 631385 - DNA, 470 bp, Homo sapiens
ttttaacccctgcctacgttttcagttctggcaagtgtagggagagcctcctagcagagtccctctagccttcctcgtcggttggcctggaagcgtttctgtgtggccaaagggcggggcgaacaggaggagaagggtgcgcacacggattccttcacccactcgagttctcgcccacctacgtggctggaggagggtgcgcgtgctctgtgggtttggactgagtggtggttaaaccgcatggccccgtgcgtgctcacaagtgctgggctcccttgaatgtacccctaaagagggtacatttcctcggatgaaattttggcctaaaagcaatacagctccctttctacgtacgcatttaaagacatggaaagagaaccccccccccagattttcaggggctcgctcacattttcatcttttttcagttctgtgaaatgggaggatctgaaacggccatgattattaag

SEQ ID NO: 631386 - DNA, 805 bp, Homo sapiens
gcacagagaatatgactcagattatgtaatgagacctacaacaccccggtccatgtacgctggccatccatgccgtgctgtcccctctacatcctctgagcactccactggcattgtcatcgagtactagtgagacggggtgaaccaagcggtgcccatactaggaaggctactccctcgcccccaagccatcctgcgtctggaccttggactggacggtgacctgatgcgactatcacatgtactatcttcactgtagcgagggtacacgcttcgaacagcacggtcgcgaacggcaatgtcattgacgcgacaatcgaccgtagaaagctgtgctacgctaccggtccctgtcatattcgaacatgacattgggacctaccgatcgtagttctctctctactcgtggagcaccaagcttattgagcctgtccgatggctcagggtaccaatcagcaatttggtgctagctgagcggattccacgtgtccgtgaagtgcagctgttaccaagctattcctgtccctgggtatggacgtcttgatctgcaatccacagataactcaagattcaacttccagacattgaaagtgtgacagtggacactccgataacatgaaccttgttacgaccaacagcgtgtgctgtcgaagacggcacactatcatggtagcccgggcataaggcgactagggaattgcaggaaaagtgacgatcaccgggcctgcgcgccccagcaccagtgcaagatccaagatcatcgcacccaccagagcgcaaaggtactcggtggtggatcggtagg

SEQ ID NO: 631387 - DNA, 486 bp, Homo sapiens
gtccgtccgccccagccggtaccagaattgctgattaccctgctgccagccctgctcatactgctgcgccgattcaggccggatcttactgctgtccaccgaagaacagaattgcctgcgctcttcataattacgatgcagtccatctgaaccatctttgttaccgataaaattccagtcaccggtctgacagtcattcatccggctgatggtgctctggcaagccatcagcggcaacaacaacaggaacgacaccagacgacaggcgcgctgaagcaactccctggcagttgatgaggtagtcagtaagacaggcatctggtcagctatggcgggcatacaatcactttcaacggaaggggtgatgacataacgtaaagagtggcacggctgttgacgccgtttcacacattacgttacataaagaggcagggattatcgcattccctgcttgattttccgattcaggtcatcatgtaggcgaag

SEQ ID NO: 631388 - DNA, 114 bp, Homo sapiens
gccaacgatggtcatcagctgaggctgttggaatgagctagaggatctggggtgagctgaggactggtggggtgagctgagcgatgattcaatgagctgacgtatggtgcgggt

SEQ ID NO: 631389 - DNA, 589 bp, Homo sapiens
tcgccaggccccccctcgtttctcggagattaaggggatatctcaaatgttatattgatatttattggccctggcccgggtgaacttcgcggggaagagaaggcgaacccccctggtcacatcttggttcccacacactgtctgcttggcccccctgtggagaccacagctctgcacccgttcttttgtctcttctcacaatctcggcgaaacacgttcgtgagaagtaaacgtggaaggacgggagcccggaaagacgaagaagaagggctggacaatcctgcccacccggtgtcccaggcacacgggcacagggaggggacccacatggccccacaagggtcaaaggggccccagaagtgcaacagctgccaccacgggagggaggttcttggggagatgggcacgtctacggtggcccgtccttggtgagtgcaacacacctgcgcgcaacaacatcgcggccttcctggctttttctggcccccacacgtgtcctgtgctgtagatactgtatcaaagtcccagcgtttagatggttaaacatagagctgcttctgtgtaaactcctgcttaattttaaacacta

SEQ ID NO: 631390 - DNA, 224 bp, Homo sapiens
  misc_feature (29)..(32): n is a, c, g, or t
  misc_feature (63)..(65): n is a, c, g, or t
aaaaatacaaaataataaaatagccaggnnnnggtggcctgtgcctatagtcctagctacttnnnaggctgaggcgagaggcccaaatgagcccaggagtttaaagttacaatgagctgtgatctcaccagtgcactacagcttgggcaacagaccctatcaaaaggaaaaaaagtttcacctgcaaaggtcctagttctgtggactaaagggcctagaggcac

SEQ ID NO: 631391 - DNA, 80 bp, Homo sapiens
gcggccgcctcctactactactactactactactaccactgctcgaattcaagcttctaacgatgtacggggacatgccc

SEQ ID NO: 631392 - DNA, 783 bp, Homo sapiens
atacagatactcaattaaaaaatgggtaaagaatttgaagaagacagcagctgggtgtggtggctcacacccgtaatcctagcactttgggaggccaaggcaggaggatcgcttgatgctaggagttggtgaccagcctgggcaacatggtgaaaccctgtctctattaaaaaaaaaaaaaaaaaaaaaaacaaaaacttgtccaggcgttggttgtgggcccatgcgctggtagtctcaggtattcaggagaggctgaggttgggacggattgcttggagccgtgggagaggtggagactgccggtgagccaatgatctatgccacttgtactcccatgttgagaacccgtgttctcacaacaattacacaaataatttgaaaatgggcaatcaggtggtgaataagcaagtcccacttcgtggatattatatccacacagaatttcaaaggcagaactcttcaaaaaaagaatttgggacattacccagtgttttactcatagcctgtaattcgagcaagtaaccccaagagggtaagaaacaaaccgcagattattccattcacaaagagtaaacgggctctacacgaaacatcgtgtgggagctggggtgcgggggctaccacacctggtaatcccagcccttgggaggccagggctaggctggttcacccggagcctcaggagtttgagaaccaggccgtgcaacatggaaaacccccgctgtttatcaacaattacaagacatcacgctgggcagtgcaagcgtgcacatgtggccc

SEQ ID NO: 631393 - DNA, 387 bp, Homo sapiens
  misc_feature (2)..(2): n is a, c, g, or t
gnttcaggaatctcatagagcactgcaccctaaaaattcttctatgaccttaggaagcaagaaggaccactcctactcctactccacatgatgcagaagcacttccccatcctctttcatggggcaaagctgagtcagtattttttaatgttggaaccaataaaataatgtgaaattcttaaatctcagcactgttcagcatattctcaacattacacaaaatctggctggcatgctggaaaaagaacagaatgataaagaccatatttgagctgtcatcatatagcagcaatgatctatatcatagcagttgaatcataggcctgattgatcattttcatgtgcattcatcaagaaggacattaaagcctgactttgcatccatga

SEQ ID NO: 631394 - DNA, 267 bp, Homo sapiens
  misc_feature (59)..(59): n is a, c, g, or t
  misc_feature (254)..(254): n is a, c, g, or t
tttccgccgctcgcgagacccgcgcatgcgctcgcttctctacctgctgctgcctaggncaactctcccccagcgccagacatcaagagatttgacagcggctatcgagcgacgacgaccgctcacaaggtatcaggactgaaggaaaacattgaagacgcattcccagggattgcaagcttgcagtgacctgctgggggctgtagccgctctgctgcccagctctcagccctgctgctggtctgccctctgcngagagagaaaaag

SEQ ID NO: 631395 - DNA, 180 bp, Homo sapiens
  misc_feature (2)..(2): n is a, c, g, or t
gnttcaggaatctcatagagcactgcaccctaaaaattcttctatgaccttaggaagcaagaaggaccactcctactcctactccacatgatgcagaagcacttccccatcctctttcatggggcaaagctgagtcagtattttttaatgttggaaccaataaaataatgtgaaattctt

SEQ ID NO: 631396 - DNA, 106 bp, Homo sapiens
gcggccgcctactactactactgctcgaattcaagcttctaacgatgtacggggacatgtgtcctgtgtttttgatacaaataaatttgttgtagccaaaacaaaa

SEQ ID NO: 631397 - DNA, 690 bp, Homo sapiens
  misc_feature (2)..(2): n is a, c, g, or t
gnttcaggaatctcatagagcactgcaccctaaaaattcttctatgaccttaggaagcaagaaggaccactcctactcctactccacatgatgcagaagcacttccccatcctctttcatggggcaaagctgaacgaagtactatgccatgaaatgtggaacgtggcttcctgaacaatggcagacagtctgaatgttgaaatgtgaaggtgcaggggaatttgttcaccatggattgaaagttaaccaaacagaaatggcagataggagacagccagacatgcagtttccttctagtccttcagttcttcatgctgatggacacctgcatattgaattatttcatctgaggcaaactacaatggaaaaataaaatcacctgaaatgatgaacagttaagttataaatgaatgctgacaatagaaaacagcacaatgtcttgtgtagtttaaatatatgtagaagtaagatgaatttaacaatgacacaaaatctgaaatggagtaaacacattttgaatgttctctaattctaacattactggatgaactggtagagaaaataatttgtattcaatataataaataaaacacagaaaatgtaatgtctcataatatttagtagaaccagtaaaagaatattgaaagaatgtaactaagaaaccaaataaagaaaaaaattattaatcca

SEQ ID NO: 631398 - DNA, 438 bp, Homo sapiens
agcgggcacacagccatccatcctcccccttccctctctcccctgtcctctctctccgggctcccaccgccgccgcgggccggggagccaccggccgccaccatgagttccagtacaatatacgagcaactacgtcgacctcctacaagcggcgctacgtggagacgccccgggtgcacatctccagcgtgcgcagacggctacagcaccatctccgctcagagtaactccagctactcgcgcgccggtgtcattcctcgctgatccgtgcgccgcagcttactcctccagactctggactcgtcgatgccccacgtctggacgaaactcgcacgtgagcccagagtacccgcacatccagcaacgacctcacagtccatccgccacgcaatgagaaggcgccagctccacgcccctcacctgaaccgcattcgaccg

SEQ ID NO: 631399 - DNA, 141 bp, Homo sapiens
tgttgacggctagaaatacagcctcgcattgatttgacaaggttcctgtcagagtaccaacgtgggtccctcattccataaagcttaagctttgaaaaagtgaaacgccatgttagccaggatggtctcgcatctcctgac

SEQ ID NO: 631400 - DNA, 203 bp, Homo sapiens
  misc_feature (33)..(33): n is a, c, g, or t
ttccccccccccccgggaaaggtttggaaaaanggcccccttttttggaaaaaatttaaagggggaacaaaaccccccccaaaactgccttttaattgtttttgggggggccccccctttaggggacccctttttttcaaggaaaaggcccttttttttttttggggccacccggccgctttaataaaagttttttcccccca

SEQ ID NO: 631401 - DNA, 162 bp, Homo sapiens
ggatctgcgtgctgaggttgtctatgctccactaaggctgattggtaatatgcaggtgcaggagtagtgtccttcgagtttggccagctctgtgcaggtggtcaattctccctgtacgggtttgtagagtcccgtagaggcgacagctgttgtgatgtggcg

SEQ ID NO: 631402 - DNA, 497 bp, Homo sapiens
ggatcacattcgtaccttattgggctggctcaagctctgcaagagcagaaggtggcccaggcccatgccttccaggatgtcccctggagcccctctctgggaaagtgcggcagagctactggccgctgacaaaaactatgggccctcgtgctagagaggccttcgaatccaccatgctccagcccaggaagcaggcccagtgcctgtgcttcccacactgaaaccgacctcagagcaccctgcctcaactgtgagttttttcttggaaatcctctgaaactggaaagggtctcagtcctgagtagggcgaacgtgaggtccattctgcatctccatccaccttagctgtctccttggaaacggacagcaagggagtatgaggtgcactgacacagtcatttctgaacagtgaagagatgacaggtagggtggtcccccttgaacagtcagacagaagtagctgtatctgatgcactaggtggcggggagtgatgggg

SEQ ID NO: 631403 - DNA, 462 bp, Homo sapiens
tctagaggatcctggacgcttcattataacaattcaataatcctgtgacttatatatctaaatatgcccccaattctaagcagagtatgtaaattggaagttaacttatgcacgcttaactatacttaacaagctgtgagtgccagagattgaagagttccaatctgacccagatgttgatgttggataagcgaattctctgctccccaactctaagttgccagcccctaataaaactacctgtggagcaaactggtcagatacatccaccctggagcacgcactcaaagtagaattataaagaagatcatgtccatgttaacattattataaccctacattttgtgcataaagtgtaagtgtataagccatatcaatattaaaaagcaagcaagccgaattaggaattcatcccaatccaaatgcggcatcttcaaacctccatgatgctgcttacatgtc

SEQ ID NO: 631404 - DNA, 391 bp, Homo sapiens
acgttaagtctcagtccaaacagttatcacacagcactataaccaagtccctgggatttactgtcttgatgactacatggctttgccaagtctgagatgcttcagtgtgcaaggaagcagctgggagggcggaggggggtcttcacagggacagctggccagggacttcctgaggcacatcagttacgttggtcaatttagggcacggtctgttttctgcagctttgaaaggtggattctttctatttagcacactttaccaagagggcttgtaaaggattcactcagtccccagaatattaaacaactatttcagaacttcagagacctcttgatcaacagaaccgacatttgggctttaactggtaaagaagctaacctagttagggaa

SEQ ID NO: 631405 - DNA, 178 bp, Homo sapiens
ttggatgtgtgtgctatagagaggttggaaggggtggttggaaggggaagaaactaatggccctctgtgactcgacagctgggatgtatctgcttttgggagcagacatgagtttcttttgcaatttgtcttattgtttgggtctctggcgacaataaactatctcccctgaaaatca

SEQ ID NO: 631406 - DNA, 681 bp, Homo sapiens
  misc_feature (681)..(681): n is a, c, g, or t
ggcgccgcgggggccatggggagcaaggaagccgggagtccgagacccgggcccgcagccgagtgtcgccgcatggttcgccgcagtctgccgcgcgctggtgtcgggcatggtggtggcggaggcgctggggcccccgcgcgctggggaagcctctgcagctgtggacgcctcctgttacctgcgaaagctgggggcgcagaacgcggcaaacgcaatttccaaggaagcgcaaaattcccggggggcaggttttcttcgacttcgacccaagttgcaggggacctggacttcgccattaggaaccaaatttggttgggccggggggcaggaacatttccggggaaatacgccaagggcgggcttgggcggggggcgcgcgaccaccccaacggtcggtgaatctaacagacgcagggaggacccaggggcctcatattccggccaccgggcgcgttcgtggtgggattggcccggggctttgcggacaccaacgcggggtcatggctggagggagaggccccgccaatggggtgggaaaaaacctcccgggataagtccgcggaaagaaccaacgtggccacgagaataccagggcaccaagtcgaacccggccttaaacaagacctacagggacccaaggagagacggaaccccggcacgccagggggggacccagcn

SEQ ID NO: 631407 - DNA, 226 bp, Homo sapiens
cggctcagcgatcctcccagctcagcctcccgagtagcatgggactacaggtgtgagccactgtgcccgcctgagccctcccttcttaactgcttatctatccgtatcattatccgtagtactacatggattcttaattatggcttatgtttttaatagacaatttgtaagagcaatattagaattacagaaaaactgaacataaagtacattagagtattctaag

SEQ ID NO: 631408 - DNA, 352 bp, Homo sapiens
  misc_feature (244)..(244): n is a, c, g, or t
ataaataagtgcaaaagtcacaaatgacatttacggatacatagggcgaaaattagtatctggtacttgtagtgatacagtacacagagtcaagaattccgtgcttttaatcagagttgttgtagtggacataaaacaacacagtttacggccttctgaagtcaagccataataacattcttagactgtcccattagtattttgggacgttgctcgtagaaattcactgaggtttcttataaangggcaaattcagtaagagatcattctctagacaatggttctcaaccatgaggtaccagtccctcaaggaggtagctggtcaatatctggtagacattctatcggttgt

SEQ ID NO: 631409 - DNA, 332 bp, Homo sapiens
ctgcataatgaattaactagaaataactgtgcagggagagccaaagctactgacccccgaaaccagacgagctacctaggaacagctgaaagagcgcacccgtctatgtagcataatagggggaagatgtataggtagaggcgacaaacctaccgagcctggtgatagctgcatgaccaagatagaatctaagtttaactttaaatttgcccacagaaccctctaattccccttgtaaatgtaacctgctagtccaaagaggatcagctttttggaccactaggacaaagccttgtagagagagtaaaaactttaacacccatgctaggcct

SEQ ID NO: 631410 - DNA, 1263 bp, Homo sapiens
  misc_feature (189)..(189): n is a, c, g, or t
  misc_feature (376)..(376): n is a, c, g, or t
  misc_feature (456)..(456): n is a, c, g, or t
agcggggcgtcggcggcggcggcgacagagcgagcgcggcgcggggccaccatgggggcccagctcagcacgtagggccatatggtgcttctatcctcaatctgggttcctagtatcaaggcttgttacattaagagcttatatccattcgcttccgttgcctgccgatcaccctacgattatcccaanactaacaatttagctccatcgactgagtgtctatctgagccaggtataagatcggactttcgtatatggccgcgaacactaacctaccaagatcccctaatcgcggtcaatcccccagactgcatatgcgatataaccgatcccctgattccaattctaagcgatctaaacttatctataattgtgnaccgcgatatataaaagacaagttatagactgcaatttaccatttcctatatctctcattgaaactaccgcgatacgacnctggcttatattataattgaataagatcgagatcaaatgaatcgcgatatgcataccgaagattgaaaccaatcaatttatctttcccagatctctcagagatttatgcctcacagatgagaaaatactgagaaattgacagatgggcctgaaaatatattgcgggattcggataattaataacctgcgcggaaaaattgattggcaaggggggccttcaagaataaatcaaccgaatggttgccaacctcattaaccgtgagaaattagcgaatcgggccgaggactctattcgctagatcaaagaaaaaaacctatatgcgcgaaggcatggcaggaaggcgaagagtattttgaccaatgaaagcagaggacaccgtcttggcaggagacatccaagtcctaaattaccccccaaaaaaacaaacaaatataaaaaccattgacccaacatagaacgaaaccctaatataagaacctatcatctttatttttgctatcccattctccaaatattcccattcttcataacccagaatgaggataaaccaaactctgattcgactattgctataatcgatatttttgatctaccattaaaactaatgctatactctaggcggcgcattcgaaggctaccatagaacaccgcctaattttggctaaatcccccttagaaatcccattgggagcacattccataagccgccttgggaaaattacactacgaattccgtgcagtcactctataccaccccccaggataaagataggcctttataagtggaacaaattattccccccatc

SEQ ID NO: 631411 - DNA, 287 bp, Homo sapiens
ctgattcccctaaaaatcctggatgcttgtaatgctatttacaatggttattttgtgcttactgatgtgcagacattttttccaacccattcttttttttttggagaatgaagtttggctctaatagcccaggtggaagtgaagcggtgtaatcttagctccctgaaacctccgccttcaaggtacaagcgattctcctgcttcagcctcctgagtagctggaattacaggcatttgccattatgcctagctaattttggtagataaacgggggaaacagggggaac

SEQ ID NO: 631412 - DNA, 456 bp, Homo sapiens
catagggcctgtactttcgtgttgtgatcgaattgttgccactagcattacagtatgacacagtaaatcatctggtaacagctggtctctgtcacacagggttagacacagcacgtattggtagagatcctgaataaagaactggcagttagaattccgcttcgaattgagtgtgtcctgaacggtactggaggtgtagctctaggagcccacgtcaatctcacagtatagattgttctctccagttggttggcagacattcaaatctgtagcttcaatcacatgcaccatcaggcgctcaacgcctgaagtcttatgggagcggagcttgcgtaagctttcgcacgcatcttcctctcggtgtccatgtacagctcagaagccacagagatcttgtacacacagacggtcctctcattactgtggtctgttcgcagggtgtagacccgttggtcc

SEQ ID NO: 631413 - DNA, 238 bp, Homo sapiens
  misc_feature (7)..(7): n is a, c, g, or t
  misc_feature (26)..(26): n is a, c, g, or t
  misc_feature (37)..(37): n is a, c, g, or t
  misc_feature (70)..(72): n is a, c, g, or t
  misc_feature (100)..(100): n is a, c, g, or t
  misc_feature (103)..(103): n is a, c, g, or t
  misc_feature (108)..(108): n is a, c, g, or t
  misc_feature (132)..(132): n is a, c, g, or t
  misc_feature (140)..(140): n is a, c, g, or t
  misc_feature (149)..(149): n is a, c, g, or t
  misc_feature (189)..(189): n is a, c, g, or t
  misc_feature (198)..(198): n is a, c, g, or t
  misc_feature (204)..(204): n is a, c, g, or t
  misc_feature (210)..(210): n is a, c, g, or t
  misc_feature (233)..(233): n is a, c, g, or t
gattttnagccacacatagggttggntcttgagagtnacctacagaataaaagtacttttaaaataaaannnaaaaaaaaaaaaaaaaaaactcgaaatncanaagcnactcattgacttgcacagtccttntgagattnttaagcagnttacttccatcagtattgagccaggagttgaggtggaagncaccattgnagatgnttaagncaactattttaataaattgatgnccagt

SEQ ID NO: 631414 - DNA, 159 bp, Homo sapiens
ctgctggcccttacgcgcgccccccgtggaggcgaccacccattcgaacgactgccgtatcaactttcgatggcagccgccgtgcctaccatggagaccacggcagacggcgaatcaggggtcgattccggagaggcagcctgagaaacggctacggaa

SEQ ID NO: 631415 - DNA, 201 bp, Homo sapiens
gacgagaaaaggaaatggaagaggatgaacgagataggaagagagagaaggaggagcttgaggaaatcaggcagcgcttctggcagaagggcatccagatccagatgcagagtccagaggatggaacaagaggctgagaggcgcagcagccacaaataaagcaagagccagaatcagaagaggaggaagaagaaaagcaag

SEQ ID NO: 631416 - DNA, 1235 bp, Homo sapiens
agcgggagggggccgtggagccgcgaagtggcggcggcggcgacgacgccggcgggcctggcgcgcggcgccgctgtggctccgttcccgttcccgtcccgcgtcgaccagcgaacgcatcgatcatcccaacggggcggagacggagacaggagagagagagatcatgcaggagaaagcatgtgttgatctcccgcaaagggacagtgagagagggacacgacggaaatccggatgacaggtacacaagaggcctgatagagaataggccggacgtgtagatagtagcgagaggtaacagcggaccgacacggggaaccaggggccacaaggccgcggaaaaggcaggacgacagggagaccaagacgaggacagaaacacgacccagcggcagcacagaacgaggaacacacacgagacttaacacacaagaagaaactaggaaagagtaacaatagagaagacgataagataagagtgtacagttagggaaagggcgagattaaaagcgtggggggagaaaaaaagtaagcaggagatgaacggggtacgaggggaatagggagtgggaaaaagattgtaaaacatatggggaaagggagaagaacggggaacagttgtatagagagccagagggggtggtagtgatgatccgacggaagagaactagagacgagcaggaggacgagcagcaaagagacgccccaaaggggcagcaagggacagagcagagaaatgcagagaagttgtgtggggcagacagggcacaagcaggaagagaaaagagttaagcgagatgcgcgagcgacgtccatagggagaccagccgagatgcccgagtaacagaacgggggaggcagtacacagaaccgcaataggggtgcagcagggggggctaagcaacacacggcaacagtactcacaaagaaacaacagaggtggggagcaataatgaggcacagaattcacaagacagtatgcagtgatcgggacaccaacaataatgggaagatagagtctaacaacgagcgcaaccccgacatacacaaatcgaaaggggagcagatagacagaagacaaaagcagtaagaggcacagaccagccacatcaaaatctggaggcaaacaaaagcatgtgcggagtgaccacacaacaattgcaaaacgagacagccacacgtaggatgatagacacagcagacaagggacacaacgagacacaacggaacgcagg

SEQ ID NO: 631417 - DNA, 427 bp, Homo sapiens
  misc_feature (262)..(262): n is a, c, g, or t
  misc_feature (285)..(285): n is a, c, g, or t
gatcccacaagagcattcaagctctacagcagcatgggcagatctttgatgtaaccgtgctgcatgagtctgtctgataagaggtaagggcaggttctctctgtctggtggatctgtacaggctggggaacacccacttccagctttgctgaagatctactcaaacctgacctttcctatcaggagagatggcttgtctctgcctgaagctggccagttcagtcccttattctgcctgttggaagcccctgcttgaaccctnaactattgactgctgcagacagnttatctccctaaccctgaaatgctgtgagcttgacttgatcccaaccctaccatgctccatcatactcaggtctcccctactccttgccttaggattcctcaataaagatgctgtaactaggcatttttttgaattgccctt

SEQ ID NO: 631418 - DNA, 545 bp, Homo sapiens
gcacgagggagagtctcttttttttttttccaatctttcgtgtggtttcctggcagtgggggagctactgaaaaaggcctgtccacattttagctggggtttctcctacctctttagcttccctgtcaaagccccttgcccttcctcggggaacttcagggcaacatgggttttggaggaaactgcaatttcttcagccttataattgttccgctttttccaagcattcccgagggctggtcttctccattgttcaatcaaagctcttgcttatccccctggccctaaagaccaaggaaagcattggctttccctccgggaaagatctctttttactccccttggcctgggcctcttccgtctcccgtcaggccctattcgaatttcaggtttttgtcaccctttgtacctctggggggtgtccgggtctataaccaccctaatcggtgtttcttttccctttattaggatgcccccatacttccttttcctcggcacaatttggtctctgggctcatccgctaatgtcatatcctgttaacccg

SEQ ID NO: 631419 - DNA, 174 bp, Homo sapiens
tgaaggtggtactgataacttcttgcttcagttcatctacaaatgatctttccctcgtaaatcccagatcttgatgctggggactgtggaagcacacagccagtagcggtctagggctgaagcacagatctgttgactgatgtccccaccaatctagacgtgtaaacggtgttt

SEQ ID NO: 631420 - DNA, 472 bp, Homo sapiens
tgtggtaaaaaaggggttttttttttttggggcgtcttctcttattttcacaaaaaaacagagagaaaaaaaaaaaaaaacacccacaacacaaaaacacactccccacccccgggggaacaaagagaataagagagggcagacggggggctgagacacaccccttgtagtacagacggccttcaaaaagcgagaggcgcaggagagagagagggcgaaaacaacacccgataacacacacccgcgcgagaggggaccaccgcgagggggaacacgaggtgcgccccgcgcgggcggggaggggggacacccccgcggggaggacccttattttagcggggggccacaagatttttcccacaatatatttcacctcccctatccctataactcgatttctctccgggggagaaacgtcttctccccccgcccccctccggagggggggcgctctccctcctggagaaataaa

SEQ ID NO: 631421 - DNA, 209 bp, Homo sapiens
agatctggccagctggaagcctgccacctcctatgtgctggaccaccatcaacaatgaatgctctgctgccactgctcagcagcatcagacacatgatcctgcaagaacaatgtacctgccccgacctgcgcatggcagccatcctgcagtggccagcgccatcctgcgcagccagaagccttgtgattggtgaagaggaagctggact

SEQ ID NO: 631422 - DNA, 857 bp, Homo sapiens
atgtggagagcagtgtggcgattcctcaaaggctaaaagcagaataccactcaacctggcaatcccattgccgggtatatgcccagaggaatataaatcattctgccataaagacacatgcacacaaatgttcactgcagcactattcataatagcaaagacatggaattaacctaaatgtccatcaatggcaaactggataaagaaaatgtggtacatatacaccatggaatactatgcagccataaaaaagaacgagatcatgtcctttacagggacatggatggagctggaggctattatccttagcaaactaacacaggaacagaggaccaagtgccgcacgttctcacttataggtgggagctaaattgtgagaacttatgaacacagaaaaggaagcaaagacagtaggttctacttgagggtggagggtgggaggaggaagaggagcagaaaaaataattattgagtaccaggttaatacctgggtgatgaaataatctgtacaataaattccatgacacaagtttacctatgtaacaaacattcatatgtattcaaactaaaataaaaatttaaaaaacatgttcttattaataatttagaagaacgtagtatagatgaaaagttaaaaaataagtggaatctctacagtagaaatcatcttcttcaaagtgacttttttcgtacatcatctatgcaatatggagttgccaggggacttgggagagaaactcacggttcaaaacagtttaccatgagccttgctatgtggggccactttaaggaagccttgggggggggggggaaatgcgaatatttggagggtggtgtaaaaaagggggaagggggaa

SEQ ID NO: 631423 - DNA, 1040 bp, Homo sapiens
  misc_feature (401)..(401): n is a, c, g, or t
gatagcatctcccccctcctagtgagcaggggcctgcagggcatcactactccagcccctcgcccttctagtggcaccctcagtcaaaggggcaggtgggtgacacttccaagtggggcagctctcctgctacatgcgccccacccccatgagtccagttcagccctatctgggcggctgagcagggggaaatcccggtccattgtgtacatagctctccattgggtatgtccctgtcccatgtaggcgcaccaagcgccacttttgccatgactcgtccctttaaagtgcgctagtagtggtgcccatgccatagtggcacatggcccactaagctgagtgctggggtccccagcagcaaagactggaaggtctgtgtatggtatgtcattcgctttgcnttcgccgagcccccttgatttaacttgtggggagtcaaacggggagtgccccctgcggtcctctggtctgttcagacggtgctcgctggcgctgcgtgaatgacgccgatgggccgagagagtgcctggggatctcgaccttcgtgagttgttggtgaccgtggctgagggtggcctctcgtatccccgggagacgcgccaatggttgcatctggcaagcgccgtactcaccgactccgtgccgaactacggggatagaggttcgcgcggcgtaggacacctgtcatgaggagcactggcaccgaggtgaccgcacgctgtggaatcttattaggcccttcattcttgccacccctgattctcttgaaactctgtagaatcacataacgccccgatttcaccatcggttctactccgttggtgacccgtgcgcgccgattcggggggcactgtgctcctgcgcgttcggcgttgggaggccttccggccaggggaagacgtggtgggattgggccccccccggggggcccccgtgattccctgtgttgttgcttgagacttgttgccacccccgccgggactcctgggcagtggccggaccgcgccataaactgttggcggtgttcgggtccccctttg

SEQ ID NO: 631424 - DNA, 92 bp, Homo sapiens
agttcgaacacttttgttttttggggttttcttttcctgacatacaaagattctactaaaaacaaaccaaacaaacacaacaaacacacaac

SEQ ID NO: 631425 - DNA, 164 bp, Homo sapiens
agtggccggtccacacaaaatagactacgaaagtggctttaacatatctgaacaccaatagctaagaccaaactgggattagatccccactatgcttagccctaaacctcgacagttaaatcaacaaaactgctcgccagaacactactgagcacacatggtgt

SEQ ID NO: 631426 - DNA, 296 bp, Homo sapiens
accccggcaactgcttcggatgtgtttaggagggcactggctaccaacatgcgtcaccctgctaaatcgagtataagtcccactcctaaacacatccgtattactcgcatcccgagtctcaatcacctgagctcaccatattccaatagaaaagagccgaaaccaaataattcaagcactgtttattacaattttactgggtttctattttaccctcctacaagcctgatagtactttgaggttcccttaaccatttccgacggtatctacggtttagcattatttgtagccacag

SEQ ID NO: 631427 - DNA, 505 bp, Homo sapiens
aaattaccaagtggaaagtagtaaataactatgtaaactagaatcacatgtcaggatctaaaatcttcggacaataatgtgttcttttttcctacacattttgggaactccctcagatttaacatcaattaaataacctagctaaaaccttgaactcttatcaaaacgaggtagggtggtaaaataacaataatttcatactcatagtttttaaaagaataaaacaacgtgattagacagacatttcacaatttttggtggtcatgcaatttgggatacagccattcgtgcagtggattcacaaagttggcatagagaaatataagtttcctaagtggaaagggaagattataaaagagggaaggagaatgagagtaagagattggttaaagatgcaaaggatttccacttcttcatggtaatgtaaatgtgtctgcttttaaaaaagcacaagcacggaaaaatctattgggataatgccttcactctatgcaactatatctga

SEQ ID NO: 631428 - DNA, 112 bp, Homo sapiens
gattactggtggtcattatgatgtagattgtcgattagaagatcctgatgatggaatctgcctgtgtttcaattcacggaagcttttaaaggtttttcaatcgaataattaa

SEQ ID NO: 631429 - DNA, 546 bp, Homo sapiens
  misc_feature (29)..(29): n is a, c, g, or t
  misc_feature (59)..(60): n is a, c, g, or t
agaaacaaaaacagccccccacaaaaatnttacacaccccctcctctcccgctttctcnnaaaagattaatgtggcgcgggccccacaaaaaaaaaaaaaaaaaattcctccacgtggtcttccaaaaaaaaggggggggggtttttttttttcccccccctttgtttataccacctcttttttataaaaaacaacacagagggggggaacacccccacagaaaaaaatttcttttaataatagggggggcggcgcgttttttttacaaaaagaaaaaaaaaaaaaaaaattttttgcggcggcccccctccttttttttttaaaaaaaaaagaatttttcttttaaaaggggggggggtttataacccaccatcaacaaaagggtgtttttttgtgtggggggaaaaaaggcgcttttttaccaccggggggatctccccccgaaagaggggcgccccccccccgggagaaaaaaggcgctaaaaataaaactttttcaggtttccacccccccagggccaatatttgtaaccggaaaaattgaa

SEQ ID NO: 631430 - DNA, 234 bp, Homo sapiens
taattgcaatttttgttaaagcaatgttattttatttaatgtcttaggaagtcctaagcaatgctcaccgctgaatgatgcgttgcaatatctacaagttcccccccacgcgccaccccttctaactgtaagaatagcagctttctaacattactactttggagaaaaaaaaatgcctcttaaaactatgttgtatttataaaatggttctttataaaatcttttcagagaaat

SEQ ID NO: 631431 - DNA, 219 bp, Homo sapiens
cggtcatgctcactattgccactgagccaagctgaacaggggctcgggccataaggtgttgccacatgttggctgcaggctccagtgtaaaagcgggccgtataggtgatggggggcagtcgagtggttgggctggggtaactggtctccaccagcaccttctcgttgtacagagagatgtcaggaaaagactctgcggtcaggtgcacgtagggctgc

SEQ ID NO: 631432 - DNA, 400 bp, Homo sapiens
cactcgtcatggctatatacataaaagcatacaataaccaatgtcctgatatgcaatctggatgtgcagcatttcagcaacacataaaagaaagaaagaagaatggaaaagcaaagacgaaaaacacaccacaaagtccaaacctcacgaaattaacattcacttaagaacacagtggtgaagacttttggtagcaaaatttgcacggttcttaaaatgggagtcttcaaaagtacttcttcaaattcaaaagctaagaaaaccaaagagggaacagttacacaggcttagtggagatgccgcctgtcatgaagatgaccatcagtcctacttcccagacacagtgagaaccggtgagcctgacgaacctgaaggaaaaggccggctgacgagtgcccag

SEQ ID NO: 631433 - DNA, 166 bp, Homo sapiens
aatgtgatagaatattcatttggttttgatgtgctagagaaactggtacacattataaaatgtatcagctgacacaaccaaaaccaattggatatctgttaagtgtatatatctggagtagcatgtgagactagctttcgatttaggatatataactcatacttac

SEQ ID NO: 631434 - DNA, 158 bp, Homo sapiens
ggacaataattaaccatcacggacctctttacaaggataggttccaaatccttcgtgctgctcattggtcattacagtgactagcatgttttggacccataagccatccaagatgagacaagtgctgcagccatcacttaagctcatcacctagaatg

SEQ ID NO: 631435 - DNA, 949 bp, Homo sapiens
ctattccatttattgcccatctctatgatcaggctgtaatctccctgtggaccccgaagtaccaacaaattgagacttgacacctgggatcacatctccaaaattgccttattgtttgtcacccagatgatcccccaagtctacccactttgttaaggtcttcaaaaccttatgaaaaatcggcgaacccaaatttgttgacaacacctgcacgcaatgaattccccttgccagaaaaccatacttaaccctgcctcatgaacacaacttatgtggttgtgcctattaggaaaacaccccccttatgcgcagattccccaaagcaggccagacggaatcctctgtgtaaaaacagcagcaccaagtcgttccaacttctgtattcgatgtgaacaaaaccggttctccccacagagttttactcgtgaaccaacccctccccctctcccctgcatgatttatatagccgcccccccttttctgagtaaggagaaggaccacattcctagagcacacactcgccccttgtgttgatgcccttgttgtaacacaccagccccaacgcgctccactaaagaccccaccttgaaacctgcttttttggaatgaagtttctcccagcgttttgtatagaaaaatcttgcaaaggctgaccgatttaaggaaacccctctcttttccccagggaagggttcaaaaacttgtgttctgcacaatccaaactgctccttatggcattattatacacactcctactgtttatagcaattctcccaccctctcccccttagtgagatatagagataaaaaatattagactcacaaaccttaattctaatcctgtttttcttttttctattggtgttaaaccaccaccacccccgttttaaaaaaaaattttttttaaccttttccctttttttttttggttccaattttaaaaaaaaaa

SEQ ID NO: 631436 - DNA, 406 bp, Homo sapiens
gagacgagatctcatacttcacttcttttcaatgagaatcggagtggtcttttgggtttttttcccccttttaaaatccacagtgaatgtttcaaaggagggatagaaatgcttcttgagttcctcagagacttggcaaggtagacctcatagcaaccttgaatatgactttctttagtctctagctatgcactattaagtgcctcttgggtagaggtagagttcagtattggggtgccagtcttggacgtccggtatgcctcagtttttctccatattattaaaaggcagtaatacatacctaccctttatctacctacatcattgtgtggtacgggattaacatcgcgggagagccattctgaatgcctattaaatttccttgaacgagatctaacgaaatcct

SEQ ID NO: 631437 - DNA, 294 bp, Homo sapiens
  misc_feature (28)..(28): n is a, c, g, or t
  misc_feature (230)..(230): n is a, c, g, or t
  misc_feature (278)..(278): n is a, c, g, or t
taccatcgtggctcgctgcaacctccgnctcccaggagaattgcttgaaccctggaggcggaggttgccgtgagctaacattgcgcccctacactccagcctgccaacagagcaagactccgtctcaaaaataaaaaaaggatctacttttgagaatactgtcattggttgataaaatacagcagaaacttgtgaagaagctattttccatattcacctgggcatgtttnggagatgattgccatcaactttgttgactgtgaagggagaaacctttntgccacccaaaaactt

SEQ ID NO: 631438 - DNA, 360 bp, Homo sapiens
gctttcttccagctggaggccctggacaccactcccacgagggacgtgacaatgaacgtggccgccttgcagccccccgtggtgcagctgcacgatcagcaacccctacccgcggcgggagcacccccaagcccgaccgcgcggcctggtcgggcagatgactatccatggcctagcccatactcgactgctcggagcccacgagaccgtagggctaggacgccacgcgccgaggagcgccgtacggtgcaccttgtagagcgggcgcggaacctaaaaagcccaaaccaggcacaaaaggcacccgagacatcccatccgggtggcaccaccatgggaagagcgaaaaaaggcaaccaa

SEQ ID NO: 631439 - DNA, 854 bp, Homo sapiens
gccggccaagggtgctcgagtccttccgaggaagctaaggcatgcgataggggtgaggccctcacttcatccggcgactagcaccgcgtccggcagacgccagcccgtacactcgcccgcgccagtgggctctgtctccgaggctcgcctgtcagtctaactcgggcctcattctgtcacgacagattgaggtgacagtcacggaggataagatcaactgccctcatttaaatgcagccggtgttaaagtgttgaagcctttttggcctggcttgtttgcaacaggccctggccagcgtcatagcatttgggacgcctcatctgctagtgtacggggccggtggacctgctccaggcagctggtgctgcatccaggcaggaggtcctggccccctgccagctgctgctgactccagctgacggagaacgacacacgtggaagactacagaagacgacagcaatccgagggacgtctgattgactgacagtgggctcttggatctatggatgatctaaagcgctcttttagtaaccagtgttgcacatacatactggcgtgagactctgtaggagagtaagaatgccacaccaaaatcatcagagcaacatcgaccaacgaatcagtggggcagtaactattcccggggcgcgcggtgatgaacggaggctcgggctccaggagggaccccctgaggacggaagcctaggacacaacgtgaccccgcgatctctacggcacggatccgacgggaggaggaacaccacaggcggggtgcacccacaaaaaagatccggggcccgacgggtcggggagcctgatagaggaccgaggggcaccccgggagcttgaggc

SEQ ID NO: 631440 - DNA, 187 bp, Homo sapiens
ataaaaaaagaaattattcatgtgtgagtggatgcaactgtcgtcctagctacttgagaggctgaggtgggaggagatgacctgagcccaggagtcaagactacaggctgcagtgagctatgattgtgccactgcactccgtcctgggcaaccaagtaagaccttgtctgtaaaataaaataaaata

SEQ ID NO: 631441 - DNA, 116 bp, Homo sapiens
gtcaaagctgatgagcatgtcattgaccaggaggatatggagcacttttatgtcatgacggggacttattgccaattttggtacaaaaggttattcaaacccgctctttttggcaa

SEQ ID NO: 631442 - DNA, 245 bp, Homo sapiens
  misc_feature (42)..(42): n is a, c, g, or t
acatggtagggatactactacaaaggcattcactagctttanatacaggttactgttgatccccgacttttttttttggtttgtttgtttgtttttggtttttgtttttaagacagcatttccctatgtcgcccaggctggagtgcagtggcatgatcttggttcattgcagcctccgcctcccaggccgaagtgatcatcccacctcagcctcctgggtagctgggatatgtaccacagatagg

SEQ ID NO: 631443 - DNA, 548 bp, Homo sapiens
tactatcaatacttaatatttacttttcctggttttagttttcaaatttgcaacggatgctatttgcatagaatactgatggctttaagtcttaaaaacagaaatctgactgacccaaggaaaaggatgaaagaaagagattttgtccctttaaaatcagccaacacatcctatcttagtactgaagtacttcccaattctggcagaatgggctccttggccacctgcttgcactagggtctgactagcattttattaacatccaactgcagttaccaggacattcattaccactgcttgtacaaagcagaattctttttaaatttttttcccatacagatttcatcaccaggtgtcaaaagacaaaaccgtggcctgaggccaaatagaaaaatgtcatctccacaaataaggagaaaagacaaggactttaaaaaatcaggtcaacaagcccattagccaataatagtttgtaaactggactgtcttcacactagaggctgtgctagcaaatgtggtccttgaaacaagagcttagagcttgaatg

SEQ ID NO: 631444 - DNA, 226 bp, Homo sapiens
agacaccgggatagagaacgggaccgcaccactcagataggagtctcgttggaagcaaatgtcattctaatggacttgcatctcctcaccttcatcaggactaaaggacggagcgtacccacccttccttcctccaaacccctaacttccgtcccagacaaccagggaataccctcgaccccacaggattaagactgctgcgatctccaatccacactctgtttca

SEQ ID NO: 631445 - DNA, 110 bp, Homo sapiens
gaaaggagaaccgggaatgcccatggacattgtcaataacctctgggccgccttcttcatcaatcaacaagggaaaattacacttgaggttgaccattgtgacctccaga

SEQ ID NO: 631446 - DNA, 368 bp, Homo sapiens
  misc_feature (1)..(1): n is a, c, g, or t
  misc_feature (349)..(349): n is a, c, g, or t
  misc_feature (368)..(368): n is a, c, g, or t
nggttaaggacatgcctgtgacagcctcaggaagtcctggtggcaggtgccaaggagttggggtacagcttgcttttatacattttagggagacataatatatcaatcagtacatgtaagatcttattggtttgatctgaaaggatgggataactcgaggtggggggcttccaggtcataggtagatttaaccatattctgattggccgttcgttgaaagagttagtggaatgtgtgggttacaataaggagttgtggggagaggtaggttttatcatgcagatgaagcctccaagtagcaggctttagagagattagactgttaaatgtttcttttttagacttaagntccagtatttgatgtttan

SEQ ID NO: 631447 - DNA, 819 bp, Homo sapiens
ttgtattgatagcggatggctcttctatgatatgtgctttcgggctctgtatcttacctatcctgactacgggagatctgaaccaccttgatcatcagcacaccatgaggtggtgtcaccaccatgctctccgtttccctggccagctcaatgctgacctccgcaagttggcagtcgaagcatggtccccttcccacgtctccatttctttatgcctggctttgcccctctcaccagccgtggaagccagcagtatcgagctctcacagtgccggaactcacccagcgaggtcttcgatgccaagaacatgatggctgcctgtgacccccgccacgggccgctacctcaccgtggctgctgtcttccgtggctcggatgtccatgaaggaggtcgactgagcagatgctcaacgtgcagaacaagaacagcagctactttgtgcaatggatcccccaaaaatgtcaagacagccgtctgtgacatcccacctcgtggcctccagcatggccgctcccttccttggccatagcacagccatccaggagctcttcacgcgcatctcggagcagcttcactgccatgttccgccggcaggccttcctccacctgctacacccggcgagggcctggccgagcatggcgttcaccgaggctgagagccactgaccgactcgtctctgagtatcagccgctacccggatgccccgccgcacaggcggccgcttcgcgtgcggacgccgcgaggacggcctacggcaacagccccatacctcacgcttccagcttccctcccactcttactccactgccctttccg

SEQ ID NO: 631448 - DNA, 632 bp, Homo sapiens
accatcggggccaaatagcgccggctatgccctgtattggattgccaccggctcaccattgcatgcaagtttgttgagctgaaggaaaagattgttcccggttctggtaaaaagctggaagatggccctaaattcttgaagtctggtgatgccgccattgttgatatggttcctggcaagcccatgtgtgttgagagcttctcagactatccccctttgggtcgctttgctgttcgtgatattaaacaaacagttgcggtgggggtcatcaaaacagtggacaaaaaggctgctggagctggcaaggtccccaagtttgcccaaaaagctcagaagggtaaatgaatattatccctaatacctgcccccccccttttaatcagtggtggaagaacggtctcaaaactgtttgtttcaattggccctttaagtttagtagtaaaagcctggttaatgataaccatgccttggtaaaccctccaaaaggaaaggagaatgttttgggggcccctttggtttttttttttggggggggcagttttaagttattagtttttaaaaccaggcctttttaatggaaacaacttggccaaaaatttgtcccagaattttgaggccccttaaaaaagtta

SEQ ID NO: 631449 - DNA, 210 bp, Homo sapiens
tgattactcccggccgatttgtgctccagatctggcctagatctgccgaacatccaatcctgcctctgggatgcaagtcctgccatcctaatattgtcttagaaaagcttagcgccttccttcacaagtcagcagcaagtctacagcttctcatagttgtacatcagagtcacatccattcttggttcgggctgctgtcgggaatcctct

SEQ ID NO: 631450 - DNA, 415 bp, Homo sapiens
aatcctaaggaaaaaattcaattgtaaattggatcatgataaaccaagttactaggtaacttcatgctgctctacagcacccagctgaggacctacaagcctggcactcccccccccaccacagagtagtgctgtgcagagtacttagaaaaccttagtaccgctactgtaattttatatgaaaatatgtgtatttttcaataaagcacttataaattagtctctgtttagttatattgaaaaggagcattactttcctgcataaatgacaatcaatcatttattggtttatttcatctccactaacacatcagtcattcaccatttaaatacctgacttcatcagaaaccgtttgaacacttttttcttcttcctgccataaaaatacagtaatttgccttaaaaaaaaaatta

SEQ ID NO: 631451 - DNA, 418 bp, Homo sapiens
gttgcccgggctggagtgcaatggcgcgatctcggctcaccacaatctctgcctcccaggttcaagcaattctccgtgcctcagcctccggagtagctgtgattacaggcatgcaccaccacggcttggctaattcttgtatttttcagtacgagatggggagtttcaccaatggtcgggtccaggctggtctcgaatctcccgtatctcaggccaaggcggtgggaccgaagttacctctggagtatgaaaataagcaacaccattattgacacaaggttcgaacatacacggcaaaacgcttttcctctgggcgcaacaagggttcccacaaaaaccacggttccccttgccattttgcgacacgggcttaagatggcttaccccaagttacaagccccaaattttcaaggggtcc

SEQ ID NO: 631452 - DNA, 835 bp, Homo sapiens
  misc_feature (331)..(331): n is a, c, g, or t
  misc_feature (366)..(366): n is a, c, g, or t
  misc_feature (403)..(403): n is a, c, g, or t
gatgagcatcgatgcttacacaaaatggttgaccgcctcgcatatagttagtcattcggaatatactgacgctcgggacatcactaggcagtgacgcctgtatagtcgcacaggtacatcagcgtacgttaaggcatgaacaatcgcacatgtacacggcccacgagcgtgcacgaaggcttgcctggtgagtccaaggatcggcgctgatgtcacattcagtgcctgcggacgattagaacggtgacgcagtgatctcaggatgaaacaagaaaggaggtggtggaggctgttgaccattgtagcagacaccatccatggtggttgtggncatgtgggctacgtggaacccctcgaggctccggnccttcaagactgtctttgctgagcacatcagtgatgnatgcaagaggcgtttctataagaattggcataaatctaagaagaaggcctttaccaatgtactgcaagaagagtggcaggatgaggactggcaatgaagcagctgcgagaacggacttcagcagcatggaagaagtactgcaacgtctagtccgtgatcattgcccacacccagatggcgccatgcttcctctgacgccacaagaaggcccaggctgattggagatccacggtgaacggaggcactgtggccgagaagctggactgggcccgcgtagaggcttgatgcagcaggtacctgtgaaggcaaagagtatgggcagcgatgcagatgatcgcaggaacatcccgggtgacccaggggcaaaggctaggccagggggtcaccgaggcgttggagacaccgaaggaagctgccccggcaagaacccaa

SEQ ID NO: 631453 - DNA, 242 bp, Homo sapiens
agatccccgacagccgacaggctagagtgggctgggtgttgtgttggagctgcaggcgggtgggggctgcgtcctgctcagcccatcccctctctatccctgccacctgccaggctccctccggtgtgtttgagacagcctgccaggcctccagcaggaggacagagtgccctggggactccaccttcctgcccgggggacgtggcgctgtcgggctaggtcgggggggtaccggggctcga

SEQ ID NO: 631454 - DNA, 370 bp, Homo sapiens
gtagtatgtataaatatcttcttttgcatatataaaagatattaaatattttaaaatattatctgacagagcttagagtgctaaatccattaactagcccttgtatatatattgttagaacatactaaatttgattatgaccatgttaaacattgttattcaggtcatttagaaacatgtacagactgaaaagactattcttatttaccatgctaaatgaaattagattaatgtaactatagtaaaacagtagaatgccccaagagggtctttgtatcttcaaagtgtgtcagatacagtcttgattaatctgaggaaccatataatctgattttcagtatctttctatttttatgtgatcttatgtcca

SEQ ID NO: 631455 - DNA, 476 bp, Homo sapiens
atttttaaatgaatgcatttagtgttgtcagggaataattacaatatgtcagcaaaccttggcaaccattggaatcccgtttctgaaaattacagtgtagtgtgaagtagaaaataacaacgatggttttaactcatatgaaacatagaaaaaattcagaaacaaactagatttattggttttaaggaaaagaagccagaacaactaccagaatactgttctgttaggtaactcttcttttaaccaccttctttaattactcaggaaatatttctgtgttttcctcaacaactggagtagattttcccatgagttttatgttacacaaagtttagttatttttaaagttatcaaatcagctcttactggcttgaagttaagtatccatggaacttgtatttcctttgttttcctttcaaatgtctccccaaaatgcttgtaactgtgtatcctttctgtaaataattttgccactt

SEQ ID NO: 631456 - DNA, 339 bp, Homo sapiens
tccatgtgtgccgggcagaggctagcgagcgagccccaggtacctgcggccgtgtctctgcccacgtcgagcgtgcccgagacccgagggagaaacaaaggcagcgctgccctcgggggagcattggccctggcggaacgcagcaggtgtaattatccatccatgttatttttctctcatcttggcgctaccaggctgcccaaggggggcgggcctgggaatgatctttcacggggcagcacctaggatggggcagagacttgtggcaggtttgtccccagcaaaggctacatgttacctccttcaattgataataaacctttctgagatgcaaaaaaa

SEQ ID NO: 631457 - DNA, 788 bp, Homo sapiens
agcgggatcacccactatggcttcctagtgtcacggtccagctggtgtagtggctcggtgtgattggttagctctatgagtgcacgggtaccctcactcaggatttacgatatgcagaagaagagtcgagactgcctctcatgacccggagcgagggtctgaaaagcccttcaaggaaagcctctagtgatcttggtgccatagatgagtctccgggtcccatggaaaggaagaacttcaggggaagcgtctcgagaacagcacagagttgaccctcgaagctgaacaaggaggttgattgaatagtgttgaacaaggtaggtatttctctgtggattcatttgatatggttcaatagtatcgaagctgggacgataggcttgccatcctgttctcaatttgcaaggaagtcagaggcgtatagagacaaatgagaaacaagagcaaaggtagtcagtaatctaaaaaacagtggccaggatttaatcccgttgcaatagaacgagactaggttgatgttaaaggtaactgggatgaggagttacctcatttgcgagaccagggtcatgttccattgagctgcgtgttgatctggtaacgaaatgggcagaaagaaattggaatcatgtgccgacatggatggttgtacttcaaaagctacgttctaaggactctcgttggcaagatcgtcatggtacataccgtcgagattcgctgagttgtggactgctgtaaaatctacttgaagaatgttgtaatagctagggttgtgcgaaacgaaacgagat

SEQ ID NO: 631458 - DNA, 134 bp, Homo sapiens
cataattaccgcccatagtccttacacattcctcatcagccaagctaaaaatattaaacacaaactaacagcttacctccctcaccaaagcccgatgaaatataaacaaattataacaaaccctggagaaccaa

SEQ ID NO: 631459 - DNA, 159 bp, Homo sapiens
aagtattgatgtctgcctctgcaggcttgtcggacatacttctggtgggcactgtgcgcgaacttgaggactgaaactcagtgacgctgcatgcacttgaaacggcatggcctgtctcctcacttgagtgcaaggtccatcgaccaaagccctgttctg

SEQ ID NO: 631460 - DNA, 227 bp, Homo sapiens
ttaaagtcaaggacgtttatttcctgaggtcatgacacaggaagtggaatcctatcctcggcagcgaagctatcgtattataggaaagagtgatgttgtgacatacctgttggagcatttgcaggagtctgttatcttagcaagaatgctcatgacgttggtatagtgttaaacagtggagcaggtcctcagcgggcacgagaacagagcatggaggagcggccgca

SEQ ID NO: 631461 - DNA, 122 bp, Homo sapiens
tcatcgagctcggccatttttataactggtagactagaccttccttaactttagaaataaaatgaaggcttcactggatctgtgaggataaaatacattttctttaattgtccggggttgtt

SEQ ID NO: 631462 - DNA, 743 bp, Homo sapiens
gccctgatgcgggcggttggtcctgcctgatctcacactgctccaaagacactcagtatctcaaggactctcctggcactggtggaaaacagaggacgagaggctacggtgaagcagctgtccgagtgataagtgttacactgaatggccctcacgttgactagctggtacaaccaatacgtgaaaactggctgagcccagcaagtctgtgttcaaatgagcaagcatggtcagctacgtggaccgtgcctctcctcagtcgcgctggagcccatagaggaaggcgtgctgcgggtcggtggggaccaatagccacatttggttcgtcatattgggggcctgaaacgagtccctgaaagctgccatccttatacgcgggaatacgaatagcccgtactatggccgtgaccgtctcttggattttacatcagtgggttaatttctcctctctagtgagcgtctgacacaataggtctgtacgggacggcgtaataacggggccaataggagaccctggcacagctgaccctccgtgtcgatattccaatgccgtgcgagggtgtgcgtccgagggccgccaccttgacgggccttgcgacccataagtgtcctcgtccagtgcctcgatggcattttgtcgagacccccgaacggtccattctccaagctgggagtcgtgagtcctgagggggcctcccagcgaagatgaacttggtttcgtcccttcccctcgacggggaaac

SEQ ID NO: 631463 - DNA, 294 bp, Homo sapiens
ttactcagaaaatcttaatgtgatgtgctgcgtcaactcacacagtttaacttttcttctcatagagcagttagtgaaacactctgtatgtaaagtctgcaagtaggatattcagacctctttgaggtcttcgttggaaacgggcataacttcatattcatgctagacggaataattctcagtaacttccttgtgtagtgtgtattcaactcacagagttgacagatcctttacagagagcaggcttgaaacactactttttgtcgaatttgcaatgtggagatttccagccgc

SEQ ID NO: 631464 - DNA, 199 bp, Homo sapiens
ggcttctgatcgccatccttgaacagggcaaaggtggcctcaccagccttcgatgcagctgccatgcgcgccagaatcagcgaaggcatacccttacgtcgttggacgcatgtttagatgcctttgagaccgcccagagaagtccttgtccttcttaataaacacctcctcgccaactgcgacgaccacaatcaccgta

SEQ ID NO: 631465 - DNA, 160 bp, Homo sapiens
gtccttgtgaccgcgaggcggggcgcaccaggaagggagttggacaacgcgggcgccagggattttgccttggttaccttccttcttttatacgtcaagacaaccttcaacaattgctttcagcttttaccctttttgcttgacccaaagacggcctttt

SEQ ID NO: 631466 - DNA, 623 bp, Homo sapiens
acagatgatacttaccctgcaagaatgggtttaaactgtgattaacagctttactaattgtgagattaagcaagattgtgaaaaataaacttagccaaatctcatgtgaggattaaaaaaatcgatgtcccagataagtcaatatgacactaaagattctactcaattttatttaactttttcagttttttatcaaatttcagcacccagcaaataataggcactgttaatatttgcttaatataacgtttctgtgaatttttgcccacatttaggctgacgggaaaattaacgccagaatatcccgaaagtcaaattttgtcatcttacacttaggaagttacgttacaaaattctcaagtctcgtagtatctttcttaagcgccatttgggaatttccatttgcgtcgtgatctgcgccttctgttacttgctatcaattgcattgccttacagatttatttattatcctgcggtattcctttaacttgttcttaaccgctcgagtgttctgtgagattaacttcttgtgaaaattaacttatccaatctcgttgcgagcttaaatggcgcatccatatccgctcttgccattagacttaccatttttttaccttaagtta

SEQ ID NO: 631467 - DNA, 104 bp, Homo sapiens
taccggctgcacagcttctcggacccatctctgctagggacaccaactgatcaggatatttgtttcagatactatagttttcagttccaaaatttttatttctt

SEQ ID NO: 631468 - DNA, 277 bp, Homo sapiens
aaagggataaaaggcctttttggattaaattttcctttaaacttataaaggctttcccaaattttaaggaaacaggatttgggcaaaattttttttttttgaaaatcccgttttaaaaccaaagggatatttttgggctaccttttttttagtcccttggaaaaataatgttccttgaaaaatttttgaaaaatgaaaatttgcggttttttgttttttgaaaatgttaagcatttcccccggcattttagttctaatcactttggcaaaataatca

SEQ ID NO: 631469 - DNA, 202 bp, Homo sapiens
gtagacagtctcacatatcatgcccatggcagttctccataagcatgcatatctggtatccaagcaacatgctgttatatctagtagcaccgtagtcaacacatgacatagtttgacatagaccagcatagtaatatcccactgtacgctcacagaacaagatcctacacttcacatatatgtgcttgtcactaccagccag

SEQ ID NO: 631470 - DNA, 214 bp, Homo sapiens
  misc_feature (81)..(81): n is a, c, g, or t
gcaaagcacagtgtttactaaaggcacaaagtgaggggtcggagggcagctgctcttccggcagagacacaatatccgtcnttggcggtttttgcgctcacaccacctggtggagagctattatttccaaagtggggggtgcccacctgtgggagagcccgggaccaggctgtggggtggtcctcctgccctctgcgtcccccacgggccggcc

SEQ ID NO: 631471 - DNA, 907 bp, Homo sapiens
caccaggctaatttttttgtatttttagtagaggcaggtttcaccttgttggccaggctgttctcaaactcctggcctcaagtgatccatccaccttggcctccccaagtgctgagattacaggtgtgggcgacaagccacccaggtgccaaggcaagagactgagggcacaagctgtcccagtataataaagaaaatatatagaataagaatagttatactagaaatagattatagatatgattgtatatgagtatcattaatcattagtttgtagcatcactctttattccaatattataataatctttgttctataattataacccaggaaaaaccaggccatacagcgataggagctgaaggggcacggtgagaagtgaccagatgagtgtgagccctctgttacgcctggacagggccactagagggctccctggtctagtggtaacaccagcacctgggaaggcatccattacctagcggaccttggtctaggcgtagcatcagtgcctggggaaggcacccgttacttagcagactgggaaagggagtctcccttttcctgggggagttagagaagactctgctccaccacctcttgtggaaggcctgacatcagtcaggcccacctacagccatctggtggcctgtctccctgtgatgctgtgcttcagcggtcacgctcctgtttcacattcatgttatgctctgtacaacctggctctgccttctagatagcagtagcagtattagtgaaaagtattaaagtctttgatctttctggagaagagcattagaagaactaatgatgtcagctgtcctctgtctctccggcttggctacctaaagggaaaggcccctgtctggtggacactttccctcgcgtgatttatcaatcattgga

SEQ ID NO: 631472 - DNA, 262 bp, Homo sapiens
ggttgacgcgactaagtactttaagcacccttactcccttccccagtcttcattctcagaattacaccttctgtagcaggctttttccattgctctaatatggaattatacgtttaggagatgtgtagtcatttgcctttgtgttagaacattcactgaggatcctcataggcccttctagcagtccacctccttccggattacctaatccgtaattgcccttcttacctttttcttgtgttagaaaaaactgaagccacgg

SEQ ID NO: 631473 - DNA, 112 bp, Homo sapiens
accttctttgcaaagagcagttttgaaacactctttttgtagaatctgcaagaggatatttggatagctttgaggatttcttgggaaacgggaatgtcttcagataaactct

SEQ ID NO: 631474 - DNA, 1185 bp, Homo sapiens
  misc_feature (591)..(591): n is a, c, g, or t
agcggggtacgactggtgctcgccgtgcgacgtcgtacgccctctgggaccgcttgtagcgtggtgaaaaacttcgcggttccctcggtcgctgcgtcgcactcagtgctccaggcccgggaagagcagagcaatctgcgccccggggtccttgagggctaggaggatgctaggcggggggccagcgcccaggcgcggaggcgagtcgcgcgagagggtggccgacagcggaggcaaacgttgtgcgcgcgcacatgagcgcgtgctcgtggaaaagcgagcggccggctagcacgaggtgggcctgaggatttagtgcccactcgctagatggttttcgttgcagtgccgtacttgtgttgttacaaactccgcacctgtgtggcggattcatgttgtccgcgtgctttggacattcgccgcctggcggtggccgttcaccggcattcgagggggaaggttcgttggaagacgccgtggggcgaacgagggatgcacaggccctctgccaggccttgtattgttgccgctgtgcgagaaagcacctcgcctggcatttgacaagccctgttggtgttgacgttgttgtgnacgtcgcgcggttccggtgcgccagttggagcacttgggcgcgttatggccagagaattctcccgaatgggttgtcgctgtggcccctctcggcgtggtatatatcaccgttgtaccatccccgacgcgcccaacgcgcatgcacggtgtgccacggtttttttggatggcggggcacggggggcccctttcgcgggcctggccgcccttgattcaccttgtaagcgaagtttccctccaatgcaaagcgttaagcgttaagaggcgtgtgtgtcaccgacacattggccttggatattgtgggtagacccgcttgtcccaatgggctcccacgcggcaaaaaaaattttttctctctattggcagttggacatctattccacagtaaacgcggttctgttacacaatgtttgcacaggcacagtggtttcgccacgaaccggtgtacacttgtcaggggcagagcggttggtggggatacatctggtgaattaattagtgacaatgtcgcgtggtagcattggcattttccaatcggggaagggcaagaccacgtggcgcgagcggtgtcaattaggagtgaaagcacacact

SEQ ID NO: 631475 - DNA, 415 bp, Homo sapiens
ggtctaacttacttctcagaatgtaactctactattaagcaactcatgaccgtattttgcagctctgttattagtgcataaatgtttagggcttacttgtctccataataaacccttttctcattatgttctgaaatgtactttgtgtgatattactataagtaactccagctttgattagtgttggtacggtatctattttttactttttacctgtgtttttaatgtgttttcttataggcaccatatatttgaatcttgcttttttatacaacttgacactcctgtccatttaattggggatttaaaccatctaattttaaacttaggtttttgagtttaatttcccaatacctgagaatttaaaggatttttaattaattcctaatcccatatggtaattagtgaatataca

SEQ ID NO: 631476 - DNA, 318 bp, Homo sapiens
catgataaatcggctcggtacctcgatagggcaactttttgcatttcagtagagacggggccccaccacgctggcaggctggtctcaaagtcccgacctcagatgatccacccaccccggcctcccaaagtgccgggatcacaggtgtaccatgcccggccactcggctaacttttgtattttggtagagacagagtttcaccacgctgcccaggctggttctcaaactcccgacctcaagcgatccgcccgcctctgcctcccaaagtgatggattcacaggcaaaaaggagtttttttttttgggcccttatcgag

SEQ ID NO: 631477 - DNA, 534 bp, Homo sapiens
  misc_feature (405)..(405): n is a, c, g, or t
  misc_feature (441)..(441): n is a, c, g, or t
taaggcttgaaacaataaatttattcccatagttctggaggccaggaagtccaatatcagtttaatcggtatctgtagggccatgctcctgctgggaaagaggctctgggggaaagaatctggttcttggcctcctccagcttctgggtgggctggtcagcattccttggctgggggctccatcactccaatctctgcctctggggtcactggtgctttctcctcttcgggggggtaatatctcccttggcttctgaagttcagagggttctttcaggagtggatcatattctttcgaaagtctctctgacggcatcttcatttccatcacatcatttggggccttagaaggggccatctggaagctcttcccttaattccaggtttctcaggtttctccgtggntcttcatactaagttttcaatatttctggcttccanaaacacattctttcatctttaccagggcttttcaaaatccttttaagttttccggtttcttccataaatttttgggcagcttgtaagtatttg

SEQ ID NO: 631478 - DNA, 113 bp, Homo sapiens
ccacctcagcctccagagtagctgggattacaggtgtaagccactgtacccgagtgagaatggttttagagttttgtttctactagtatttgcttccatttatttttattttt

SEQ ID NO: 631479 - DNA, 220 bp, Homo sapiens
tcccacctcagctcctaatagtgctgggattacaggtgcccacacacgcccggctaatttttttgtattttttagtagagacggggtttcaccttgtttagccgggatggtctcgatctcctgacctcatgatccacccgcctgcgcctcccaaagtgctggtattacaggcacgagccaccgcgcccggcagaaatttctctaggatacagtagggaga

SEQ ID NO: 631480 - DNA, 209 bp, Homo sapiens
ggggggggggggaaaggggggccccccttaaaggggggccctggaaacccggccccggggggggggggctttttggtggggggggttcccccgtttttttaaaaggggcccggggggttttttttttccccgggcccccttgggggggttgggttttttccccccccctgggggtttttttttttttttttttttgggtttttttttta

SEQ ID NO: 631481 - DNA, 610 bp, Homo sapiens
aaccacagtcctggtgaagatgtggatggggacccaggggagtagggctgaacgatgtccctctccccttggtccccaatcacagtcctggtgacagactgtggactgatcatggtgccttgatttccaaatgaatacagctttattgcttaactctattgtacataggatacacgttcagtgctacaaagtgtcaacggggaatttcagcgcttaactgctgcacctagcatataaactgctacatgatacttgggctttatagccttctgatcctttatttctgcactactatatactagatactataccactactatatatatacgcgtataacacataacaccgtactccatccttaacaacaacaaacacaaaacgcgcgacacgacccagctcttagaaagtctactcacccctgccaaagagaggccccctaacggcatcacccgacggcacacgcccgagtgcgtggcctatggccacagcaagatcggagtacccctaaactagatcggcagactagagcaatttacttatagcgcctacgtctgccctcgtgtcgccccgctgtgctttctacacaacgttagagcacaacttggcgcac

SEQ ID NO: 631482 - DNA, 1890 bp, Homo sapiens
tttgtttttgttgtgttgtgattggtgctgtttagtttgttttgtgtgtattggtatgttatgtggtgttgttgttgtggtagtggttggtgtttgtttagttgcgttctttctctggttgatgtgtttgttgtggatgtttgttgttgttgtgtgtttgtggtgtttttggtcttttgtgttgtgtatttcttttgttgtgtttgttgtgtgtgttttgttgtggttatggttggtgttgtgtggtttttgttttttgttgtgtttgttgtttttccacaccctcgtgtaagttttttgatctccgggtttctccacaattgtttagtgatgctgagtttgctccccctctttgttgttggtggttcctacaaagtctaatccactagttccacgtagtatgttttttatggtgggcggacaccgcccggaatttttggtactactgttcttgcttatgagggggatgttcccccacacaaacaaggttgttgtgtggcccacccaacataagaataattcccatacgggcgcgttgttgtgtttgtataatcactacgtctgcgtggcgctcaccatgttgttgactctgatatgttatatcgatcgtcgtgttctccatctatataatgaggggtgttttctcgagctacagtcgccatctatcttgcttgtggttgttcgccatcgagtaaatttatattgcgtggcacaacatacagcaagaagtgggggggggtgctaacttatactgagtggctctcccctctcgtcgtgagtggagaggacataccacccttctctgcggagagtgatattttccattgtcggttggtgctgtccaccacaaataagtatctcccaaccagggtgggttttattttgtgggtatactcctcttttattaggggccacatcatttcttttgtgcatgtactcctgcctccaacataagggggcttggttttgaagacgcacacaacacgagggttggcttatgaatagcctcagcactagccgcctcacacacaactctgtgaggagagcggctctgctcacaagagagcaacacccctcactgtctctttttctgatgagatatacacacgacagtgggatactctctctctgtctgttgtgcgcactactataatctctggtgggtttattctcgcgcgtgagacacacctgagacgcgccccgcgcgttgtacacacacacgtgtacgcacatattggacccacgctgtacacacatctctggtgtggccccgactctcttactgcgcgctcgcgcgtacacgcgtgagaacacacacagcgcgcgtgtttatagatgtaaggagcacacacatttgtcacacatatgttacatcgtctctcactctggagctctgtcacactgtgagaggcgcacactgtgtgtagagtcccctctcacacacacggagagtgtggcagcaacacaccatctgtctgtgtctgtgtgtgtgagagtgtgagagtggcacacacagagagagacccctgctggagaatgttgtggagatataatctctctaagagcccatagagcgcccagagcgttttgtgtcgccagagcacacctgtgtgaaggaaccccctctcacacccaaatggcgcggcgcatctttacacggccattgtgttgtgaaacatgggggctcagaaaaagaagaaaatagtacccaatttgtggagagggcgcgggcactcctagaaagagacactttgttagaaccatgggggggaggatgggactttgtttttttccaaaaatttatctttccaatccctgttaaaaaaaatatatagaaaaaataacatcgagcattaagtcggggcgagaagagtactacatcttttttat

SEQ ID NO: 631483 - DNA, 139 bp, Homo sapiens
cctggtccctgttccggttccggtcccggccccagtaccggttccggttccggtcccggccccagtaccggttccggtgccggccccagtccctgtcctggaaccagtcccagcccccaataaagcccccgccccctca

SEQ ID NO: 631484 - DNA, 219 bp, Homo sapiens
gctgacgtgtcacaactcacgagcgtggaactcgcttggggatcaactacccacaacaccaggccatagtgaagaatcagcaacagtccacagcagcccagatgcaatggcaacaacagtcttacctgccggctctacaccctcagttcttgttggagactcgacgccctcacccatcagttcaggctcaatggaaaccaaagccgtcgtaggcagtga

SEQ ID NO: 631485 - DNA, 103 bp, Homo sapiens
catgtcttccttggcatctcaccaagggcaccagcaatctaaaggctctctcttcattccttccttccttcctttttttcttttttctttctttcttttcttt

SEQ ID NO: 631486 - DNA, 335 bp, Homo sapiens
gaaggggggcccccccccctttggggggaccccgggcttttttcccgggggcctttttaaatcccccgggccaccctttgggggggggaaaccccccccccccccccccttttttggaccggggtttccggggggcccccccctcccttcccccaggggcccctttctgggggggggaattttcggttttggggggttccaaaagggccccccccccccttgtttttctggccggccttcttgggggtggtaaaaaacggttccccttacggcggttccccccacctggggtttttttcgttggaaataaaaaaatttttttcccccccccttta

SEQ ID NO: 631487 - DNA, 663 bp, Homo sapiens
ctctccgccggcagcaactcggcgccgcggtcatggaccggaacctggggccgacggacgggaacccgggccgcgatcgccgcctccccgactcaggctcctcctcctcgctctccgccgcctccgccggactccctgcaggccctgcaccgcctgcgccaggctagcggagctgccccgggaagctgggtgacgggttctgcggctgcctggctggactgctggcctactccggcgcctctcagtgctattgtccctgggcctggccttgagcgggtccactggggaaggccgtgtgcgccggctccgcggaagatgccggcacaagccctacagcagatgctggacagaagttgctgggtatgttttgctactgatgaagatgatagaacagctgaatgggtgaaaccatgcaggtgcacaggatctacaacaatgggttcaccaggcctgttctacaacggctgggtgcgactgcaaaagcagagaggaacacagtaccagccacgagtggccatgtccgtcagtgcaatgctgacatacctaatagatattccaaacatgggtcaagtggttacgtcttggatcttgcagatagactgatctcaacatgcctgtcccatttgctgcagcccggaataatgagtcggatctatctattgg

SEQ ID NO: 631488 - DNA, 269 bp, Homo sapiens
agtattggcgcgatgtagtggccgtggtggtaagtagatagggggagtacactggtctgtagtgctagaggagggtgttgcatagaaccagtggccacagttgtacgtggtggtggtcagcactgtgggggtgtgggtaggtccccggcgatgcagcgagggggtcgccgttgaaacctctggctcgtgggctgtgcgcggcttgtgcctgactccacacctggcaagccgctgcgctgcccgtctccccttgtctcctggccggcacg

SEQ ID NO: 631489 - DNA, 974 bp, Homo sapiens
tggaacccccaacctaaaaatttttccccaaaaaggggccaccccctttggggggggaaaaaagggttccccccccccaaaacaccaacaaaaaagtataaaaggaaaaccccttttttaaacacccctccatcaattcgggccccccccccctctacaatacgacgtgaggcggctgagtaatcattctcctcggcgccccatcaaaacaatcattcaaaactacaggtaggaggaatgtgataaacacaccacaatcgatcatccaaggagaaccatattgtgagtacatctaggagaaaacacactagtttgtatgtacaacaacaaaaaaacaccaccctagataagaaaacaaaaaaaacaatctatattaatagcgaggcacagaagaacaacgaaagtaagtcatcacccaagcccttcttattcctccccagcccaatgtttgtgagaagaggccgcagaggtgggtgtgtctatatcccacagtccgagagtgcgtgtgagcaaattaactcactataaaacaacgcggctagagtaagaaccaaacaatcttaataatatgtgtggtatacctcgcagatagaaaacaccctctgtgttatttatataaatcaaaacaagatatcaaacacttaaatctgtttacccgcgcgatatcataatgtgtgagtgcggggagacacaatgtgtgtatatcatctccgacgcaagctatatctagcgagagagatgccctatgcatgcacagatacacaacacatccttcttaatgtaacccccaagataggacgatcaaataaaaggtattggcgggagaaaccgagcaacgaaaattatcagcaacaacatgagtagtaccaactacacgaccactcttttgtcaaaacaaatagatgaataaaaacttcccggtattacaaacaacaaaaaaaccaagttgcttctttattcaatgactaccccca

SEQ ID NO: 631490 - DNA, 470 bp, Homo sapiens
ctgtagagcaagttacgagagaagtttgaagagtccgatatggatggcatttgagttatcttctacactggagccctccagagaatggtatgaggataatgatggagtggtggggtttgagtgtgtaatgagaatctgttggcagtataggagaatcagcagggccctcatttgggaggcttccatcataatcttggtgagatgatgtgggtcataactaatcagtgaacgtgatgatagaaaacatgaatcaactgaatataattgatataggtgtaatatgtatgcttacctaagaaggaaaagaaagaaagacttggaataaataatgatcctttccctcaagtaattcttattccagctttgtgtagataattaacacatatgctaatgtaaaatgaatttggtgagaacaaatctacacactccaagtgctgtggctcataagagaatcaagtttagattagtca

SEQ ID NO: 631491 - DNA, 768 bp, Homo sapiens
  misc_feature (321)..(322): n is a, c, g, or t
  misc_feature (522)..(522): n is a, c, g, or t
  misc_feature (735)..(735): n is a, c, g, or t
tgggaactggtagagaaagtaaaccggttatacaaagagaatgaagaaaacaaaagtcctatggcgagcggtgcagctgcggatgaggaagacgacagcctgtgtcgcatctgcatggatcccgtcatcgaggtgtgtcctacgtagagtgtgcggcacattggttactctgcaccaaggtgcggtgaagccgcatgaggttgagtgtcccaactctgccgggcaaggtatgttgcgtgccgaggccggtgccacgtgtgtctccaatcgtcccttgaaaaaccgaggggcttccccctcttccacgcaagtgacgatggnntcaccgcgcagaaaaatgttttggagcccgccaaaatatattttcgaagtggcaccaggagaggcggagctgggcacaagctttattgttccagaagctgctagaggcgcttattttaaacaaacatttattttgtgagctaactaaaggtgggcggaccaggaagagaatcgcatccgtgagcttgtgggaaaactatntgcgtccaattgcctgtgaggccttgttctggctctgttggaaccacgtgtgaagctatcccgggcgctacaagcctgggcttatatcgacaatatcccgggtggaacacttcgattgacagtccagccgtgtttgcgcccattgtggcgcaattcagcccacttgcgtgtctttgaggagggaacactttaattccgtggttctcctatatnttccgcctttcaatccttatgttttaagcttag

SEQ ID NO: 631492 - DNA, 428 bp, Homo sapiens
gcggtccgtgagccgtcgatgggcggcgctctggatcagcggcgccaggtgcggttccaactgtttcatttgcgcaggcgtcaggttcttgatgagttgggtgagcaactcatcatgcaggtgttgcatgtcgataaagccgcccatggaggaacccccgcattctggctggttggaaaaccggttattcgaagctgggcaggtagctgtcggcattgtcgtagaccatggtcaacaccaccgtttcgggcggcagttcgggggcaagcctggcgacggccaccatgttggcggcggaggagaggcccaggctgatggcgtcggtgcgcatgatgcgtttcatcatgtcgatgcagtcttggcgcgaaaccttgagcatgccttcaatcacatcgaggttgaggatgctcgggatcagcccaatctaa

SEQ ID NO: 631493 - DNA, 228 bp, Homo sapiens
gtcatccttctttccttcaagaaacctttttacacatctccatttcttatttcacttggattttctatagcaaaggaacccattcatgtgtattggatcaactttttatagtcttttcacacttcagcttttggaaaacttcattccttgatttgtgtttgtcttgggcttccttgtgttcagtacttctgtagaaaagtattaatagcttcatttcatattaacata

SEQ ID NO: 631494 - DNA, 1568 bp, Homo sapiens
caaaaaagggttgtttttaggcaattagtgcttatcactggaggtgctaaaggtggtagaaggttgtggggatggggttgccaccactgtggcttttcaggctacttttaccacagcttgaattctccagaaggaatggaaaaagtctcgaggaaactttggaaaacaccgcgtgcgtgaggctcctttgcagccccagcggctccccgaggcgtggttgactgtggtgtgggggagagttatgtggagtctccacgctgtgaccaccaaaagcctgtgcaacacctgtgctgtgctatagtggagggacgagacaagggagtgactttctatacctcttcctttctccactattctccaaaatttctcccactgtgtgactatccccatttatatatgtgtgggcaggccaccccccgtctgtgtgcaacagtgtgacgcccttgttatgtgtgtgtgtgccttctcctgtggagccttctctgtgcgccacctttatttgtggtgttctctgtgggacaacaatatgtgcgtgtgcccacagagaagggtcttccgtgaattgctgtgtggaccagtgtggtctgtgccccaaactatctcccgcagaaaaacaggcacagaggtgtgttatatcttcttaaatatattctcatcactgtgtgtctctcccaccaacgagaaaaaaccttttattttagcccagcgttatttcgtgtttgtgtctacacatttgtctcgtggctgtgtggcgtggagcgaaaattttcgaaattattttccccaaggtctcgagaaaaacttgtggaggccgttgaaaagccccaggtttctccccacggcggggccttggaaccaaatataagggcgtggcccccgggtcttcgttgacgagccccccattttttctcccaattctctttgagaccccgtgggcgcttctcccgaggggggggttccacctttggaaccggctgtggcttccggggagatatcctacgcttcttgggggatccagaggtctcctatcccctccttttccattttattccaggcactgttcccccctttctcttggaagcttaacttggctcccgcgggacatcttcttggattccacaatctgggcctttgttctcccagtctggacccctctcacatgttttggggtttattgcgcccattagagtttggtcaaaatactctttcccccaaagttgtctttcgccaaaagtttgcaatcttggtctttctcccaaaaaaacaggttgtctgagagtccccctccggaaaagaagggaggggccaccatcgggcgaacgatcttcttccacaggagcgaagtttaacgcttttagaaggacagaccaaactaggagtcccgagggtcacaagaactccaccatcttgaggacgtgttcgcaacagtctttctgccacaagtcaccgccacgtcgatgttttatgtgctcaccacatccgctgtcgatcacccataagagccgtactttacatcacgacactcacgacaatctgacaagcacagattcatcgtgagtactacagcg

SEQ ID NO: 631495 - DNA, 196 bp, Homo sapiens
agtggcaagggcaagggcattgcgggacgggaaaaaatgactgccaacccaggctatgtgagtggttacaagggttttggcccctccgataaaaagaccaagtaaagaggagcttcatttcagcctgctagccccctgaccctgcatgtttaaccccagggagcttggaaaacaataaacatctgtgtgtgcagca

SEQ ID NO: 631496 - DNA, 360 bp, Homo sapiens
aggccaaggcccgggggggggccccaaaaggcctggccccccagggcccagcccccccgttaacccaggcccgtcccttccaaaatggggtttttgccttaaaagcttttttccgaaaaattccccccgtagcccgtggccgcccccacccttcaggcctccgttccttttccccattggttacatagaccctgttggggtcccgatgggtttcccagccccctgttggggttgttttgtccctgtgggtccgtcccctccccggggggtttctgttttcgggggccctttgtttcccttttggggtaaagggatccggggtcccccccgcttatccttattaatcccgtgtttttggga

SEQ ID NO: 631497 - DNA, 222 bp, Homo sapiens
caaggacgaacgggacctcttatactagaccccttaaacatttatatggccacaaataacctcgtcggactccggccttactcattaagaccggccacccaactatctataaacctagccttggccatccccttatgagcgggcccattgattataggctaccgctctaaaattaaaaatgccctaccccactttttaccacaaggcactgattggactctg

SEQ ID NO: 631498 - DNA, 381 bp, Homo sapiens
  misc_feature (23)..(23): n is a, c, g, or t
gccgttgggtttaaaaaaagagnattcctctcccccccccaaaacccctttttgtggtttttttttttgggttttgccccccccccacccccaagggggggggggtgggggggtttttcccttttaacccaggtttttcccaggggcctttttttcctggtggggtttcccccaaaaacctttttgggcaggggggaacccccccctttcttttaggggttttggggttacccccccccgggggggccctttttcccctttttttttttggggggcccccccttttgggggtgccccccccccccggggggttttttgggggggggggggggcccccctttttccccccccgggttttagccccccccccccccttgggga

SEQ ID NO: 631499 - DNA, 135 bp, Homo sapiens
cttcttccggtgcgcggacatgaatacaggaacttttaccacacagtggatatcaagcttacacagtggactgataaacaacttcctaataaagcagtagaggttgcttgggagaccctacaagaagaaaatgat

SEQ ID NO: 631500 - DNA, 438 bp, Homo sapiens
tggagaccaccccgtggagctgttggcccgagactttgagaagaactacaatatgtacatcttccctgtccactggcagtttggccagctggatcagcaccctattgatgggtacctgtcccacactgagctggccccactgcgcgctcccctcatccccatggaacattgcaccacacgtttctttgagacctgtgacctagacaacgacaagtacattgccctggaggaatgggccggctgctttggcatcaaggagcaggacatcaacaaggatctggtgatctaagttcacgcctcctgctgcagtcctgaactctctccctctgatgtgtcccccctcccattacccccttgtttaaaatgtttggatggttggctgttccgcctggggataaggtgctaacatagatttaactgaatacattaacggtgcta

SEQ ID NO: 631501 - DNA, 297 bp, Homo sapiens
  misc_feature (41)..(41): n is a, c, g, or t
  misc_feature (119)..(119): n is a, c, g, or t
  misc_feature (174)..(174): n is a, c, g, or t
tacaagaaatgttaaatgatgtgcttcaagggaagagacanatgaagagcatgtgcaccatccaggattttcctcgttatttgaatccctttggcccatctcccatttgccccaaggantgagtgctggcagtgagctgcacttttttttttctctaaacgggaaatgggttanaagatgagtggcttggccgggtgcggtggctcatgtctctaatcccagcactttgggagctgaggccagaggatcacttgagcccaggaactggggggtcatgctgggaaacatggcaagacc

SEQ ID NO: 631502 - DNA, 137 bp, Homo sapiens
aaggaaaactcactcagtagaccataatgtatcatgaagaaaactgattctctatgacatgaaatgaaaattttaatgcatggttataatatactaagtgtacgctggctgcagtgacattaataacagttgctttt

SEQ ID NO: 631503 - DNA, 357 bp, Homo sapiens
tgtcgcccaggctgcagtgtgatggcgcgatcatagctaactgcagcctcaaactctgggactcaagcgatcttccggcctcagccccagagtagctgggaccacaagtgcgtacccccataccgggccatttaggcccgtttaaatctctgagggcctcactttttcccagctgtaaaatggggtttgtatggtcccggtgtgacaaagggctgtgaggatcaagagtatggaaaacaccgggtagggggtgtagcgacttctacataagggtcggcggtggtttacatgattggtttacaagccgtcggtggcagacacggtgggtttgtataacccaagatccctccttccagg

SEQ ID NO: 631504 - DNA, 303 bp, Homo sapiens
  misc_feature (8)..(8): n is a, c, g, or t
  misc_feature (22)..(22): n is a, c, g, or t
  misc_feature (86)..(86): n is a, c, g, or t
  misc_feature (164)..(164): n is a, c, g, or t
  misc_feature (291)..(291): n is a, c, g, or t
  misc_feature (294)..(294): n is a, c, g, or t
  misc_feature (296)..(296): n is a, c, g, or t
aaatatancataaaattaaagnggacaacccaacaaaagctttattcaagaacggggtgaccataggttgaatttgttgtaaatcnggatatcatcccaacaaaatctcattcatttcgagcaatgtgtcagaatgggaaactggtatgtcccagttgtgaagnaaaatagaatcaatggcattactattagtaaaatgcacacctttttctgaatttactattatatttgttttcaatttcatttttcaaggtactgttttactcatttttattcataaataaagttttntananatttgtg

SEQ ID NO: 631505 - DNA, 294 bp, Homo sapiens
accagtctggttctaccattcccacttcttcacattggctttttgaattacttcccaagttccttgcccctacgtgcttgtcatagagtctggcatgccttaatgaaacactcgttaatttttttatttgagatccattgaatcctcactctgtgccagacatctttcatttatgaaaatagtagcttctatttttgtacccatttttgtgataaattaatgtttagagagatgttaaataatttacaaatcacagtgagtggcaaaacctagtcaatttccattatggtagaa

SEQ ID NO: 631506 - DNA, 290 bp, Homo sapiens
atccaagcagtcggttgcttctatactttactcttattaaaacatcacctccatcacagcaggggccagtttctctatcctttcatctgcaacaactgggctgggtaaaagaataaaaggtggctcgttaccttagaatgatcacagtgacaccagtccaagcagagagcagagactgcttatgtccagtctccagaactagactgtgagctcctagaaggcagatagtttttgttctatttccttctaatatctcattttctattttctgcgactgcttggattacaag

SEQ ID NO: 631507 - DNA, 295 bp, Homo sapiens
ctgggtgatgatgggagagggtgtgtcggggaagaggtgtggcttcaaagtgtgtgtgtgcaggggtgggtgtgtagcgtgggttaagggaacgttgtttcggcgtgttggtgggcatgtgagatgagtgactgcggtgaatgtgtccacagttgagaggttggagcaggatgagggaatcctgtcaccatcaataatcaacttgtgggagcggcaggtcttgccaagggggccacctgggcggacaggcagggagctctccatgggcagggctgcttgtgtgcatgttccctgt

SEQ ID NO: 631508 - DNA, 315 bp, Homo sapiens
  misc_feature (261)..(261): n is a, c, g, or t
  misc_feature (279)..(279): n is a, c, g, or t
gaatccacaaccacacaaagacgaacccgaacatatatctcccactggcacaacagaattttgactgggaaatgagaagattcatttgataagcacacagtctgccatcccacacgcattaagagcggaactgaaagactggaatggcagaactagtactgcagattataacatgcccaagacgggacctgaagctgacaagtatcgcctcacaagagcttactcgaccgcagggaccgccgaaaacacttttaccggttntgaccccgtccacaaacntagtcatgggcaaatacaactcacaaaaacatacgg

SEQ ID NO: 631509 - DNA, 951 bp, Homo sapiens
  misc_feature (80)..(80): n is a, c, g, or t
  misc_feature (87)..(87): n is a, c, g, or t
  misc_feature (102)..(102): n is a, c, g, or t
  misc_feature (106)..(106): n is a, c, g, or t
  misc_feature (127)..(127): n is a, c, g, or t
  misc_feature (151)..(151): n is a, c, g, or t
  misc_feature (154)..(154): n is a, c, g, or t
  misc_feature (160)..(160): n is a, c, g, or t
  misc_feature (163)..(163): n is a, c, g, or t
  misc_feature (171)..(172): n is a, c, g, or t
  misc_feature (175)..(175): n is a, c, g, or t
  misc_feature (179)..(179): n is a, c, g, or t
  misc_feature (213)..(213): n is a, c, g, or t
  misc_feature (215)..(215): n is a, c, g, or t
  misc_feature (218)..(219): n is a, c, g, or t
  misc_feature (222)..(222): n is a, c, g, or t
  misc_feature (225)..(225): n is a, c, g, or t
  misc_feature (236)..(236): n is a, c, g, or t
  misc_feature (244)..(244): n is a, c, g, or t
  misc_feature (279)..(279): n is a, c, g, or t
  misc_feature (286)..(287): n is a, c, g, or t
  misc_feature (293)..(294): n is a, c, g, or t
  misc_feature (296)..(296): n is a, c, g, or t
  misc_feature (300)..(302): n is a, c, g, or t
  misc_feature (305)..(305): n is a, c, g, or t
  misc_feature (311)..(311): n is a, c, g, or t
  misc_feature (315)..(318): n is a, c, g, or t
  misc_feature (320)..(320): n is a, c, g, or t
  misc_feature (323)..(324): n is a, c, g, or t
  misc_feature (326)..(328): n is a, c, g, or t
  misc_feature (330)..(330): n is a, c, g, or t
  misc_feature (333)..(333): n is a, c, g, or t
  misc_feature (335)..(335): n is a, c, g, or t
  misc_feature (338)..(338): n is a, c, g, or t
  misc_feature (343)..(343): n is a, c, g, or t
  misc_feature (345)..(348): n is a, c, g, or t
  misc_feature (353)..(353): n is a, c, g, or t
  misc_feature (361)..(362): n is a, c, g, or t
  misc_feature (370)..(370): n is a, c, g, or t
  misc_feature (372)..(372): n is a, c, g, or t
  misc_feature (378)..(378): n is a, c, g, or t
  misc_feature (385)..(386): n is a, c, g, or t
  misc_feature (392)..(392): n is a, c, g, or t
  misc_feature (394)..(399): n is a, c, g, or t
  misc_feature (401)..(402): n is a, c, g, or t
  misc_feature (404)..(405): n is a, c, g, or t
  misc_feature (413)..(413): n is a, c, g, or t
  misc_feature (424)..(424): n is a, c, g, or t
  misc_feature (426)..(427): n is a, c, g, or t
  misc_feature (433)..(433): n is a, c, g, or t
  misc_feature (438)..(439): n is a, c, g, or t
  misc_feature (441)..(441): n is a, c, g, or t
  misc_feature (444)..(448): n is a, c, g, or t
  misc_feature (451)..(451): n is a, c, g, or t
  misc_feature (456)..(457): n is a, c, g, or t
  misc_feature (461)..(462): n is a, c, g, or t
  misc_feature (465)..(466): n is a, c, g, or t
  misc_feature (473)..(473): n is a, c, g, or t
  misc_feature (482)..(482): n is a, c, g, or t
  misc_feature (487)..(487): n is a, c, g, or t
  misc_feature (496)..(496): n is a, c, g, or t
  misc_feature (500)..(500): n is a, c, g, or t
  misc_feature (503)..(503): n is a, c, g, or t
  misc_feature (505)..(507): n is a, c, g, or t
  misc_feature (714)..(714): n is a, c, g, or t
  misc_feature (846)..(846): n is a, c, g, or t
  misc_feature (949)..(949): n is a, c, g, or t
gcggtaaccagcgtgaggcgcccgccagaagaatatgaaaaagcagagcgagctcggttaagggaaagcgccgagatgangggcttnctgctgccgcccgcnagcngagggactcggagatcatgcngcagaagcagaaaaaggcaaacgngangaaggnggnacccaagnngcnttgnggcttcgtgtccaaccctcttgcccttcgcctgngngcnnggngcnagggccaccangcgcgcgnttcctcctgtggtgctcacaggtcccagcaccganggcattnnctttgnncngagnnngcngcgggncccnnnngngcnncnnncnccncnggnagccncnnnnccccngggccacnnccgggggngngggggntaccccnncccagngnnnnnnanncnngtggggcncaccccaaagnannaaaagnagcgnngngannnnntgngcgcnngggnngannggggacntgggggganggggntggaagaangacngcncnnnccgcaccaaaaaagggagaactctttagattcagattgtgggtatgtagacttaataagtgaaacatcacagaagaagcctttattatacaatgacaaccaaacaagtactccggatatgcagtagaggaatcctctaagaaccatagagacttcttttctgtgatttttgttccccacccttgaacaccatctctaggatggagtnggcctaagagtgaatgctgcaagatctgtgtttatgcctcttttcctcattcttcctcagtttgttcgtctgcttgaaagttggccaaaaaatcctgctgctcaccgacttcccgtggtcagctgctgtcancgttcactttctcttctgtcattcctcatggaatgagggtggttttgtcttccgcttcccttgactcaaaatcaggattaaaactggggtagctctgtgctcntt

SEQ ID NO: 631510 - DNA, 716 bp, Homo sapiens
  misc_feature (328)..(328): n is a, c, g, or t
  misc_feature (353)..(353): n is a, c, g, or t
cgtggaaagcacacccctggtcaagggcagacaggtctggagagaaccaagggctatatctgttcctggttctacatttttttgaatggggcatgcttatttaagatggcgaggaaggtacttttaaagaataatcaggcatcctctactgacaggatgaggtcaatatcctttcaggatacccgggccaggttgattagaaaggcctgctcgctgaagtgttttagagagagtttgacagtgattaggggtggtcgtttgatcgcagacccattacggaggcaggcaatgaggcagtgatcactgagatcttggttgaaggcagcanaggtgtatttggaggtcaagttggntaggatgttatctatgagagtgcccgtgtttacggatttggggttgtgcctggtgggttcattgatagtttgtgtgagattgaggccatctatcttagattgtaggatggccggggtggtaagcatgtcccagtttaggtcacctagcagcacgagctctggcccccatctatcttcaatcaattcacatatggtgtccagggcacacctgggggcagagggtggtctatagcaagcggcaacggtgagagacttgtttctggaaaggtggacttttaaaagtagaagcacaaagtgattgggtacagcctgtagagttcggtcttactatctagaaagtgtgctcagggtgtgcttcacaaa

SEQ ID NO: 631511 - DNA, 1300 bp, Homo sapiens
gcaagatggcgggaggggtgcgcccgctgaggggcctccgcgccttgtgtcgcgtgctgctcttcctctcgcagttctgcattctgtcgggcggtgaaagtactgaaatcccaccttatgtgatgaagtgtccgagcaatggtttgtgtagcaggcttcctgcagactgtatagactgcacaacaaatttctcctgtacctatgggaagcctgtcacttttgactgtgcagtgaaaccatctgttacctgtgttgatcaagacttcaaatcccaaaagaacttcatcattaacatgacttgcagattttgctggcagcttcctgaaacagattacgagtgtaccaactccaccagctgcatgacggtgtcctgtcctcggcagcgctaccctgccaactgcacggtgcgggaccacgtccactgcttgggtaaccgtacttttcccaaaatgctatattgcaattggactggaggctataagtggtctacggctctggctctaagcatcaccctcggtgggtttggagcagaccgtttctacctgggccagtggcgggaaggcctcggcaagctcttcagcttcggtggcctgggaatatggacgctgatagacgtcctgctcattggagttggctatgttggaccagcagatggctctttgtacatttagctgtggtgtgtgcttcagaaaggagcagggcttagaaaaagcccttttgtccgtagagttgatgtggtgtgagtgatatatttctatgtttttaatgtacagcatctgtactttgtttgccttgataaaggtaagataaatgaaacgctgaactatgctaatctggaatttgtttttatttgcctgaaatatatttttttctgtgaaaaaattaaaacgtacttaagccaggagaatgaattatacagtgattgaaaatccatttaattcctatgacttttgttttgtattgcccaagtcaaactacatcacttgtatctccagcccaaatgtagtctgccttgaaaagtctttcagctgtgactgcaggaagtgggagtgtttttattgttagctaattgctgtgactgcaggaagtgggagtgtttctgttgttggctaattgaagatgtagtctgccttgaaaagtctttcagctgtgactgcaggaagtgggagtgtttttattgttagctaattgctgtgactgcaggaagtgggagtgtttctgttgttggctaattgaagttattaggctcagcttcagtcatgtgtaagttttgcagtgtaatacatatgtagtctggtct

SEQ ID NO: 631512 - DNA, 350 bp, Homo sapiens
cccagtcatttcctcatgaagatgccctttgtctgtctgtgtgaggctggtttgtccagtgctgagtttagttggcagtgtagaactttggtatggatgacagacaaatgactcaaaaccagttgtctgggctgtagtctgtggcacagaaagaaactagaggaaggtgagtttctgaccccagctctcctagtgagaactgctacctggctttcagggaaggaaggttgagatcggaggcaaccggggcgtggtggctcatgcctgtagtcccagcactttgggaggccgaggtgggggattgcttgagcccaggagttcaagatcagcctgggcaatgtagcaagatc

SEQ ID NO: 631513 - DNA, 493 bp, Homo sapiens
ttcgggagccttaccctggggtaccagtgtggcggcaaccccgtgaaccaagacaggttacagaacatagaacaacgtgacaagcgtgactctggtatcccagagtcaacacaacaggtgacctctcacaaccaagtgtcctgccttaaacaattgcccaaatacaattaacagaaagtcgaaagcaaacataagactccaaacaagacatacatgttaggactgaaaatgaaaccaaagtggagcaataaaatggagtcagaggagaaagaaccaggtgaaggggtggcaagaatgtgcttcaaggcacctaaaccgtggggaactgaccgcttagccaaaggcttttatttcctagcttacctgatattactgggggagggtgcaaaggggactctcacccatccacagaagacaaaatggcaccagccagtcttccacgtgggacccgggtgcaggtctctctaggttccccagcttgggggtgctcagc

SEQ ID NO: 631514 - DNA, 100 bp, Homo sapiens
agtcggcggacattgttcacgtacacacagaatgcttacacacaaactcaacatggtgatactacactttatgtgaagtcacattttgcaacaattgcat

SEQ ID NO: 631515 - DNA, 228 bp, Homo sapiens
  misc_feature (181)..(181): n is a, c, g, or t
tcacttgctaccgcactccagcctgggcacagagcaagactcttgtctcaaaaaaaaaaaaaagaaaaagaaaaagaaaaggtctcagagccttagcatttaaatgatgggatgggaggataaggggccgagccaaacaacagactataagaaaaagtgggtcagcaggtattgaaagcangaaagtccaagaaaggaactacagattctatttaaggagcaaaaggg

SEQ ID NO: 631516 - DNA, 437 bp, Homo sapiens
  misc_feature (12)..(12): n is a, c, g, or t
  misc_feature (27)..(27): n is a, c, g, or t
  misc_feature (70)..(70): n is a, c, g, or t
  misc_feature (89)..(89): n is a, c, g, or t
  misc_feature (143)..(143): n is a, c, g, or t
  misc_feature (146)..(146): n is a, c, g, or t
  misc_feature (158)..(158): n is a, c, g, or t
  misc_feature (213)..(213): n is a, c, g, or t
  misc_feature (217)..(217): n is a, c, g, or t
  misc_feature (225)..(225): n is a, c, g, or t
  misc_feature (240)..(240): n is a, c, g, or t
  misc_feature (250)..(250): n is a, c, g, or t
  misc_feature (262)..(262): n is a, c, g, or t
  misc_feature (277)..(277): n is a, c, g, or t
  misc_feature (288)..(288): n is a, c, g, or t
  misc_feature (291)..(291): n is a, c, g, or t
  misc_feature (298)..(298): n is a, c, g, or t
  misc_feature (304)..(304): n is a, c, g, or t
  misc_feature (306)..(306): n is a, c, g, or t
  misc_feature (309)..(309): n is a, c, g, or t
  misc_feature (317)..(317): n is a, c, g, or t
  misc_feature (326)..(326): n is a, c, g, or t
  misc_feature (331)..(331): n is a, c, g, or t
  misc_feature (339)..(339): n is a, c, g, or t
  misc_feature (348)..(348): n is a, c, g, or t
  misc_feature (367)..(367): n is a, c, g, or t
  misc_feature (375)..(375): n is a, c, g, or t
  misc_feature (433)..(433): n is a, c, g, or t
tgatcattcaanatggctttattttcncatcggccggctgcatcccacaccagcctgagccccagacggncagtcagtgcatccatccngacgacctgtccaggaaggaaggaaggaagccccccccaaaatgctggccccgnggnacccagacaggngcctgccggctagcatgcaagccccccccaaattctctcatggggacaagggggnagcngcctgggncccagagtctcagcncaagtgcccngaggccagtggngatgggcccctgggnaagtctctggnggnggggggnaacccncnggnagacgggngaagagggnccccngccaaccnggaggaaanagggggggttgtccccccncccccccnggctgcaggttctggagggcagaggtgctggccgaagaactggtggccaaagtgagancccc

SEQ ID NO: 631517 - DNA, 318 bp, Homo sapiens
cacgaggcctcgtgccgcatcttcacgaggttcatggccgccatcacccggcccttggcgaaggcatcggccagcgggccgacccagggcgccagcagcacataggccgccatgaagccgaacttgagcagcggcgcccaccacggcgcacaaccttgctgcacgagcagcgcgatggcgacgatcagcatcgcgttgtcagccagggccgacgcgaactgcgcgccgatgacgaggccaaagccccgcggcaggcggaccgcggcaggcggggcatcaggggcttgggcgacggtggtcacatgggagtcactgtca

SEQ ID NO: 631518 - DNA, 131 bp, Homo sapiens
  misc_feature (79)..(79): n is a, c, g, or t
tacaattcacgctcggtacctgacttactgcctggtacttcccgcaccttgggactgccaacgggtgggaacgactcgncttgacgacttacgactgtaacgggctgacgtgacacctactgtacttgtgc

SEQ ID NO: 631519 - DNA, 151 bp, Homo sapiens
ctttgagtataaaacttagtactcatatacataaactaatacgaacttaacaataccatcatacatttacttcatatttttagcttgaccttctagtaaatctttagcttcattgatttttggcttctctataaggagatcctcctattgt

SEQ ID NO: 631520 - DNA, 197 bp, Homo sapiens
aggtggcccagtcgggtctggaactccggaactcaaacaatctacctacctcggcctcgtgaaagtccggggattacgggcgtgagccaccacgcccagcgggaatgaaacattttgtacagtaacgatagttataaaactagacttctcacggcatataagcaaacccttcggtcccagccttagttcatatcacg

SEQ ID NO: 631521 - DNA, 166 bp, Homo sapiens
tagcaggatcctagggtcttagggagcacaatgttctatggccatcatgacattgggtagcattaactgtaagtaatgtgcttccaaatcacttattggtttgaccgaatatcttgatactcttataagactgccttcaacttttgatccctttattctattctat

SEQ ID NO: 631522 - DNA, 120 bp, Homo sapiens
cacgagaagatttccagctgttgagacagtatttttgagggctgatgttacctctagcggcgaaaccagagccagctgttaagcacccagaggtaacatcagccctcaaaaatactgtct

SEQ ID NO: 631523 - DNA, 197 bp, Homo sapiens
ttctacagatgtgaatacattaggaatcttgagctacagagattatcctggattatctgcaatgggccacacgtgtattcacaaggcatacttaaatgtggacagcaggcacagcatcagcaagcagtcagcacatccagcaaaacgcagtcttgcatgcatggaagcagcaggtttggcagtgactcagggccatt

SEQ ID NO: 631524 - DNA, 744 bp, Homo sapiens
ctttttttcttgtgttgagtatagatatacaagaagagagaccagctacacactactctcttgctgtgcgggcggcacagtcttttttgtgtgctgtgtggtggtgtataaagagagaaaaaaaaaaggagagggatgggaggtggcgctcggtgcgccacacacagcacagctcagcctgctcttggttttatatgagaagacgacacgcgacacaactttaccctctccccgccccgcgcctcttctatctgcgaggggagagagtttttcgtgtgtgagagagagagcgaggcgcgcctccctcttgcctagaagagatattctctctctcgcgctgcttgttgtttgttgtgtactgctgctgtgtgtggagtgagaggagcgcgcgcgcccgcgctcattgtttcgttgctggtgagtgtctctcccccgctgcgcgggcgcgccgcccacgcgctgcgttttcgtaatgatatatatgtatgggtgcgggtggagcagaacgacacctctctctcttctctctagtagagagactccaccacttcttgtttcggctacagaagaataatatatggagggccccccccccgtcgatcagagcaggggcaccacctccgcgcggcggcgggctcccccccgaccggcttcatcacccccccctctgcgttttttttttttttccccccccccccccccgctttttttttcccgcgggggtgtggtgttccccccctttta

SEQ ID NO: 631525 - DNA, 109 bp, Homo sapiens
gacctacgtgacttctggacatacctagcaccttcttgcataccttgaccttcttgcataccttgaccttctggcatacctgaccttctgacatagctagaccttctga

SEQ ID NO: 631526 - DNA, 404 bp, Homo sapiens
tgtctagaggctcgcgttatgacgcgtctctggtcagcctcccagtagcgggattacaggcatgtgccaccggaactggttaatattgtatttcagtagagatggagttacaccatgtgggccaggctggtctcaaactcctgacctcaggtgatccacccaccccggcatgtcaagagactggggttacaggcatgagccgctgtgcccgggcaggaactattggtccagcaggtcaaagtcactttgaatcagagctctgtatacacacaagctgggtgagtcatgcaagtcactggtaaagaggaaggacagatggcccccagaccaaaagctcagggatgtcagagaacgcatctccagagccaacccccaggcctggggttccccctccctggtccatg

SEQ ID NO: 631527 - DNA, 431 bp, Homo sapiens
  misc_feature (376)..(376): n is a, c, g, or t
ccttcttctttcccctatcccccaggggtgatccccaaacttgactgtcccactcccaggcctgggggtggcagaaggaggctcctgggtctcctgctctgccttcttctttccattcatatgcaagaagcatgcattgagcacttactggatccacagcccaaggctcagggctatgggaatctgattaggcctctgccctccacttttacagtctgcaggagggaggaggctgatggcctgaaatttcaggccttggaagtggagaggaggaaggggagagcccaggggattcaggagcggggtagactcatccggctcggggagtgtggtggggccagcagggtgggattggaggatgaggccagatcccagnaggattgggatcccgtctgccctgcccctccccagcccaggctgtgaagcaggga

SEQ ID NO: 631528 - DNA, 163 bp, Homo sapiens
  misc_feature (91)..(91): n is a, c, g, or t
  misc_feature (109)..(109): n is a, c, g, or t
gcctgggaacttccacatgcttcaggcgcagacaaaacaaaaacaaaaacaaaaaccaatagttaaaaactaacatgagtgaagtgttttnctgtatgtcaggcaattnctgatattttaatgcaaaattcaaatgttcttacaaaaacccaatgagacagat

SEQ ID NO: 631529 - DNA, 199 bp, Homo sapiens
cggtcgctctcgcgactaccccgatccccacattgcgccagttgccgtccttctgccgggcactttcccggtcattcactttccaacagcttccatcttcatcccaagctcactttgtctttttccacaccgtcatcccttctgccctcacgcgcagtcgttttttttttttttttttttgtttgttttttttttttgt

SEQ ID NO: 631530 - DNA, 504 bp, Homo sapiens
  misc_feature (453)..(453): n is a, c, g, or t
  misc_feature (473)..(473): n is a, c, g, or t
  misc_feature (496)..(496): n is a, c, g, or t
ttcctgctactatgacaaattccacactaaacatcatgggaaaaatacattccagcttcatccacattagcaatgaatttcaattcataaccttacacagttgtctttagaagtactagcattcccttcccacgttcttatctatagctacagcctccaacccatttcctgagacatatggttctgtatttcttggaaggttcgcagcaattcattactacattcaaaatcccctgagtccagctacaatgcagggtaattactccaacgtggagaagagtcaaactgcatgtgaacgtgcttctccaataattataacccatatcttcaaaagagtgacaagcatttttgcttagcttttagaatcataaggtggaagctcagttaagtactttgcataatgctattttggacagtaatcattgggagtacataggcttattcagtattggnccattggtaagcatttaaanatatttggacacgcacacacacncacacaca

SEQ ID NO: 631531 - DNA, 295 bp, Homo sapiens
cagggtgctgacagagaggatgggactgggccatacctttcacttttctttaatttggtgacatgtaatggttcaattaaaatttttttttttggagggtggagaggaatactcgggctgaaggcaggtgctgtatctgcaataccagtttcccaagtcctaagttagatgcaaaggacaagttctggctgtatttagcactgcacagaactggttgggatattagagcaccctgctcatgactacctcacacatacacacaccctatgtcctttcccaatctccctgtcagggg

SEQ ID NO: 631532 - DNA, 382 bp, Homo sapiens
caggcgcgtaccttctttagtagagactgggtttcaccatgttggccaggatggtctctatctcctgaccttgtgatctgcctgcctcagcttcccaaagtgctgagatgacaggtgtgagccatcagacccagcatttttttttttaatttaaatttaaatttttttcatttttttgagaggttttttttgttttgttttgttgttgttgttgttgttgttgttgttgtttttgagacagtcttggctctgtcacccaggctgggagtgcagtggcatgatctctgcaacctctacctcccaggttcaagcaattcttgtgcctcagcctcccaagtaaactggggacttacaggtgcacgctaccacaactgggtggatt

SEQ ID NO: 631533 - DNA, 302 bp, Homo sapiens
  misc_feature (35)..(35): n is a, c, g, or t
tgcgtagtacagactcaccaagcacagacttgctntccacaatgcacgcttaccttagccacgaaggtcccaagccacacgtactaagggtggacctcaaagatatgtacaggggtataaaacaaataccagggggaacagttaccttcaatacaaggtcaaaatcagcaacaagtcctacaacccagtgctgatatcagatacaagcttcaaggacaattcctttccgaaggctaatcccagttccgtgaggctagcatgaggtgtgtgctttgcgcggggcgaatttcctatcctcaata

SEQ ID NO: 631534 - DNA, 269 bp, Homo sapiens
gatatcccttttaagaaaatgtcaaagaaattttggacagactattattcatcatcatatcccttttaactgggattgtgaattatccagactgcatgttgggcataactggaagaagcatcttaactacacagaatacacgcagtttctccaggagctgcaattggaacatgcaagacaagcctttgcactcacttatcaccagcacaagtggcatgattactggtctggctttcagcgacctcatggttaccctaagatctcacatg

SEQ ID NO: 631535 - DNA, 994 bp, Homo sapiens
atgaagtaaggttccgaatggcttgaaatcaactcagttctcagtccaacaggaggagaaaactttacctttcagatatataaggctgacatgacatgtagaggcttctcgagaatatcatgaagggcttcagacctgtttgatgtggtttattgataactgctaggctttattgacgtggagtgaatgaaagatggcactacgttttctagtatttgagaaggtataatgaaggatggagctacgtctcttagcgaccgtaggctacatgaccagtcgtatacattactatgtgtagcccagacaaaacccggccagcgtgtaagtcagatgctgatttcgactccatttccgaaggtcaaggccatggtgcgtcagacttctggaacacagttcatagatacggacactgaagtttcctacagttgcttgatattacagcggaagatccagtccaaaagctatgtgaaagttacgagacttggtgcttgtgaagcttgtcaagattgccctgttatttccgcgggaaggaaattactgcgaggatacaaggacgatatggcgagtagaggcacaacagaagttcaacatagataagctagacgctagaagggtttatgaaattcttcgactactggtaactgacatgagtgatgccgaacaatacagaagctacagactggatatgagtaggaagactaattagccatataagaaaaagcagagagatctgctacgatgagaccactgtctcgaccgaagaagtgtaacagatgagccaatggaattaagctggactgaacacggggaacacagttccagactactggacattcggggttatgacgcctgggccggaaacactcggcggtcgcagcggcaccttgcaggggcgggacaggagctaacaggcgcgcccaagtcatccgatgggggtactcacacgtagcattcaccgacacggtcagcttggaaaaaggagcccaccataaag

SEQ ID NO: 631536 - DNA, 430 bp, Homo sapiens
cagccaagtggctggatggtattccaaaatggtattccaatgccgcaggattcaataaactggggttaatgcgagatgatcccatatccggggatgaagttgtaaaagaacccctaaaaagccttcctgagaccctttataatgccaggatgtttccccttaaaagggccctggccctgaacttgaagcctcagattttgcctaaaaagcagggggcccaatttgaaaaggaaaatttttcccctgacccgtttttgaaaggggtttttcgggaaaaaaaaaaaaaaaaagaatgggcaaaaaagtaatcctgtagtttaagtctgtggaaccccctgttatgaaaagggttaaacttgaacccacccattttaaaaattttttggtttgaaaatgttttcctttaaataaatgtttattgtaagggcca

SEQ ID NO: 631537 - DNA, 328 bp, Homo sapiens
atagatgtgaacaaaactaatgagaccagaaatataccctatgaccacacacttgtttgactcacacagatattcaaattgatcttagtcaaagatcaatcgattgatgatcaaggagcacaggcaattctaatggagaaaggacagtcttttcaccatatactgctggaactactgtacatccatatgcaaaaagtgaatcaagacatatctaacacctttcacagaaaccatcaaatggatcatagaccttaatgtaaaacacagagctataaaatgacagacagcaggaaaaaacctgtgtgaagttgggtactacgctttggca

SEQ ID NO: 631538 - DNA, 83 bp, Homo sapiens
ggatttgctggtgcagtacaactaggcttaatagggacatgaaaataggtcaaatcatcaagaaaagaaatgctaaaggtaaa

SEQ ID NO: 631539 - DNA, 1187 bp, Homo sapiens
atgagaccaattataaccaatgacataatctagcaaggtactaacctccatataccttctgcatcatgaatccaatctattaaataatctttgctagagggtagtaggccaatagactaaatgaagccctcggaaacccatggagcgagtctatgctaagcaacagggcgttaaacacgcagacggcaacccgtttagtgtatccagaatagtgggaagatttatagagtagaggtgacccaacctatcgagtccctggtatgactacggcttggcttgctccaacgtaataggagattctcacgttctctaacttctttacacttcgacctcattagtaaccctcatcttagaagtcgccccgttggataggatgtgtaatcctgatccagatcccacaaggcatggcaaccaagcctcctctatgggcaactaactacgcgacaaactaaaccttagtttgaaggaatgaagtcctaaataaagtccttgatatccatcacccagttaagtaaagggcccttaaaacgatatgccacccactatccctataaatttataatggaaacatgacttgtgttcctaaatttcattcacatcaaccctcaacttacccttgcaatctacacattcaccaacatcaataagttaaacacttgtatacctatcgcttccaacagaggcaacgaaactttgtgtaaccctaaatttcttcagtcaacccccgtaattagggaaagggaaaactcacagtgggatttagatcattacagcttaacatttgcaaataaccatccctcccctcctgccatttaagcacgtgccgtgtcccgccactgtcataaacccaggtggattactgggccaacatatagtcgagggccccacaattatttccgtaaacgaaattctacaggcaaacaaaagttccatttgatcttacctcctatagcttgttacacaatccaataaggaccaagggccattcggctgccacttcccttgggaaccacggtttacctatcagtgacgttaaaacaagagtaactttcgtgggctacaatctttaccccccgaccttgtaagtaccccacaataagtcttcacaccatccttatgacattctgacccaggtggattcacggaagtggcaacccgtagccttggcacaccaaggctggaccaca

SEQ ID NO: 631540 - DNA, 922 bp, Homo sapiens
aaaaaaaggaaaagaaaaaaagaaaaaaaaaaaatattaatccccaagccccacacctaatgccctccagaaaagtccagctatggtgtccctggaagaacgttccatagattttatagggaatataaaacccaatatggtacgcactcattacccttcttctatattaaacacttaaacctgtggtgtgtttagcattaaaaatgtgagaaagaagaacccattcccattcaattgtgaagtgtgtgtgggaaattattacaaaagaacattctccagaagccattagccctttgtgggttaactttctctaggttaatctcgtggacaatcctccctcccaaatactgtggctctcccagtgtttgtgaaacatgtgtgcttttttctccccctctcgaggacacccccgtggggttaagacagtggggctatcacatttatacaggggtgaacctctcctgtgaaacatgtggtgtggggggatctccatagcctgtggggcctcccacttttctcaatttctctgtgtggcccattcatatataaacacacctatacgatacaaggggctgtgagtgagaaggagtggccgcaatctccagtgagtgtgtgggggtctcaactctctgtgaggtctccgtataaaaaaccccttttcttctccaaacacagcaggaagagcactatctgtgacgcttatgggggacgtgtagctctctgtgggtgacaccccttttgtgtggaaagcccgaggtctctctccaaaggggggatataaaagggccgaagacctattttgtggcaagaggtttctcataaaaactctccttaagccctttaagaaaaggccccctagtgtctgtgggtgtttgtcccaagagaagcctttaaaggaggcccaccaaatatttgaacccga

SEQ ID NO: 631541 - DNA, 415 bp, Homo sapiens
gagacagggtcttttttctgtcccccaggctggaatgcagtggcgccatcttggctcactgcagcctctgcctcccgggctcaaatgatcctcccacctcagcccctcaagtggctgggactacaggagtgagccaccacacccagctaattttcgttttgttttgttttgttttgtgtttttgagacggagtctcactgtgttgccaggctggagtgcagtggcacaatctcggctcactgcaacctccgcctctcgggttcatgcaattctcctgcctcagcctccagagtagctaggactacaggtgtgagccatgacacccagctaatttttgttttttttgtttgtttgtttttttttttgtagagaagagattttaccatattgccctgggtggtctggtaaaatctct

SEQ ID NO: 631542 - DNA, 251 bp, Homo sapiens
gaatcgagctcggtacctccgtgatgcgcgccgagctggcggtgcgtacggctggcttgcgcgcggtgagtgcctcgatcaggcgatcgatgtcaccaccgggttcgagccggcccagctgtggcgagcgtgcgctgccggggctggccggcgtcgttgcggtacgactccaccaactgcgcatagcggtgcccgccggagctcgtgaccttgatgaacatggccgcgagtgtagccgggatgctgtgaca

SEQ ID NO: 631543 - DNA, 115 bp, Homo sapiens
cccccctggggggccccccccccgggggttccttttttgggttccccccccctccgggccccccttttttgtttggggggattttttttttaacaaaattaaaaatggaccccca

SEQ ID NO: 631544 - DNA, 162 bp, Homo sapiens
ttagagacaggctctccatgtatggtcaggctagtctcgaactcctgacctcaggtgatccgcccgacctcggcctccaaagtgctgggattacgggcatgagccatcgcgcccggcaatatgctgttaactgtatatatatctgttgaaagaggagggtgg

SEQ ID NO: 631545 - DNA, 127 bp, Homo sapiens
gctggatgttactcacatcaatctcatttaaaaattgtcagcattggcacatcgtattctggggctcttcagacgctggagcaatgcactgccgcatcctgttcattttctcctgcatgttctgaat

SEQ ID NO: 631546 - DNA, 108 bp, Homo sapiens
tggcagggtgaagcacgcaagatcatgccactgcaccgtcatcttacgcagattggagcaaaagattctccttgtcagcttgatggaataaacagatatgttgcgaaa

SEQ ID NO: 631547 - DNA, 787 bp, Homo sapiens
tgtaactcaacaccatggggaaggtgaaggtcggagtcaacggacttatggtcgatattgggcgcctggtcgagccagtgtctgcttttaactctggtaaagtggatatgttgccatcaatgacccctatcattgacctcaactacatggttatacatgtatccaatatgattccacccatggcaaattccatggacaccgtcaaggctgagaacgggaagcttgtcatcaaaggaaatacacatcaccatacttccaggagcgagatccctccaaaatcaagtggggcgatgcatggcgctgagtacgtcgctggaagatccacagggcgacttcaaccaccactggagaaggctggcggctcaataagcacgggccaggagccaaaaagggacaatcactcatacatgacccccatctgactagaatgcccccattgtacgacatggcgtgtagacaccagtgagaagtatagacaaacagccatacaagatcacacagcaaatgcctcctgacaccacacaacatgacgatagacaccccgtggccaacggtacatcccatgaacaaacaatagtgaaattcgaaagaacgcgagctcaatgaccaacagcaccatgccacaacacatagcacccaggaaggacctagtggataggacccctccgaggaaaacagaggacagatgcaccagcggggctcacccagaacatcatcatgacacactacgcaagacgcccaaggcctacgagacaaagccaaccacaaaagaaaccagagaacacac

SEQ ID NO: 631548 - DNA, 1091 bp, Homo sapiens
tgtggctgcatgaatagatgtgagtgcatggatgtacgtcgtgcgtcagtagctagtgtagtgcgctgtatcaaactcataaggatcatcgtacatgttgatgtgtatgaaccgtacagccgcggcatatggcgagtcggatggtgataaacgcacgggtatagtgattcatgtgattggtgtgtgcgcttagtgtatgtgtgcgggtaagacgttgattgttgtatggaggtgtggatcgtttctatgtcccagattgtgtattagtcatgattataacatgagtgctggagaatcgaagtttgcatagcatggcgggtgagtgcgtggttgtctacagtggcgacgtctaatggtgtttcgatgacggaatattgaatgattgtctgatggattctcctcgtatcatcaatgaagattgagtactgaatatggaagtgtctacgtatatgggatagagtagaggttgactgtaaggaggaggtctcattagtcgggatgagctcgtaatcatgatcgtgattagcatcagtccagtttgcttgatctactatttatgtacaatgttgtgggcgtgagttaatagcgatgtgcgtttacatacgaatgtagagtgctatattgttgattgtctccgttcaaggcatattcgacatctcagtgtagttcaagaatggatgtggtggtcaacagtgttgcttgttcattagcttaggtagggaagtagatcccgtatttccgtgattctagatatggtcaggttgagatcggcatgtacgtccgcatggctctgttagccccctgggtgggtcgattctagggcctgtgttccacaacctcttctctttaggcccaactgctggacaaggaatttcagtgcctcctacgggggcagcacacttagattttcctggacattcagatagctcacatgtgctgaccacacttcaggctctggactggagctctctggcatgggggtagggcctcagatgctgggggccagtctgccccatcttcattcctgcacctttaacctgtgcaattctatttatactggcttaatgaacagcccagctgtcccttgggag

SEQ ID NO: 631549 - DNA, 546 bp, Homo sapiens
gaacaactttagaatgaaggaaatatgcaaaagaaggatcagataaaggatcaatgtgaattacgcatcgtattaattgactatatgtgggtaattatgactatttcccaagcattctagatcgacctgcgagagaacagcactgataacgaacctgacacgtggctgacagcagaggaaacaagaggcccaccgaacaactccagagaagaaaaccacaccgaagcacacacagacaaaacaccaccacaaaaacacaaccaaacgaaaaaccagcgaacagcgacacacaaaacaaagaggaacacaggactgaaacaaaaaacaaaaaccacacagacaaacagaatccacaaggacccgacccacccaccagccaaaagacaaccaagcaagacaaagaaaagaaagcaaaacagaccacacgcgaccacgaagcgcacaccacgcagacaaaccaacaacaccacgaacgaacacacacgaacacccacagcgcgaccaccgcggacaccgccacaaccaaacaccagagacacaaaagac

SEQ ID NO: 631550 - DNA, 330 bp, Homo sapiens
agtgggtagttacgtcgactctgtagcttgtacgcgtggagctgtgaccggaacccggtgtgctgaatcttgtatgtccttctgtcttcctaatcccatagctcactatgcgtgacgtgcatctccagtccacaggttgagtcacgcgtctaggtcgtccaagacttggctcactggccatgccttgtcgtagctacgtatcatgccttggtcacaccggtcttcctactcccggatggtcgagatgctcaacgtgatacattgaccatcgggtggatcgatcatgactccttcatacaatgcgttctttcacgttgagaacgcgtgacg

SEQ ID NO: 631551 - DNA, 538 bp, Homo sapiens
  misc_feature (482)..(482): n is a, c, g, or t
gccatcgtgcagccccacgggtctcagaggtgggtgacctccaggatgggagacaagccaatttgggagcagattggatccagctttattcaacattactaccagttatttgataacgacagaacccaactaggcgcaatttatattgatgcatcatgccttacatgggaaggacagcagttccaggggaaagctgccattgtggagaagctatctagccttccgttccagaaaattcagcatagcatcacggcgcaggaccaccaagcctacaccagatagctgcatcatcagcatggttgtgggccagctcaaggctgatgaagatcccatcatgggtttccaccagatgtttctattaaagaacatcaacgatgcttgggtttgcaccaatgacatgttcaggcttgcctgcacaacttcggctgacctcctcctggccacagtcacgctgtttcctcctcctcttccatcctagctantcctccagatgctccaatatcatcacaaagagcagggcgagcggacggggtgcagg

SEQ ID NO: 631552 - DNA, 570 bp, Homo sapiens
  misc_feature (97)..(97): n is a, c, g, or t
aaagggggcccaaaattaaaatgtagccctgtgtgggtgcgcatatatttggaaattcccctcacttataagatggtaagccttataatgcagggcntttgggtttatttgaccccctgccctcaaaaatttggggggcgtaagcctttgccccgcccctgagttaattgcagctctcacaggctgaaaggttttaaatggcaactgccgtgtttttcccttgtgctctaaagcatatggttttttaaaaatgcccgtgtattttacacaggcagacagaaaagttttgtttctagccaagaaaaaaaaagcttcgcagtttttatgtatctatctcacctcaaggggggaaaagtcagcattttttatatatcggaagttctgaataaacggacctgccaatatttgaagggcctggcgattcttaagagggatgagaatattttttccatgacagcctatatcaagtgtaggttttgctagctgaagtaaaaacagttctaaaaatagccaaatgattatggtcggaacaaatataccctggataccttctgctattgtgaaagcttt

SEQ ID NO: 631553 - DNA, 1329 bp, Homo sapiens
  misc_feature (258)..(259): n is a, c, g, or t
  misc_feature (1329)..(1329): n is a, c, g, or t
gccaaccctttacaactggcccagaccgtaatggccatttcttcttaaaaaaaaaaaaattgttgttttttttattatttcttattgtggcggtggtgtgtggtggtggtggtggtggtggtggtgcgggacagaggggtggtgggggtgcggggagaagtgcggagcggtgaacatactccagagtgtgtgacaacaccacgaatgaagtggtggctcgtgctgtgcctcctcgtggcttatagcacacagaggctnnttaagagacaccacagagtgggagtatttcacgagtgggaggccagaggacacagagagagagagtgtgcgctaaaagtgtgagagtgtgcctgtgtgtgtgttcacgagaaacagagagcctatttactccagagggtgtgggggttttactcccaaaacagcgtaggattgtgtgtgtataaagagtctctcgcgaggggctcgagcggtgttcttataccactaagagagacaacacatctctattctcgaggatacaactgatctgagagaacaaagatgtttggaggaaaaaaaaactatatatatcaaaatataacacgcgtggtcttttaaaacaaaaaaaaaaaaaaaaaaaaaaaaacaaaaaaaaaaaaaaaaaaaaacaaaaaaaaaaaaaaacacaaaaaaaaaaaaaaaaaaagggggggggggggaggaaaatctcccccgcgggggcccaacaaatagacagacgccagcgaatttgtaatagcaaaaggggcgccccaacaaaaggggcgcacaaacaaaacagacaaagcggcggcgggagcaaaaaaacaagggggaagggaaaaacaacaacaacggtgaccatagaggaagaccccaccccccacaggggagggggacacaaacaaggggaaacaacaccaacgcaaagaaactacacacgcaccgagagagaaacaaccacagggaggggggccgaggacggcaccacccgcgcgatcaaactgcgcggcccgcagaaaaacggcccgcgagagagattaacgagaaaatataaacgcgggggagtgtcatcatgacctatcacacacagcaccaaccaaataaaagccaaagagaggaaacaaagaaccaaggaaggacggcggagcggagaagaacagaagacagaaacgaagggagggggaagcagaaaaagaacaaaacacgacaaaccaaacagagcaccacacacgagcgacgacaagaaaaagacagaaacgaagacagcgacagccgacaaggaaacgcagaaaacaagaaggagaaaaaaagaagggggaagcgtgagan

SEQ ID NO: 631554 - DNA, 828 bp, Homo sapiens
agcgggggtgccgaggctcggccggagcgtgagccctgcgcctgtgcccaggaccgcgcccgcgcctttgtccgcgcgtccgtccctccaagtacttgcccccgggacaagttggatgtcgctggaccgcgtcaacacggatggacgacatcatgtgtcagcgatcacatttgaacgagcaagcactgtctattgaagtgaggcccaccgactattgatacttagtatgtgaccatcaacaaaggtcttattcagctatgcaccatgtgcatcaattaggggactgaccgtgacgaacataatattatgtctaaacgaaccgcgcaacagcaagcggttcataaatactattaggatacgtgcacaacggacggttggtcaatagctagtggaatgatgatggcaagaaggaaccgttatgaagcaacatcgggttacagagctgtcgactggggagaatcattgcccgatcggtttttagtcgtttgtggcgtaaaggctccttgagagccattacggtgcatagttttatgaactagaagtatgttcaaggcagatgatgttatatcaccaagcgacgtttgtaggcccagttaagcagtagtggtcgagataacttacccggcaaagcccccagaagccccgggaggccacacatacgatggacccaagaatagattgctgcaaatagttatgccgagtggtttccacggatatggcgccactcccatctgatggcgtagcccaagaagtcgatccctacagcggattcactatcaaatggtagtacagaagcgagagagccgacactggggttgctcggcaaga

SEQ ID NO: 631555 - DNA, 596 bp, Homo sapiens
  misc_feature (15)..(15): n is a, c, g, or t
  misc_feature (166)..(166): n is a, c, g, or t
  misc_feature (189)..(190): n is a, c, g, or t
  misc_feature (209)..(209): n is a, c, g, or t
  misc_feature (212)..(212): n is a, c, g, or t
  misc_feature (330)..(330): n is a, c, g, or t
  misc_feature (346)..(347): n is a, c, g, or t
  misc_feature (377)..(377): n is a, c, g, or t
  misc_feature (434)..(434): n is a, c, g, or t
  misc_feature (441)..(441): n is a, c, g, or t
  misc_feature (501)..(501): n is a, c, g, or t
  misc_feature (524)..(524): n is a, c, g, or t
  misc_feature (565)..(565): n is a, c, g, or t
gcggcgggcgcgcantcggcgggaggcgggcgcccggagacgcggctggggcccgcgcggccggggcgccgtcccagggcagggctgcccggccccgtgccccgtggccgcccgcgctccccatgaaaaaccagctccgcggccccctcagcgcgggcgcacattntcgacttcgggggtggcggcggnngggggcacccgggcggggnccnaccccggtgcggggccggggtccggcgcaggtaccggggcgggcgcggcgacgggggcaggggccatgccctgcaagagcgccgagtggctgcaggaggagctggaggcgcgcggcgncgcgtccttgctgctnntcgactgccggccgcacgagctcttcgagncgtcgcacattcgagtatcggccattcaacctggccatcccgggcctcatgttgcgncgcctgncgcaaggtgcaacctgcccatccgctccatcatccccaaccacgcctgactaaggagcgnttcgccacgcgctgcaaggcggnccaccgtgctgctctacgacgaggccacggccgagtggcancccgagcccggcgctcccgcctcctgtgctc

SEQ ID NO: 631556 - DNA, 215 bp, Homo sapiens
gagctccagtcaatgagaactgaggccccgatggaagggagatgcgcagtgcactgcagctggcgcggtggaggagctggcattgacctgcagcagactggcctctccgtgcctgcgcacccggtgtcagcacgctgcagggaattaaacccatatgcttcctactgtgcagtcaagtggtgacagcggtcctcatgagatgtgaagcccagggt

SEQ ID NO: 631557 - DNA, 125 bp, Homo sapiens
cccttcagcattattatttctctaaagtagccagtgggcaaatctccagtttgttttttttttttaactttgagacaggatctccctctgccctccagcctgggcgacagcgagactccgtctca

SEQ ID NO: 631558 - DNA, 980 bp, Homo sapiens
  misc_feature (632)..(632): n is a, c, g, or t
  misc_feature (638)..(638): n is a, c, g, or t
  misc_feature (644)..(644): n is a, c, g, or t
  misc_feature (652)..(652): n is a, c, g, or t
  misc_feature (667)..(670): n is a, c, g, or t
  misc_feature (674)..(674): n is a, c, g, or t
  misc_feature (680)..(684): n is a, c, g, or t
  misc_feature (724)..(724): n is a, c, g, or t
  misc_feature (767)..(767): n is a, c, g, or t
  misc_feature (799)..(799): n is a, c, g, or t
  misc_feature (805)..(805): n is a, c, g, or t
  misc_feature (812)..(812): n is a, c, g, or t
  misc_feature (833)..(833): n is a, c, g, or t
  misc_feature (860)..(862): n is a, c, g, or t
  misc_feature (870)..(872): n is a, c, g, or t
ggggtgctctcgttgatgaagcacatgtatgaggagaccagcagcaaaacataaccatatgtgtttggcgtttacttcctttagaaaagaatttgcaggcaaccatgtttatttggacttttttagaagggagaattttgaagcttgggattaatgagttttatatggcttattttaagattccgaaaggttacacattcattcggtttttgagaaattccatgagattcaaactgctccctattattggggtattaatttgcactaatagcaaaatgtaatggcagatcagctttgagagtggtcctaagcagtaaactggatgatgttgcattagacatcaataattcatatttaagttttagtagttactactgatttgataatcactttaaatttatatatcttaatgtattttttcagactcctaattaattcccacattcactgtaactaggggcatagtccattctgttaggattatatcctctccttagaaatgttttccatcctgttgtggggatttggtattaatgtttcttcattgattatggaacttttgttccctgaagctagttaactgtgtctaaagttaaataaatacagcagaatgattgttttagcctgctcgnaactgnatacanatccctgnaaaccatgattggcnnnngttngatacnnnnnacgaatatctccaaggcctatattgtctgggatgtcgaanaatggtcccagaatttccaattcaactatagagttaatgtgangctatactattggaaaaatagcagcttttttntatttnataagtngtatgcataaacataagattngtaatgtttcatttataaactgccttnnncaacacannntaatagtgttttctcaagagtattgatagtatgtcttccagaatttcacaatatgcttacagtaaatatttcctagcttgttgaaatgttcaaaaacaaataaaaaag

SEQ ID NO: 631559 - DNA, 505 bp, Homo sapiens
  misc_feature (462)..(462): n is a, c, g, or t
  misc_feature (473)..(473): n is a, c, g, or t
ggctgggcacttcacaaggatggagctacatttgtttatcaccgtagttccagtactgatgtagatctggcacatagatactcggtaaatatattgaaaactcagtacaactaaatatttactatttggccactctgtgtcatgcaattcagttttgtcccccaatcacaattccaactgtgactacattgaacttgatgcatttatagcttatatttgtaggataagtcattatcctattttctgaccttataggtaaacactttagagtttatatctgttttctaaaataaccacatattagggaccctgtcattgaccaagaacacacaaaaagtgctttcatgagccccgaagacagaaggcaaggcaagagcattgttccgaaacaggtttctagtgttcatgtctagcagcttctttattttgcacttgacccggatttaacctgttactccgggnttatttcctanactgggtttaataaactcgtgttgacccctgt

SEQ ID NO: 631560 - DNA, 253 bp, Homo sapiens
cgagaaatcacttgaacctggagagatagaggttgctgtgagccgagattgtgccattgcacaccagcctgggcaacaagagcaaaaccctgtcgcaaaaaaaaaaaaaaaggggggcaagggatatacccggttatttctcaaaaaagaacttcggtgcacatatagccccacaaaaagattgctaagaactcataaaaagctgtgggaaaaaacgggagacttatgggaccatccttctcaacttaaaaat

SEQ ID NO: 631561 - DNA, 1013 bp, Homo sapiens
  misc_feature (632)..(632): n is a, c, g, or t
  misc_feature (638)..(638): n is a, c, g, or t
  misc_feature (644)..(644): n is a, c, g, or t
  misc_feature (652)..(652): n is a, c, g, or t
  misc_feature (800)..(800): n is a, c, g, or t
  misc_feature (832)..(832): n is a, c, g, or t
  misc_feature (838)..(838): n is a, c, g, or t
  misc_feature (845)..(845): n is a, c, g, or t
  misc_feature (866)..(866): n is a, c, g, or t
  misc_feature (893)..(895): n is a, c, g, or t
  misc_feature (903)..(905): n is a, c, g, or t
ggggtgctctcgttgatgaagcacatgtatgaggagaccagcagcaaaacataaccatatgtgtttggcgtttacttcctttagaaaagaatttgcaggcaaccatgtttatttggacttttttagaagggagaattttgaagcttgggattaatgagttttatatggcttattttaagattccgaaaggttacacattcattcggtttttgagaaattccatgagattcaaactgctccctattattggggtattaatttgcactaatagcaaaatgtaatggcagatcagctttgagagtggtcctaagcagtaaactggatgatgttgcattagacatcaataattcatatttaagttttagtagttactactgatttgataatcactttaaatttatatatcttaatgtattttttcagactcctaattaattcccacattcactgtaactaggggcatagtccattctgttaggattatatcctctccttagaaatgttttccatcctgttgtggggatttggtattaatgtttcttcattgattatggaacttttgttccctgaagctagttaactgtgtctaaagttaaataaatacagcagaatgattgttttagcctgctcgnaactgnatacanatccctgnaaaccatgattagggatatgttgtgatatcacatgatggagtgatctttctaaggacgagtattctgctgcgtaggaggtgtgaatcatctgttgtcgtacagttagtcctatcatatactctaatctatatgagtgtgagatgtgangctatactattggaaaaatagcagcttttttntatttnataagtngtatgcataaacataagattngtaatgtttcatttataaactgccttnnncaacacannntaatagtgttttctcaagagtattgatagtatgtcttccagaatttcacaatatgcttacagtaaatatttcctagcttgttgaaatgttcaaaaacaaataaaaaag

SEQ ID NO: 631562 - DNA, 109 bp, Homo sapiens
atcatcaaggctggccggctgcgcccgacgctgcgctcgtcaccagctggtactcggcattgctgcccgggcggtcaatgacgccggcgtagtagaccgcatcgccagt

SEQ ID NO: 631563 - DNA, 541 bp, Homo sapiens
agatagcgatcagaaccagcccgacgccatctgggtagccgccgccaaccgttgtgcaggacgcctgcacagaggccacccactgcgtaggcggcgccgtagagaaacaaggtcaatgagtactcatggggtgacagctttaactggtccatgaaaatgagcggtgacacaacgatgaatgagaaatgacaggcgaaggtgatcgcggagatcgtggcgtagctggcgaaatgtctgttggcgaaaaccttggcgtaggccctgaaaataccccgctcgcctggcgcggttggagggaagccgccatgcagtaatcggtgagccataatccacgttgcggcacagagggcgataaacgcgtagaagctggctttccatccccagtgcaattgcagccatgcgcccagcactggggaaatcgagatgacaatgcctccggccgtggccattgctatgcgcaaccgctcctgttccctgccgaaaaaaaggcctgcaccacgcttgggcagttgaaaccccgagcttggctgatgatcggaga

SEQ ID NO: 631564 - DNA, 830 bp, Homo sapiens
  misc_feature (71)..(71): n is a, c, g, or t
  misc_feature (91)..(91): n is a, c, g, or t
  misc_feature (102)..(102): n is a, c, g, or t
  misc_feature (106)..(106): n is a, c, g, or t
  misc_feature (154)..(154): n is a, c, g, or t
tacccctccttagctttatgcgctcaaaaaccaaattaaaccccccccccatgtaacgggggggcaggganaaaagcaaaaacgcacaaanccagccggganaccnccacgtcctgccccccgccatttatcgccctgatggattttggttttncatctgtccctgtggctggggttagagttcgaagtgggtggacgcctccgggggggcactgagccattgagccccctgggagaatgtcagaggggatgtggaaaaggccactgtctccggcccgtggcttatctgtggggcaacaggtggttgtggtctcccccagaaagtctcccgtgagagggggccgtgaagtggtgggggtcttggcgaccaggggttcctcactctcgaggtgtgcctcacgggagggtgtcctctcggtagtggcccccggggagagggggacctccgtgggacgtgggccatagcaagcgcctggcgccctgggaggcgggagacagcgggcgtctaacgccagcgtgcttgcgtgtaacaccccacggggcgggtcccccccctccaacggctggggggcgcatggtgttgcgtgcccgcccttcgcgaacaccttgtggtggggaagcccctgctccgttctacccccgtcggtggtcaaaactcgtgtgaccccggtccccactcagacacccttggcccttggtccacaagagagaggttcccgaagccctctggtggggcccccttagggcgcacaggtgtggtcctaaggcccgcatatcaagagacggccaccgccgggcttgggccccagtaagacgggaaagtgccaggt

SEQ ID NO: 631565 - DNA, 552 bp, Homo sapiens
  misc_feature (18)..(18): n is a, c, g, or t
atttccagagcaaaaggnccggtcatttaggacaacagtggacaggcgtatgggggtgatgggcagggggaccctgttcctgttgtttggctgctctcaggcgttcagctggtcaccctgggagaggggtgagggcaggccctctgctttaactcacttgtgtggtaggaggaaaagcaaattgtttccagatgaggggaggctgcctggggagtggaatttgtgccccgtctgcgcacagcagcctctctgggcctacaggaccctgtgtctttgtgttcagacaagccctgctgtgtagaggcctgagctttctgccgccgacttgggctcagtgccccgaggcaggcagatggaggagtgcggcagatgtgccgtcctctcccaggggagggaagctccttctgtttccgagtgaagtctgggccaacatgccccgtattttacctatccctttccttctaagtagttcagatcactttcagaacgtcacttccataatccttatatttatgctccccgaggaagtaaggaagatatttttccttgtct

SEQ ID NO: 631566 - DNA, 269 bp, Homo sapiens
cgccgaagttttctccggttcgggagagagacggagcccgctctgtcacgcaggctgccaggctggcgtacagtggcgcaatctcagctcgctgcaacctccacctcctgggttcaagcgatttttttgcctctgcctcctgagtagctgggattactggcacacaccaccatgcacagttgcaggaatttagccaattcagaggtcttgttctccataatttggaattttccttcggattttgatcaagttggatagagttggtcaaa

SEQ ID NO: 631567 - DNA, 948 bp, Homo sapiens
  misc_feature (1)..(1): n is a, c, g, or t
  misc_feature (839)..(839): n is a, c, g, or t
nggccgagtttcagcctagtttcgaaattattctcggcgcataattgccgactcccttgcggggttatttgcacccccgcggtttttaggggccgcgtcgtgccgcccgattgtctctcttgaagaatggtgttctccccccctgtggaggctctccacagggcaacaaaaaggtgctcagcgttgatctttaaccgaattcttatagcccagagggttgagcaagcaaatttccgcactctggagcgttctctttgggagcgccaactgacctaccgaggggttccttaacactcaacgggggggtagaagaggaagctgtctcctcatcgggggggccagagaagattctttttgccagacagttgtggaggggtcaccagaccttctcgggcccccgccttttatatccccctggtgaaggccccacttctttttgtgcattttaaaaagcgagagggggacatttctaaccgcgcactatatttctgatcacttctcaaatagtgctcgcagtgcttactcccgagagatactctttaaaggccacattcttttcataacaagagagcggcaaccccccgatgaggccgagcttactcaaatcactgctgttttagaccacccaccccacccgggggcaatccctcaccgctacatccccctacagtcgcacactattctactacgcccgcactccctaaactggtaacaaacacacaatccgtgtgtgagctataggcggtaaaccatcatgctgtaacaaaacaattctatccttaaaggtgtaaataactcttctggaccacacaaaagttctcgagacgggggcaaagagnaaaaataagcgaaaaatactgggtacattctaaacagacacgaccaacaacaccctctgacaaaagaaaaagctcactttccccccaaaaaaagacaaaccacacaaca

SEQ ID NO: 631568 - DNA, 217 bp, Homo sapiens
tgccataacctccacaggctgctgtaacaaaataccatagactagtggtttaaacagcagacatttatttctcacggttctggaggctgggaagtccaagattcagttcttggcgagggccctctttcttgacttggccattttcttaattaatgccctgacagggatggagaagagagagtttaacgagtctactatcttcttacttataatagca

SEQ ID NO: 631569 - DNA, 610 bp, Homo sapiens
ccctgatagcccttcgagagtgtgcatgttggcagactacagtctccgtgcccatttcccaagatataggcaatgcacatatggcccagctgtaatgagttcataagttgcgcgcgcatcacaaaggaggactcagagtctctcctccttgaatgtgaatcgcaagtgccatggccctcaggaatggatctgaacgtggaaagccaccacacagaatgcatctggagcgaatgcactgtctgcaatctttgacacactcatgcaatcacctaccttaatcccttgattttctaagttttcttaaaataatctaaaattccttgctgaaattctaatccagctctatggagcaagacttctttggtgcttaagaacagtctgatgggctggaacgcaggttatttgaggtaccctcaatttagataccaccattaaacccttagttctccctagaattttgacctcttaaaatgatccctaccacccgtgtctcagttaagtatgaaatttatgtgttgagagatatctaataaaagtatgtcttttcttcataatgatagtcacttatactatcacattaaatatgcattctgaaaacacaaaataaacc

SEQ ID NO: 631570 - DNA, 1099 bp, Homo sapiens
  misc_feature (2)..(2): n is a, c, g, or t
  misc_feature (1099)..(1099): n is a, c, g, or t
anccacgcgtccgttgctctatctcgactgtagtgtgtagtgtgtgcgtgtctgtgcatgcttgatgcccgtgatatagagtcacttgtggcgagttgctgatcgacggatagtgtgttggctgagtgacttagtagtgcgtgagagtgctcatcctggacagaaaacatttgtgcctcgcgtagatgatcactggtaagaactagccttgctaatatgcgggacacggatgcgtggcgcgtggcggtaacactacacacagatcacgtgcaaacaacataagctagataggatgactcactgaatgtatgtagccgcgtgttgtgaagactgatggggtgcgaacgaggattggctcatcggaagtgtaataatacctgtggtatcaaagagggtagatctccacaatcttcgccaaagatgtgtgtccgtgccatttgggtcggtgctgatggtccttgcgaaggacgcgtgagtcgcgtcaaagctgttgaaatactcattgtctacttaaagactggtcacacataatcgatgactactgtgcggctagtgctaacggttccctaatactacaaatcgtgctgtatgccttactgtggaaccgccaggtagaatggagtcatgagtaatcggtgatcaaatgtgagggaaaactgatgaggttaggaaatggcccccaaaaagtaatggcttctggagggactgctcagtctgggatgggagccctttcctaggggggcactgtatgcaaggtgggacttggccagcttgggaccagctttagagggagggctgtcgttggggaaacacgagccactgccgatggattttaccaagccagctgccccctagaggcattaggacgtgtatctcgcaggtgccagattgagtagcaaccccagttgggggggaacaacgggcccggaggccgaaattgattggacgtatggcccatatcggcgcgaaacccgcccccaaagccccctcgtgttgagctcccccgcgcgttataattgttgagacgagtggtgtctaatatcaaaaaacacgcgtcctccaccccatctcataggtacagttagcaatgtatgaccan

SEQ ID NO: 631571 - DNA, 456 bp, Homo sapiens
  misc_feature (5)..(5): n is a, c, g, or t
  misc_feature (57)..(57): n is a, c, g, or t
  misc_feature (99)..(99): n is a, c, g, or t
  misc_feature (127)..(128): n is a, c, g, or t
  misc_feature (155)..(156): n is a, c, g, or t
  misc_feature (165)..(165): n is a, c, g, or t
  misc_feature (170)..(170): n is a, c, g, or t
agganggagctaaaagtcagctaagaacaaaatccttatcagacgattataataatntcgtccgtcgcttttgaaattgcatgtttcgactcatctccngatgcactgaaagttgtatttctaaganngcgtcagcaccttttttaatgtgtacnnctgtgaccncgtcntcagcattaactccatttgctgaaagaacttgaggaggataggatttggtattgattccttcaatacgttgactcctccagatttcactgtaaccattagccttggcttctagattgtctttaacttaattttctgtagttcattattacagtcactctgttagcactcacttcctcaggtcacttttcctttcccattactttctttctttctttgagaggttgcagtgagccgagattgtgccattgcactacagcctgggtgacagagcgagactttgtttgg

SEQ ID NO: 631572 - DNA, 232 bp, Homo sapiens
ctagaggatcccctgagactacaggctgtgccaccacgcccagctaattttggtatttttagtagagatggggtttggcgtgtggacagccgggtctcaaacgcctcacctgttgatctgccttcctcggcctcgcaagatgctgggattacaggcgtgagccaccgtgcccagcagaaagtcttttatagggccctgaaagcacacagttaaatttaagaggacaggcaca

SEQ ID NO: 631573 - DNA, 1060 bp, Homo sapiens
gtgctgagccaggcaccagtgggcgggttggtgagaacaagcgccttacgaaaggcggccgaaagggagccagagatggaacacgtggtttgatccaattttcttacgaacatgattggtatgattgtcgaaacgcagccgtgtcgatgtggcaagtatacatgaaccatacttggaagatgacggctcgtcatccatggacccatacggtaactcgaatagcttgctatcctgaatgtgtctcgaagggtcggaggtggtgtagaagatgagatcttggacttgcatcttgcatggaatgcagtgaagttagcatttaagcacaagagttactatgcatgcatggactgaaagtatgtacaggggtaaaaactgcctgactaacttccatggcatggatcttacccgtgacaacaatcgggttccatgtgtcaaaagacagggcagacaatgacttgaagctcacgttgatgtcaagactaccgatggttacttgcttcgtgctgttctggtgttggttttactaaagaaagcgcaacaatcagatacggaatgacctcttatgctcagcaccaagcaggtccgccaaatccggaagaagatgctggacatcatgacccgagaggtgcagacaaatgacttgaaggaagtggtcaataaattgattccagacagcattggaagagacatagacaagggttagccaatctatttatcctctccatgatgtctacgttagaacaacgtcaacaatgctggagaagcccaagtttgaattgggaaaaggtcatggagcttcatggcgaggcagagtctgggacaagccactggggacgagaacagtgctaagttgaaagagtggtgtgttttgagcccccaggtccaggaacccggttcaagcgtcggacctcacatcgtggcgcacaaaaaggggggttgtcggccaaagggaggaccacaaacaaatcggggcacataatcagtgggcaaaggaatataagggagaggcaatgagtcggcgcaccatgtaaaagaatgcgagccataggcacaagaacaa

SEQ ID NO: 631574 - DNA, 341 bp, Homo sapiens
gtttttgggggcccattttggggttttttttttccgggggggggggcctacaccttccccaagggggcaaaattttctggaaatttcaaagaaaatggggggggggggggggggggattttctttttccccggggctagggggggggggtaactttttttttaccgcccccccccccccgaaattaaagccccccctgggggtgggggtttaaaataaagggggaattttttaattgggcctttttttttgaggggaacccccttttttttttttttgaaaaggcctcaaaccccccccctttaggtttgccaaaaaaacccccccccgcttcccccttta

SEQ ID NO: 631575 - DNA, 1244 bp, Homo sapiens
  misc_feature (1057)..(1057): n is a, c, g, or t
tcaggcggccggaaaaatggcggactttcaaactgaccttgcctaccaaaaggcaggccggaccatttttcaaaacaagagaaagaggggtcctggctggggaagaaattgggcaagggaagaagtctcccgagggtcactacaaagaacttcggagtctggggtcttacaaagacaacccaaaggaggcgctatgtggagggccacctatacaattgtgaagcaacgaaagatgtgcccctttacagcgtggtataaagtggtgtctcacaatctcggaggcgcggaatctcctctcttctgtggcgcgtgtggtgtgcaacacaaaagaatatgaaaaaaaattttgcccaaaaaagagagaacccatgtgtgtgctcgatactccgcgcgcgcgagaggaaaacataatctctgtggagcacacatatcgatttcgcagcgcggagaaggttttacatcaacagcgccgcgatattctgcgagaagaaaagtagagcgggacccacaacaagaggaaaacagcagatgttgttctttctagtggtgcttacaaacacacccctgttgtgttttcccccccccccgctgatgatgctacttcttacggaggggggggacaagcagtagcttctgcggaagaaaaacctgcgcgagtggctgaacactcagatacttgcgggtgctaacaaccaggaagatggttggaggcagacgccggaaaaacgatgtggcaccgcagggagagcgacctacttcctgttggaagcaagcgcacgaaaaagaacacaacagaaggatgtatgacagcagcctttttattcataaaagaccgagtgatggccgctttcacaacgaaggtgggttgtttacacacaccaccgatgaagggggcggctgttgttccccccggggggggacataaacccacctgacacaatacacaaaagcaagcacgcgagagatgtattttctgatcccaccgcgaagggaacaaagtaaacgttctttcactacccgatggacagaaggtgtggccttgttgggagagacacancaaaattttttcgcgggggggtacccccgcaggtgttttctccccccgcgtacagaaacacaataactgtgtgtgacagaacattttttatgcaagacgatgcttgtgagataatttatagcttgatgcctcatcaccaatggtcttttaacagcgatgacaggaacagacatcaacacagcaagta

SEQ ID NO: 631576 - DNA, 400 bp, Homo sapiens
agcataactctgatagactaggtgatagctgagcatttctatcatatacgtgtaggccatgtagtatatcttcttttaaaaaaagtctattcatgtctttgcccaccttttaatgggatcttctatgtaaattgctgtagttgaagtgtctgaattccttgaatattctggataatcagtaccctatcagataaatagttagcaaacattttctctacataactaacaggctagtctacttcgatctcctgctgatttctcttgctactgtagaaagcttattggtttcgataaggcccatttgtctatttctgtaaaagtagcctgtgtaaaagaggtcttagtcactgatactaagcctatataaatgtccagaagagtttccctaggtaaattctca

SEQ ID NO: 631577 - DNA, 606 bp, Homo sapiens
tcatctccataagggggacatagagtgagtgaggcagacgatcggacagtgaaaattgctcctaaaaggcctttgtcacctccatagagtagcggtggggtcaacactggggcaattagaaggcttccagacattttcacaatgaactcctctgtgctttgtggtagaaattaaaggcttgttaagtctacagagcaactcaagcaccagattccccaaaccttcttttttctatcctggcctgatttcttcctctccccacccaggctcattggcttcattcccacaggaggcaatgcagctaaacagatgcaccctggcagcaggcttaatcaggcagctttatgttcctcgtggtgagtgatgagttggccaggcaatgtggagcagtgatagggcactggttagccaggtgccactccccgaggcggttcagaggatctaggggaacactagaaaggcttcatctgccatgattggccttgttgtctaggctgtaaggaccaaaggctaaaactgacactttcctgaatgcattttcttgtttgttattcccccaaaccaagctccattaaagtggtcatggatattagctagatgtggtaa

SEQ ID NO: 631578 - DNA, 548 bp, Homo sapiens
  misc_feature (323)..(323): n is a, c, g, or t
  misc_feature (327)..(327): n is a, c, g, or t
  misc_feature (402)..(402): n is a, c, g, or t
  misc_feature (489)..(489): n is a, c, g, or t
ctaggtggaaagcgacgtattccttgtcggcaccgtgtactggtaggagtaccgctggttgccactctggtcctcataaaccgtgggcacaatcttcaggatgtagtcgtgggaggccagggggttggaggtgagtctgtctgctcccccgagagcattgaaagctccgtggatgttctggacctgtagcgtgtccccaaaggagagcttgtggatgacatgcgtcatgtctgggttctgtggctgggctgtggcactgtgtgtggacacgtggaagttgccggggaccttgttgatgctgaactgcccctcgaagcggcagnctgncccattgttcagcgggatcttcagggagttgtcgatgtggcccgtgtggctgtaggcgatgtattcctggttggncagcgtgtactggtaggagtaccgctggttgccactcttgtcctcgtagaacgtgggcacaatcttcaggatgtagtcgtgggaggncagggggttggaggtgagtctgtgtgttccctgtgagcatttgaaaggtcggggatgtc

SEQ ID NO: 631579 - DNA, 155 bp, Homo sapiens
tatctaccactcattcatgggccagctgctgcagtgtgagtcccaggtgctaggctccgaaatagttcggcagaggctgggagccccgccataggctgtagatcgaccgaggacaactccaccaccacacgtgttcacattaccccgtactccat

SEQ ID NO: 631580 - DNA, 345 bp, Homo sapiens
aacacagtaagtgcaaaagacgtgttaagtaaataaaacagcgaatatattatctacctcttaactttggctcacatctatcaatccacaagaaaaacaggacatagaaaacctgaagctaaaagcagccacatggagggaagaaagggattgctgggttccttaaagtcactggtgggacatgatcagatcacacagctgaaatacacaggggttttacctcagtaagtgtctgtatacaaggtggtgggtagctaaatgggcttagttttctgaggagtatccattcagcactacgcagtaagcaggagaaagtagtcatatttgtagaaatgtacaggaggc

SEQ ID NO: 631581 - DNA, 148 bp, Homo sapiens
taaagggaaagcaacaggccaggaccgggggttcatgcttgaaaccccagcattttggaaaaccggggggggcagattacttgaaataaggcgttcaaaaccagccgggccaaaagggggaaaccctgtttttactaaaaatagggac

SEQ ID NO: 631582 - DNA, 835 bp, Homo sapiens
ggtgtgtgctgtccgcccccgccgagacatgggcgcggccgcgaggagcccccccccgcggggagcccaccctcctctctcttctttgtcagtgattgtctccctccccccgccggagaggggaagaagactatcgtccttcccctgcagtcggtagccagtgcccctcctccccatctttcaccccacctagctagtcagtagttcgtcttcctcgtcttcttatatagtacggccgcgcgcgctctcatcagatgtgggtcgcgaccccccccccgctcgggtggcgccctctctctctctctttctgtaggaggcgcgctcccgcgcgagtgtgagtcatccctcgttcgcgagcgctcgctcgctctcgcttactcctagtcttctgtctctcttgcttagacgaccgcgcgcctcttgatagatagaacgtactgatgagcgccctcgttgaggtgtaggtactcgccgccctaccgaggcagctcgccgctctcttggtggagattggctcactgggcaaagcgcgatcgcccgaacgaactgctgtttctctctagcgagaggatgtgcaacggctggttctcacgcacgacggcccagcccccgctgctgcttcgtgcgttctatcactttcttgcgccctcgcctcgtctttattatgagacagcgtgtgtgtgtgtgtgtgtgtggggtctggccgccccccctgatgggcccacacagaagacacactgttggggtttttttttttttttcccccaaaaaaaatttgaaaaaaaaatttttttttttaaattttttgggggggttttctttttttttcccccca

SEQ ID NO: 631583 - DNA, 1069 bp, Homo sapiens
  misc_feature (790)..(790): n is a, c, g, or t
agcggccgcagccatggagccccgcagcatggagtacttctgcgcccaggtgcagcagaaggacgtcggcggccggctgcaggtcggccaggagctcctgctctaccttggcgcccccggcgccatctcggacctggaggaggacctgggccgcctaggcaagacagtcgacgcgctcaccggctgggtgggttcgagcaactaccgggtatcattaatgggattggaaattttaagtgcctttgtggacagattatcaacacgctttaaatcctatgtagcaatggttattgtagctttaatagacagaatgggagatgccaaagacaaggttcgagatgaagctcagactctgatattgaagttaatggatcaagtagcaccacctatgtacatttgggagcagttggcttctggttttaaacacaagaattttcgatctcgagaaggcgtgtgtctgtgtcttattgaaaccttaaacatttttggggctcagccactagtcatcagcaaattgataccacatttgtgtatcctgtttggagactccaacagtcaggtgagagatgctgcaatattggctatagtggagatttatagacatgtgggagaaaaagtgaggatggatctttataagagaggaattccccctgctagacagggtctggctctgttgcctaggctgcagtgcagtgttacgatctcggcttactgcaacctccacctcccgggctgaagccatcctctcacctcagcctcccaagtagctgggacaacagacgtgtgccancacgcttggctacttttgtatttttgtagagatagggtttcaccatgttgcccaggctggtcttgaactccggagctcaagcagtcctcccgcctcagtctccctggaattatgggcgtgaaccactgcagtcagctgaaatgttttaaaattcaaaagatacaaaaggatatatatgttatcaccatttaaaaagttcttaaggtcctgtaatatttttgtcattgtttcattatatattcatttattatttagtatgtaattatgtaccattatcac

SEQ ID NO: 631584 - DNA, 306 bp, Homo sapiens
gtcgcggaaatctagtttcatgttctccacagcccaagccctaaagaaggctacattactgacagtcatattggcaccttcagactggttgactccttccaaaccctcaaagggcagctctagcatcctgaccaccccttcttactctactcctgctgctcagcactgctgaaggaaatccatcctacagaaaaggagctcttacacaacaatgacctccagtctcaggggaggcccttagttctactcagcaatcccttcctcactgaccctcttttccctcgtcttattccaaccttacaggcc

SEQ ID NO: 631585 - DNA, 1614 bp, Homo sapiens
  misc_feature (57)..(57): n is a, c, g, or t
  misc_feature (178)..(178): n is a, c, g, or t
  misc_feature (213)..(213): n is a, c, g, or t
  misc_feature (491)..(491): n is a, c, g, or t
  misc_feature (494)..(494): n is a, c, g, or t
tgcacgagcatacatctatttttctgtaaatatggttatcgagagagatactgcttnaataatgtcctctggaggtgctcattctttcagcttgactacttcatacaaattaaatgaggtcattcacactgaattattgtgtttaatctgttttatagacatcttcaccactcatcanccaaaattcaagtatcagataacataaagatttgntttcagctcttttaaggaaatcttaaataaactattctttctcatttcacttgaaatatgcaaggtataactggcatttacatatattaaacaaataagatttagatgtaaagaaatcaaaggaatctgaatatgctttcttatatttattgaattaaacaatatagatacattgagaaaagcatagagggctctcaaggagttcgcctccttaaaataatagtagactaaatagtttttcatcattctttgtattttatttctctaggagacatganggntgggtacaagggaaggaatagtggcaagagaagtggtaatggaggtaaaaggagaataaagaaaagatagacagaaaaaaatggaactttatacatggaaaatgtttttctgatccattatactctttctttaaaaaggtaatattttcttcttaccaactcaaatttctagtatagtttctgttcatttacattctagtagttcttggtttttcgtgaaaaggggaaaggaaaaacccacattttttagcgcttcccactttaccatatctgaacttccatatagtcttactctgcttctaccacttaccatagttaaggattattttaccttctactaacttctaaaacttgttttctgaagaaaaactaaatactgacattctgttattacaatgattaggagcatgctttgcactgattttaaaacaaaaatcaatccttttgtggtcagtagaaattatgaaataccaatatattcttttggctactgctaatgagattcttgatgtataacagaaaaaaccagctcgaagaagatatgaatcatatggaatgcattcagatgatgacgccaacagcgatgcatctagtgcttgttcagaacgctcctatagttctcgaaatggtagtattcctacatatatgaggcagacggaagatgtggcagaagtcctcaatagatgtgctagttccaattggtcagaaaggaaagaaggcctcctaggtctgcagaacttattaaaaaatcagagaacactaagtcgagttgaactgaaaagattatgtgaaattttcacaagaatgtttgctgaccctcatggcaagagagtattcagcatgtttttggagactctagtggatttcatacaagtccacaaagatgatcttcaagattggttgtttgtactgctgacacaactactaaaaaaaatgggtgctgatttgcttggatctgttcaggcaaaagttcagaaagcccttgatgttacaagagagtcttatccaaatgatcttcagttcaatattctaatgagatttacagttgatcagacccagacaccaagcttaaaggtgaaggttgctatccttaaatacatagaaactctggccaaacaga

SEQ ID NO: 631586 - DNA, 478 bp, Homo sapiens
aagcagttaatacaactcaccctcctaggttcaagcgatcctcccatctcattctcttgagtagctgggactacaggcgcatgtctccatgcacagttaaattttaatttattattattgggtagagatagaggtcttgtcattgttgcccagtgttggtctccaacacgttgggctcaagccgattttccgtgcctctgccttcccaatagtgtagattacgaggcattgagcccactgtacaagtgtacaagctcatagctcatgccaatagccttgatcttaggctcaagcccatcctacttgcctcaagcctcccaatgtagctgggactacaggtatgggccaacatgactggcttgtctctagtctaacttttccaattttatatggctagaatcatactatatggtaccttgtgttactgtgtcttcagtgtaatgttagagtctgtattaactgcttggggtccgagctc

SEQ ID NO: 631587 - DNA, 1440 bp, Homo sapiens
  misc_feature (57)..(57): n is a, c, g, or t
  misc_feature (178)..(178): n is a, c, g, or t
  misc_feature (213)..(213): n is a, c, g, or t
  misc_feature (491)..(491): n is a, c, g, or t
  misc_feature (494)..(494): n is a, c, g, or t
  misc_feature (1326)..(1326): n is a, c, g, or t
  misc_feature (1369)..(1369): n is a, c, g, or t
  misc_feature (1416)..(1416): n is a, c, g, or t
tgcacgagcatacatctatttttctgtaaatatggttatcgagagagatactgcttnaataatgtcctctggaggtgctcattctttcagcttgactacttcatacaaattaaatgaggtcattcacactgaattattgtgtttaatctgttttatagacatcttcaccactcatcanccaaaattcaagtatcagataacataaagatttgntttcagctcttttaaggaaatcttaaataaactattctttctcatttcacttgaaatatgcaaggtataactggcatttacatatattaaacaaataagatttagatgtaaagaaatcaaaggaatctgaatatgctttcttatatttattgaattaaacaatatagatacattgagaaaagcatagagggctctcaaggagttcgcctccttaaaataatagtagactaaatagtttttcatcattctttgtattttatttctctaggagacatganggntgggtacaagggaaggaatagtggcaagagaagtggtaatggaggtaaaaggagaataaagaaaagatagacagaaaaaaatggaactttatacatggaaaatgtttttctgatccattatactctttctttaaaaaggtaatattttcttcttaccaactcaaatttctagtatagtttctgttcatttacattctagtagttcttggtttttcgtgaaaaggggaaaggaaaaacccacattttttagcgcttcccactttaccatatctgaacttccatatagtcttactctgcttctaccacttaccatagttaaggattattttaccttctactaacttctaaaacttgttttctgaagaaaaactaaatactgacattctgttattacaatgattaggagcatgctttgcactgattttaaaacaaaaatcaatccttttgtggtcagtagaaattatgaaataccaatatattcttttggctactgctaatgagattcttgatgtataacagaaaaaaccagctcgaagaagatatgaatcatatggaatgcattcagatgatgacgccaacagcgatgcatctagtgcttgttcagaacgctcctatagttctcgaaatggtagtattcctacatatatgaggcagacggaagatgtggcagaagtcctcaatagatgtgctagttccaattggtcagaaaggaaagaaggcctcctaggtctgcagaacttattaaaaaatcagagaacactaaggtgagatgcgttgtcttaaaatgattttactatcaggttagcgctttttgattttactttgtttctanaacactttagagatactggtgtagaaacagacttgtcctgaantcatatggttgcttcaaagtgtttttccaaagcttcagtcttttagnaccatctatactttcattactacg

SEQ ID NO: 631588 - DNA, 1232 bp, Homo sapiens
  misc_feature (57)..(57): n is a, c, g, or t
  misc_feature (178)..(178): n is a, c, g, or t
  misc_feature (213)..(213): n is a, c, g, or t
  misc_feature (491)..(491): n is a, c, g, or t
  misc_feature (494)..(494): n is a, c, g, or t
tgcacgagcatacatctatttttctgtaaatatggttatcgagagagatactgcttnaataatgtcctctggaggtgctcattctttcagcttgactacttcatacaaattaaatgaggtcattcacactgaattattgtgtttaatctgttttatagacatcttcaccactcatcanccaaaattcaagtatcagataacataaagatttgntttcagctcttttaaggaaatcttaaataaactattctttctcatttcacttgaaatatgcaaggtataactggcatttacatatattaaacaaataagatttagatgtaaagaaatcaaaggaatctgaatatgctttcttatatttattgaattaaacaatatagatacattgagaaaagcatagagggctctcaaggagttcgcctccttaaaataatagtagactaaatagtttttcatcattctttgtattttatttctctaggagacatganggntgggtacaagggaaggaatagtggcaagagaagtggtaatggaggtaaaaggagaataaagaaaagatagacagaaaaaaatggaactttatacatggaaaatgtttttctgatccattatactctttctttaaaagaaaaaaccagctcgaagaagatatgaatcatatggaatgcattcagatgatgacgccaacagcgatgcatctagtgcttgttcagaacgctcctatagttctcgaaatggtagtattcctacatatatgaggcagacggaagatgtggcagaagtcctcaatagatgtgctagttccaattggtcagaaaggaaagaaggcctcctaggtctgcagaacttattaaaaaatcagagaacactaagtcgagttgaactgaaaagattatgtgaaattttcacaagaatgtttgctgaccctcatggcaagagagtattcagcatgtttttggagactctagtggatttcatacaagtccacaaagatgatcttcaagattggttgtttgtactgctgacacaactactaaaaaaaatgggtgctgatttgcttggatctgttcaggcaaaagttcagaaagcccttgatgttacaagagagtcttatccaaatgatcttcagttcaatattctaatgagatttacagttgatcagacccagacaccaagcttaaaggtgaaggttgctatccttaaatacatagaaactctggccaaacaga

SEQ ID NO: 631589 - DNA, 85 bp, Homo sapiens
gggaggcgcgcgcgaccggcggctctttggcgctgattatggggtctcggcgagggagtcatcaagctttggtgtatgtgttggc

SEQ ID NO: 631590 - DNA, 312 bp, Homo sapiens
caggtcttttcccctcaaaaaaaagatgcagtttatctgccatcttaaagttgtatttctaacacatatatttgatctattactccgtttaaatactctttaggtcaggagcgttggatcatgcctgtaatcccaggactttgggaggtggaacgtgggtgaatcacctgaagtcaggagttcgaggccagcctgggcccacagtgacgaaaccccgtctctactaaaaatattacataattagccgggtgtggtggtgcatgcctgtaatcccgtcttctcaggacactgatggaggagaatcgctttaac

SEQ ID NO: 631591 - DNA, 252 bp, Homo sapiens
  misc_feature (46)..(47): n is a, c, g, or t
gatctagacgatcgctatactgtggtgtaccgtcatccatttgtcnnaaagatgtagaagacggaatggaacgatgggtgggaggttgggttcaatgacctctagagtcccttttacctctaggattattcaattctggactaccagggagctgggcacctcagccagccagggcacatgcagaggtggggaatgagcagtatcctaggaggctctctctcctgcccttgggggtcaatgaactctaccctc

SEQ ID NO: 631592 - DNA, 153 bp, Homo sapiens
ggggttttgggggtttgctttaaagtttttgaaattgtaaaagttgggctttgtattttaatgtaaactgagcaaaaaggcattttagggcctgggccccaaaaaaaagcttgtaacgcccatggatttgaataaacatgtccttgcttttga

SEQ ID NO: 631593 - DNA, 294 bp, Homo sapiens
gtcctattgatccatctgacggaaaatgcgccttctctcgggatcctggacgtgcgtcgagacctgatccctgttgacacttaattactggttcgccgtaacctaacaggtccatgttgtcgtgcttttcgacctctgatgtgaacgagttaaggctgctccaatcaccacttgctgacggtcgcggttggacaacgatgctgcacagtccgttcatggcggttcatgatggggtagttcttccccttgtagtgattgacctcctggtcaaagtgtaagcccgcgatgatggga

SEQ ID NO: 631594 - DNA, 360 bp, Homo sapiens
aatcacagtactatgggaggcaaggtgggtggatcacctgaggtcaggagttcactaccagcctgacggatatggtgaaacctcatccccattaaagacacaaaaattagccgggcatggtggtgggcgcctgtagtcccagctactcaagaggctaagacaggagaatcgcttgaacctgggaggcagaggcaatagagtttactggtatatatgtataccaatttgattggggtttaatttccatttaagccttaaatttggctccaagtaattttactctaagaatcttctctctccataacatgcttagcacagtgtctagcatttgtaggtactgtaagtcatagaaaatatctg

SEQ ID NO: 631595 - DNA, 376 bp, Homo sapiens
  misc_feature (318)..(318): n is a, c, g, or t
agaggatccccctcctacgagcgcctatcacaagagtctgtacacccttctcaacaacttccttcacatctgcaggctgcacaccaggagaatgctcagttcctgtttctctccaatcccaagtccgactgccccctggccatactttgcagtccttataggttgtattagagccttttactttcatttgcccccatgataaggaagcaatttcaggggaagtcataaggaacttcactgaagtcagatgcgagccaactggtcttggacttcccagcctccagaaccaccgcactgtctcctcaaagttgcgttccnaaacggcgcagtgctctgcccgcacttacgctcccagcgctgcttcgggatctgcgta

SEQ ID NO: 631596 - DNA, 332 bp, Homo sapiens
  misc_feature (274)..(274): n is a, c, g, or t
agaggatccccctcctacgagcgcctatcacaagagtctgtacacccttctcaacaacttccttcacatctgcaggctgcacaccaggagaatgctcagttcctgtttctctccaatcccaagtccgactgccccctggccatactttgcagtccttataggttgtattagagccttttactttcatttgcccccatgataaggaagcaatttcaggggaagtcataaggaacttcactgaagcaccgcactgtctcctcaaagttgcgttccnaaacggcgcagtgctctgcccgcacttacgctcccagcgctgcttcgggatctgcgta

SEQ ID NO: 631597 - DNA, 170 bp, Homo sapiens
ctcaagatcacaaaccattccccacttactctctacaactctcataactttcaaaatctatttttctcctcacacttgaagcatatactttctgcccgactccttcaaccgtactcactgttcattgaaattcctacaattaccattattcctggcacagacttcaaccc

SEQ ID NO: 631598 - DNA, 377 bp, Homo sapiens
  misc_feature (9)..(9): n is a, c, g, or t
  misc_feature (104)..(104): n is a, c, g, or t
  misc_feature (232)..(232): n is a, c, g, or t
tgctgggantataggcgtgagccactgcgcccggccttgatctgttggtttctaagagacatagtcctattcttccctgagctgggtccctggtgtcactaagntcaccccttctcattcctggaacttccctgaggtcatagggggctctttcatcctatctctggctcctgtgggtggcttctatgcccaagcaagaagtgactcaggcaagggtatagatacaaaatgnctcactctccatccccagggatgtgattctggctcagtgcatggatctgctcattgagtggcctaggggtggagcagagtgtccccaaactgtagtctacctctcttccccaagaggaaccaggtgcctgactttggggactcca

SEQ ID NO: 631599 - DNA, 81 bp, Homo sapiens
cgctcaggaccgggcctcaaaatggccacacgcgtacccccgtagcggaaaaaccgggttctttggggagccggatgcctt

SEQ ID NO: 631600 - DNA, 758 bp, Homo sapiens
  misc_feature (9)..(9): n is a, c, g, or t
  misc_feature (69)..(69): n is a, c, g, or t
  misc_feature (71)..(71): n is a, c, g, or t
  misc_feature (77)..(77): n is a, c, g, or t
  misc_feature (79)..(79): n is a, c, g, or t
  misc_feature (83)..(86): n is a, c, g, or t
  misc_feature (95)..(96): n is a, c, g, or t
  misc_feature (98)..(98): n is a, c, g, or t
  misc_feature (108)..(108): n is a, c, g, or t
  misc_feature (116)..(116): n is a, c, g, or t
  misc_feature (128)..(128): n is a, c, g, or t
  misc_feature (149)..(149): n is a, c, g, or t
  misc_feature (162)..(162): n is a, c, g, or t
  misc_feature (181)..(181): n is a, c, g, or t
  misc_feature (188)..(188): n is a, c, g, or t
  misc_feature (197)..(197): n is a, c, g, or t
  misc_feature (199)..(199): n is a, c, g, or t
  misc_feature (203)..(204): n is a, c, g, or t
  misc_feature (206)..(207): n is a, c, g, or t
  misc_feature (210)..(211): n is a, c, g, or t
  misc_feature (213)..(213): n is a, c, g, or t
  misc_feature (217)..(217): n is a, c, g, or t
  misc_feature (223)..(225): n is a, c, g, or t
  misc_feature (227)..(227): n is a, c, g, or t
  misc_feature (231)..(231): n is a, c, g, or t
  misc_feature (233)..(235): n is a, c, g, or t
  misc_feature (238)..(241): n is a, c, g, or t
  misc_feature (245)..(251): n is a, c, g, or t
  misc_feature (260)..(260): n is a, c, g, or t
  misc_feature (265)..(265): n is a, c, g, or t
  misc_feature (272)..(272): n is a, c, g, or t
  misc_feature (281)..(281): n is a, c, g, or t
  misc_feature (288)..(288): n is a, c, g, or t
  misc_feature (291)..(291): n is a, c, g, or t
  misc_feature (293)..(293): n is a, c, g, or t
  misc_feature (295)..(295): n is a, c, g, or t
  misc_feature (297)..(297): n is a, c, g, or t
  misc_feature (307)..(307): n is a, c, g, or t
  misc_feature (314)..(314): n is a, c, g, or t
  misc_feature (322)..(324): n is a, c, g, or t
  misc_feature (330)..(330): n is a, c, g, or t
  misc_feature (333)..(333): n is a, c, g, or t
  misc_feature (343)..(343): n is a, c, g, or t
  misc_feature (353)..(353): n is a, c, g, or t
  misc_feature (359)..(359): n is a, c, g, or t
  misc_feature (373)..(373): n is a, c, g, or t
  misc_feature (378)..(378): n is a, c, g, or t
  misc_feature (380)..(380): n is a, c, g, or t
  misc_feature (422)..(422): n is a, c, g, or t
  misc_feature (427)..(427): n is a, c, g, or t
  misc_feature (495)..(495): n is a, c, g, or t
  misc_feature (512)..(512): n is a, c, g, or t
  misc_feature (515)..(515): n is a, c, g, or t
actaggggnaggggaaagagacatggaactcgagggcagcggtgaagagaccatgcgtgtgctgggagnanccagangnagcnnnngcacaaacnncncaggtacgantctctgtntcttccccggcnttatgtataaatttagagtanttgacgccttctntcccctgctctcccttccnctccgtnctgctcacngnggtnncnnttnntntttncacatnnngngganannntgnnnngttnnnnnnnttttttttnttttnttatttnttccacatncattagnttntngntntttttttttnttttttntttttttnnntgtttnttnggtgcttggnggtccttttncatttnttccaggataaggngcatngntgggtcactcatgatctgctgcacctcagggtcggccatggntcgtngcttcacatcttcggggctgtcgtgccggttgtactgcgccatcatacagcgctggtagccgtctgcngcctccttacagctggngtncaggtctagggccttctggtacacatccatggctttggtgtagtccttcatcgcttccagcgcaggcctttccgtgtataacccttgatgaaggtcggctccagctggatacattcctcacagtccttgagtgccagctggaactccaggagtttggtgtagcaggcagctcgattgctgtatatattggcatctttcgggttccttttgatggcttctgtataatgcttcatggcctgggga

SEQ ID NO: 631601 - DNA, 905 bp, Homo sapiens
agcggctcggggtcccgcacagctgtgaggagccccgaagcacggatgtcgaccggactgaggcagagcgcctctgctctggacctgtccctggactccctcattaccgtcgaacagcggagcgaaaccgagagcgtggagcgggctgggccagattctgacgtaattcaccatggaggccctggtttcttttattggggaacggtattagacacgaacttctgggtgctagtagagatggggtttcgccatgttgcccacgctggtctcgacctcctgacctaaggtgatctgacggcctcagcatccacagtgctgggactacaggtgtgagccatgcacccaaacaagaactactatatttactgttgagtggactgtcatggccagatcctcggaccagtgaagatgacagtttcatggcatgtgggaccacggaacgacaacatgtggctggacagggaccccatggccatccaagatgaggagaccccaccaagtattggaagcgctgaagagagactcgacataataggtcccatgtcgcgagcttgacagaagaggttaggaagatatatccatgttacattactctcaccgatataggaacacaaaaaatgaggacattgatattggaaacaggggtatagcattatcacaggtgttgaccattaggttaatcaggattcaatgaagggtgagcaaggaaggaaaaattaagatgggagagccgacactaatcttatatggaaccaaataatacgagaataggcaaaaggatgtatatgatgaaacacgtagatgtgatgagggcggacagacaagtgaaaaggagtagagactagtaaatgtacataaaaaaaaaggaatgagatggatcggacgagtaacaagagagaagaaaa

SEQ ID NO: 631602 - DNA, 89 bp, Homo sapiens
  misc_feature (10)..(11): n is a, c, g, or t
tttcagattnngttagctttcagaggcatcagggtcgttggggcctgccagtatgtgccagtgagatcgctaccacccctgctctaatc

SEQ ID NO: 631603 - DNA, 103 bp, Homo sapiens
ccccccacactcacacagattcagcgctgtcaccgggcggtgcggtcgttattgccgaggatgatgaggccggtgccggcacctattggtgatattgtggttg

SEQ ID NO: 631604 - DNA, 248 bp, Homo sapiens
tggggagaggcgcgtgactggcggacattcgggcgttacttgttgagttcgcggacgcgctcgatcatttcggcgcctgaaggagatgtacgcctgctgcgccacgcgagtgcgcggtcgtacacctacgccgtggcatgccatacgctggtcgcttcgtgccagaccgctacgttgcgctgccaccactggtcttgaaggaccttgtctgcctaagtgcgattcgcagctgctgcctgacacctggt

SEQ ID NO: 631605 - DNA, 150 bp, Homo sapiens
ggtcatccgggaggacaaccagaccaaccagcctgcaggaggctctaaaccgtcttcaagagcatctggaacaacagaatggctgcagaccatctctgtgagtctgttcctcaacaatgcaagaatctgcatcgctgagaaaagtcttgc

SEQ ID NO: 631606 - DNA, 134 bp, Homo sapiens
ccaggtttccgaatgagccggagctcagcaaacgagccaagtcagtgtctgtggaacttgtatggcagttgttagcctggtgggcccgcctttccttttgcagctcctttcagctcccgctggcctacagcaca

SEQ ID NO: 631607 - DNA, 181 bp, Homo sapiens
tgatctagaggtcccctagctgtttcttattttacaggctcataggtggaagggacttgccttgttcagatgagacttggacttggactttgagttaatgctggaataagtgaggacattgagggactgttgggaaggtatgattggattttgcaatgtgagaaagacataaggtttggga

SEQ ID NO: 631608 - DNA, 496 bp, Homo sapiens
ttaaactgcaggaaattaattctgaagaaggaaaagaaactgacatggtaatttggatagggtgaagctttgaaataaatactgcaccaaaaatgtgaaaaagaatcacgtagtaaatgtatacttagtgttttcttacaatcgtggaaatcagaaatgtttataccggtgtcagatcagaatttttaagagttatctttcagtgaaattttataacaagtttaagtgaatagagaaaaaattctgaactgatcataatgagttaaaagttagcttttcacttatgaatcatgggagtggtaaactgttaacttttgccgtattaggagacttgaaagttattactaatttacaaactttgtaaaagaatgggtgctggtcattttaaaatgggaaagaaaccttttctttttttgaaccatagggacccatattttaaaaaaggcgcttttcttttgtagaaaaaaaaaagttcaaattttaatttagctttggg

SEQ ID NO: 631609 - DNA, 226 bp, Homo sapiens
cgccatttacaactatctcaattttgtaaagtgggccaaggacgagaaattaacgagactctaatgacaggtgaccatactgaaagaggcacagcatggctagtaaccaggaagagggaagattaaaccacagtgtgtaacactgtgttacacacccacataaagggtgtaagttgacagttgcaagttttggtgggggtgccaggaaacaggagctctctggcaa

SEQ ID NO: 631610 - DNA, 558 bp, Homo sapiens
  misc_feature (299)..(299): n is a, c, g, or t
  misc_feature (398)..(398): n is a, c, g, or t
  misc_feature (528)..(528): n is a, c, g, or t
gagggggcctgtggcccagcgtccttggccctccggagatggaaatgggggcagggaccttccttacctttcccaagatttcccggccccccccaattgtttccccccaaaactttttttgggttgggggggttttttttgccccctttttaaaaatttaaaaaccccccctttttttttccaggagttttttttccgggggggttttttttcccccccggggggcgcctcttttttttaaaaaggggggggggggacccccccccccttttttttttataaaaaaaaaaacccgcggnggggagaacgaaagaattttatatttttttttttttttttgaaaaaaaaaaaaaaaataaatttttttttttgtttggggggggggggaggttgttttnttagaagaataatatatcccccccccgggggccgccgggggggggggggggagagggtgttctttttttttttttttttttgggttgcgggccccccccccccctccctactttcttttttttttttttnggatctgatccgttactgagagtacgtctg

SEQ ID NO: 631611 - DNA, 352 bp, Homo sapiens
atagtatagtggcacacaccctaatcccagctactcagagaggctgacgtgagaggattgcctaagcccatcgaggttgaagttctggcttggaagacccttgggcgacaccaccgcactccagtctagaaaacagagcaagaccccatctcaaaaaaaaaaagaaaggaaaaaatacaagatatataaaatttgtcagatgcagctaagatagtgtccatagggcaagttttagatttaaatgcttaaattcaaaaagaaaggtctaaaatcagtgacctaaaggtccacctcaaaaagctggaaaccaaaatgggtgaaagacctaaatgtaaaagttaaaaactctgaa

SEQ ID NO: 631612 - DNA, 167 bp, Homo sapiens
ctgatttgctagattagatatctcagctcctcatagctctgtccatttttgtcttaggtgagcggtgcgtcttcaacgagaatgtacttcagcactctgtgtggcctcatctgccctcagtttggcttcagagaccatcttggagagctgttccacttcagccaggg

SEQ ID NO: 631613 - DNA, 210 bp, Homo sapiens
aattcgcggccgcgtcgacctcgcccttggtggtggcgccttgcatgatgttggtcgccgccggcaataccgtgcccatcggatccgaggggttgctgatccgcccctggcgcgccgtgaagcccaggtcgcccaggccggccgccttgatggcatcgttcagcggagtctcgaccgccttgaccttgtcgttgttccagtcgggctctt

SEQ ID NO: 631614 - DNA, 103 bp, Homo sapiens
gtgacttagaggatcttgggatgaggaacgtcacttcagagaggtttctgggttccggcgacgccctccttcaagcgaggccgcagattcgaaggcgtgcact

SEQ ID NO: 631615 - DNA, 656 bp, Homo sapiens
  misc_feature (129)..(129): n is a, c, g, or t
aggaatacgaaagagtatagaaataagaatgtacataaaactaaaaaatctgcaatattaaataaataatgttatatagagtgtcaaacattaagtcatatgattatatatcgagtagcagcgtgagtntattatagagagatataaagaacactgtcagcttgaaatatagtagagagagttatattaaaaaccagacacaacacgttaaaaagtaaactaccttgaagaggactcacacatgtgtcacaagataccttcaaagcaaaccatagagaattgtgcacgaatcacgaacgaatataattaggcttattagccaacatgtaatcaaaacgtcctggagactcagaaatactccttacacaagaaccagagcctgaatgttatatactatcgttggtagtacaattaaaacaataatgtctagaatcatgtcggataatactaacagatatagacccacacatacaaaatgctaattcactatctagatacataacaaatctaacaacatgactactaaacttaaaatcaatatcttaccataacagtatcactctctatctaaatctctatctctctctctctctctctctctctctctctctctctctctctctctctctctctctctctctctctctctctctctc

SEQ ID NO: 631616 - DNA, 879 bp, Homo sapiens
  misc_feature (18)..(18): n is a, c, g, or t
  misc_feature (25)..(25): n is a, c, g, or t
  misc_feature (41)..(41): n is a, c, g, or t
  misc_feature (84)..(84): n is a, c, g, or t
  misc_feature (265)..(265): n is a, c, g, or t
  misc_feature (290)..(290): n is a, c, g, or t
  misc_feature (304)..(304): n is a, c, g, or t
  misc_feature (339)..(339): n is a, c, g, or t
  misc_feature (352)..(352): n is a, c, g, or t
  misc_feature (358)..(358): n is a, c, g, or t
  misc_feature (428)..(428): n is a, c, g, or t
tatcactggacattcagnaggcaantcaatcttttttattnccttataaaattaactcttcaaaagccgttaaacagagagttntcttaatttttattgcagtaggaggaaatatatttaaaatatttgtagatttatagcaaataaaaactcgttatttaaaggttaaataacaatttgttcttttgttgtttttgccagtttagggcggtggctgcttgtgtcataaatgtcttcctaccacatcaagaatgctgcttttaanatttttgtttataaattgagaaggnattttctctctatnagtttctgtcattggacaggtcaccattaaaaagnatattagaatccngcatgnagataatggctaataaaaatgagggacatactttataaaaccattaatcagatttgaatgaggaatgctncccacaccttgaaagaaaaactgtggcttacgttttgaagtattctgagaatgaagtattaagatccaatttctataagcaagatcagacttgttaagtatgccgcaagtaagagctaattcattcattccatgtgtgccactaaataaagagattgagcaagtgccactgtgtggaacatttttcttttttttaatattggactttccaattttgaaattatggataaagtcctaaattttctatagtggcttcttttctgtctgcatattttgttaaaattgtggatctaaaagccatatcctgtctttggtggtggcctggtaggaatggcttgtcctagttcttcaaaggtaagattgaccaaagcaagttctcattggtggtctgtgtttacatcttccgtgtcaagatattttaaagcatgaaaataaagccattcttgcccttt

SEQ ID NO: 631617 - DNA, 123 bp, Homo sapiens
actgcaggctctgtctcccaggttcaatcgattctcttactcaggctcctgagccgctgggattataggcgccgtaccaccatgcctgacttctatatgtggttatacctctcagtttttcta

SEQ ID NO: 631618 - DNA, 959 bp, Homo sapiens
  misc_feature (18)..(18): n is a, c, g, or t
  misc_feature (25)..(25): n is a, c, g, or t
  misc_feature (41)..(41): n is a, c, g, or t
  misc_feature (84)..(84): n is a, c, g, or t
  misc_feature (265)..(265): n is a, c, g, or t
  misc_feature (290)..(290): n is a, c, g, or t
  misc_feature (304)..(304): n is a, c, g, or t
  misc_feature (339)..(339): n is a, c, g, or t
  misc_feature (352)..(352): n is a, c, g, or t
  misc_feature (358)..(358): n is a, c, g, or t
  misc_feature (428)..(428): n is a, c, g, or t
tatcactggacattcagnaggcaantcaatcttttttattnccttataaaattaactcttcaaaagccgttaaacagagagttntcttaatttttattgcagtaggaggaaatatatttaaaatatttgtagatttatagcaaataaaaactcgttatttaaaggttaaataacaatttgttcttttgttgtttttgccagtttagggcggtggctgcttgtgtcataaatgtcttcctaccacatcaagaatgctgcttttaanatttttgtttataaattgagaaggnattttctctctatnagtttctgtcattggacaggtcaccattaaaaagnatattagaatccngcatgnagataatggctaataaaaatgagggacatactttataaaaccattaatcagatttgaatgaggaatgctncccacaccttgaaagaaaaactgtggcttacgttttgaagtattctgagaatgaagtattaagatccaatttctataagcaagatcagacttgttaagtatgccgcaagtaagagctaattcattcattccatgtgtgccactaaataaagagattgagcaagtgccactgtgtggaacatttttcttttttttaatattggactttccaattttgaaattatggataaagtcctaaattttctatagtggcttcttttctgtctgcatattttgttaaaattgtggatctaaaagccatatcctgtctttggtggtggcctggtaggaatggcttgtcctagttcttcaaaggtaagattgaccaaagcaagttctcattggtggtctgtgtttacatcttccgtgtcaagatattttaaagcatgaaaataaagccattcttgccctttttcgtgtgtttgaaatggtcgcattggtgtcatatttacatgagaaagtatcttacgcaatttaccaaagtagaaatgtt

SEQ ID NO: 631619 - DNA, 460 bp, Homo sapiens
  misc_feature (7)..(7): n is a, c, g, or t
  misc_feature (9)..(9): n is a, c, g, or t
  misc_feature (11)..(11): n is a, c, g, or t
  misc_feature (278)..(278): n is a, c, g, or t
  misc_feature (381)..(381): n is a, c, g, or t
  misc_feature (406)..(406): n is a, c, g, or t
  misc_feature (416)..(416): n is a, c, g, or t
ccgaaancnanacactttaaaaatgatttatgctcgatgcagaatccgcagtggcatgaacgcatcatttccccacacaccctggtgtataccggtttccgttggcatgtccgtgcctattgccatcagagcaagcagtttaaggactttttactctccagaattgatcgcacacctgttgtggtggcgattgatacagtagaccctgttcaggatcaacactggcatgaagaaattctactgacgctgatccctaatccaaaattgaactcatcacnacaagcgctggtcgaaaaagacttcggcatgcctgatggcagattacagattccggtgaaaaagcctggctcactatactttgcagcgatatcagccgcgatnacgctggctgaggcggatgatgccntgaatatccnttggtactacaacgctcagatatcgaaaagccgtcatcttacct

SEQ ID NO: 631620 - DNA, 821 bp, Homo sapiens
  misc_feature (18)..(18): n is a, c, g, or t
  misc_feature (25)..(25): n is a, c, g, or t
  misc_feature (41)..(41): n is a, c, g, or t
  misc_feature (84)..(84): n is a, c, g, or t
  misc_feature (265)..(265): n is a, c, g, or t
  misc_feature (290)..(290): n is a, c, g, or t
  misc_feature (304)..(304): n is a, c, g, or t
  misc_feature (339)..(339): n is a, c, g, or t
  misc_feature (352)..(352): n is a, c, g, or t
  misc_feature (358)..(358): n is a, c, g, or t
  misc_feature (428)..(428): n is a, c, g, or t
tatcactggacattcagnaggcaantcaatcttttttattnccttataaaattaactcttcaaaagccgttaaacagagagttntcttaatttttattgcagtaggaggaaatatatttaaaatatttgtagatttatagcaaataaaaactcgttatttaaaggttaaataacaatttgttcttttgttgtttttgccagtttagggcggtggctgcttgtgtcataaatgtcttcctaccacatcaagaatgctgcttttaanatttttgtttataaattgagaaggnattttctctctatnagtttctgtcattggacaggtcaccattaaaaagnatattagaatccngcatgnagataatggctaataaaaatgagggacatactttataaaaccattaatcagatttgaatgaggaatgctncccacaccttgaaagaaaaactgtggcttacgttttgaagtattctgagaatgaagtattaagatccaatttctataagcaagatcagacttgttaagtatgccgcaagtaagagctaattcattcattccatgtgaatattggactttccaattttgaaattatggataaagtcctaaattttctatagtggcttcttttctgtctgcatattttgttaaaattgtggatctaaaagccatatcctgtctttggtggtggcctggtaggaatggcttgtcctagttcttcaaaggtaagattgaccaaagcaagttctcattggtggtctgtgtttacatcttccgtgtcaagatattttaaagcatgaaaataaagccattcttgcccttt

SEQ ID NO: 631621 - DNA, 98 bp, Homo sapiens
agagaagtcttggagccagagaatctgaggcctccaagtgggagtcctagcccctcccttgatgaaatatacatatactcagttccttgttaaaaaaa

SEQ ID NO: 631622 - DNA, 629 bp, Homo sapiens
  misc_feature (387)..(387): n is a, c, g, or t
tgcccctcatttacataaatattatactaggcatgtaccatctcgacttctaggaatactagtatatcgctcacacctcatatcctccctactattggcctagaagggaataactagctatcggctggttcattatagcgtagctctcataaacccgtcaacacccagctccctcttagtcgcaatatcgtgcctaattgccatactagtcgtatgcgcgccggcgaagacagcggtgggccatagccctagtaggtctcaagtctgccaacacattagtgggccgtcagactcacgtaccataaccgtaaaccatacgtccgagattgcataaaacttaagtgcgtcccgaacaagttatattgactgaccgagtgactagtgacntttccaagaaagaacacataagtctgaatctagaatcaagcagccaacagccgagattattagcatcatccgctctactattatgctagaagcaaagtcaacaagcaagcgtatttagcgtgttccccaaacctgtttcgtccgaacccccttaagataccgcccgtcctaagtacgtaacgtacgctgacgtcctaccccgtcacaaagtcatggtcaagccaaggccactttatccagcg

SEQ ID NO: 631623 - DNA, 359 bp, Homo sapiens
  misc_feature (359)..(359): n is a, c, g, or t
gtggtttgcccttttggcggtgttggcgggccacctatctaccatgttcacattagtgaacaaaagtctttgctctcagagattacatactagacagagtaaacaaataagtgaattatctgtaaattgagcattcctaatttgaaatactccaaaattcaaaacacttctggtcctaatcattttggaggatactcctccatcagtattttagatctagacagttctgttgctgcttgtcctgttttaggaatggaggaaatagcaattctcagagctcctaactagattgtaccattttgacatctgaaggaagatgagatgaatcctccttttgattatttgctagtcatcggtgn

SEQ ID NO: 631624 - DNA, 420 bp, Homo sapiens
gaactcggcgagctccacttcaagaccacatccccatccacagccacgtctactcggccgggatagtggtagtagctcctaactgggctctcggcttccagttatctgcacattcagatgaaccttttatacacataaatcatatcacttttattctcttggagacgaagtctttctctggctcaggctggcgtgccgcggcatgatcccggctcattgcaatctccacctccggggttgaagcgattctcctacctcagtctcctgcgtcagctgggcactacaaggcacacgtcaccacgcctagctaattttggtattttctagtcacgagggggtttcgccatgttggcgaggctggtcttgaactcctgccctaaagcttcccaaagtgcctgcctcagcttcccaacgtgctgg

SEQ ID NO: 631625 - DNA, 159 bp, Homo sapiens
tatcagctcggtcccctaacatcttctccttacacctagcaggtgtctcctcatatctagggccatcaatttcatcacaatcaattatcaatataaaaccccctgctcataacctagttacccaacaccctcttcgtctgatccgtcctaatcacagca

SEQ ID NO: 631626 - DNA, 993 bp, Homo sapiens
  misc_feature (3)..(3): n is a, c, g, or t
  misc_feature (264)..(264): n is a, c, g, or t
  misc_feature (285)..(285): n is a, c, g, or t
  misc_feature (292)..(292): n is a, c, g, or t
  misc_feature (294)..(294): n is a, c, g, or t
  misc_feature (304)..(304): n is a, c, g, or t
  misc_feature (317)..(317): n is a, c, g, or t
  misc_feature (324)..(324): n is a, c, g, or t
  misc_feature (326)..(326): n is a, c, g, or t
  misc_feature (332)..(332): n is a, c, g, or t
  misc_feature (337)..(337): n is a, c, g, or t
  misc_feature (344)..(344): n is a, c, g, or t
  misc_feature (363)..(363): n is a, c, g, or t
  misc_feature (366)..(366): n is a, c, g, or t
  misc_feature (377)..(377): n is a, c, g, or t
  misc_feature (381)..(381): n is a, c, g, or t
  misc_feature (387)..(387): n is a, c, g, or t
  misc_feature (394)..(394): n is a, c, g, or t
  misc_feature (402)..(402): n is a, c, g, or t
  misc_feature (422)..(423): n is a, c, g, or t
  misc_feature (446)..(446): n is a, c, g, or t
  misc_feature (460)..(460): n is a, c, g, or t
  misc_feature (464)..(465): n is a, c, g, or t
  misc_feature (990)..(990): n is a, c, g, or t
gtncggaattcccgggatatatctttggtgacttgtccactccagtgtggcatcatgtggcagctgctcctcccaactgctctgctacttctagtttcagctggcatgcggactgaagatctcccaaaggctgtggtgttcctggagcctcaatggtacagggtgctcgagaaggacagtgtgactctgaagtgccagggagcctactcccctgaggacaattccacacagtggtttcacaatgagagcctcatctcaagccangcctcgagctacttcattganagctgcnanagtcgacganagtgagagagtanaggtgcnanaaaaanctctncaccctnagtgacccggtgcagctanaantccatatcggntggntgttgntccaagnccctcggngggtgttcaaggaggaagannctattcacctgaggtgtaaaaantggaaaaaaaatgntctnnataaggtcacatatttacagaatggcaaaggcaggaagtattttcatcataattctgacttctacattccaaaagccacactcaaagacagcggctcctacttctgcagggggctttttgggagtaaaaatgtgtcttcagagactgtgaacatcaccatcactcaaggtttggcagtgtcaaccatctcatcattctttccacctggagtaacaagtctctttctgcttggtgatggtactcctttttgcagtggacacaggactatatttctctgtgaagacaaacattcgaagctcaacaagagactggaaggaccataaatttaaatggagaaaggaccctcaagacaaatgacccccatcccatgggggtaataagagcagtagcagcagcatctctgaacatttctctggatttgcaacccatcatcctcaggcctctctacaagcagcaggaaacatagaactcagagccagatcccttatccaactctcgacttttccttggtctcagtggaagggnaaa

SEQ ID NO: 631627 - DNA, 883 bp, Homo sapiens
actcgtgcctttggggtcccgcgctggtgggcctttttcggcgtgccgcggggcgcttgggcgcggacggtgtcccgcggccggcccctttttctcgtccggcaggttggaggaccattcttgtccgacggttgaccttcccccctggctggcacaaggggccatttgggtgggaaagggatccttgcctcccggaagaagaatggtgggttcattgacccgcccccgcgaggtgtcccgaacgttccgtgtcttctcctaaggaattatggggtcaccaaatcctctggtattgaagaggtggatattgtttaccaagcccaggagcacgtgatccccgtggagccaccctgaagttccaggcatctttggcagcggacactttcgacccgtacacggccactgctgagacccaacgcaggctgaccgaaatgctccccgcactttgtgaacccgcttggtgcggatagtctgagctagttttacgggggactggccgagctctgccccaaccatctgtgggtggagaaagccccccttgctactggagaggatgatgatgatgaagcttcccgatcttgtggagaattttgatgaggcttcccaggatgagcgccaactgaattgagtccacttctggagataaacctgcagaagtttctgggggctgctattttatattatgactgctttttgagcaatttttgtttatggatctgataaaaatctagatttttaataatttttaagccccagcccccctggaccctgcagcttttttccgtttttgcttatacaccattcattctttgcagctaattaaaccgaagaagcctgggaatcaagtttggaaccaagattaattaagttctttgcctagtta

SEQ ID NO: 631628 - DNA, 117 bp, Homo sapiens
caagctgcggactgggtgtggactgacctccaagctctctgtgactcagttgtggaggacccgccccagtgcacggtcggcgtcaaggtggagaccactgaggacctggtggtatag

SEQ ID NO: 631629 - DNA, 533 bp, Homo sapiens
agctgattctagaggatcaacggcagcatatgacccagaaacctattttccagaacattccagaaggagcaagcagcaggtacagagaggcaagaggcgggggacatcgtggcagaagcagcaggatccctgggtggctggagcagaggtatggagaggaagtgttgcctttgtagaatgttcagaacattcttccaggaaggcagctgagcctgggcagaagtctctgaatttctctttgaccacagcattactccgtcccctcttccacaactttggggcgtggaaactctccttgggaagctcagctaggagtctctttacttgccagccacttccctgagtgtgagtttctgccctaagatgtggacggtgctaaaataaatacatgtgccctcagatctctctcagcacaactcaaggatctactaacagcgtctgcattcaaatagcaacatttccagaaggcgaacgagcctctgcgtgccttgcagagagctgagcgtttgccggccaagccctgctagccttcc

SEQ ID NO: 631630 - DNA, 195 bp, Homo sapiens
cccagcacttcttcgatcacgaccaccgagacccctcacacagtactcccagcttaacttctttgatcaccaccaccaagtccacctcacacagtccttcaagcttcacttctggagatcgccaccatgaggaccacctcacacagtactcccagcttcacttcatcgatcaccagccccgagaccatctcacac

SEQ ID NO: 631631 - DNA, 359 bp, Homo sapiens
tacagagtgaatgtacttttttgttcacggtatagtgcaaatagtttggcgtgcaattattaacaacgtctacttccgaatcttcaattaactcgtctacactcccataaaaattcggaatggaaaactgttctgccattcgtttcgccttttctaatgtgctgccgctgatagcaaccacttcaacgccacttaatcgccttaatgcttctatatgcgattttgctgaaaaaccagtaccaataatccccactttaatcagcgacatatgcttcctcctattttttcaatgtttttcttccaaatgccactgctataataataatgagtccttttacaatcatttgttggctaacatc

SEQ ID NO: 631632 - DNA, 148 bp, Homo sapiens
actgcaggcccagactgggccgagaaaggacatggcacatcactacacgctgacagtctgagatcgtcaggttctatcgcagaggctgcttccgttatatactgattgaactgtgtctccacgtctgtggacaattgagtggtacctt

SEQ ID NO: 631633 - DNA, 448 bp, Homo sapiens
  misc_feature (189)..(189): n is a, c, g, or t
attagaggaggggtggattggcatttagtgggcaaaggccaggggtgctggtaagtaagcatcagataatgtacaagacacgccccacaacagagaatcatccagcctggaatgttaactgtgtcaaggctgaacgatgttctccttgctttgcttcccctatccagtgatagtggagcatgtgagtgnggcagtcatgcaattctcccccctccccccacttttttttaaagatgaagtcttgatttgtcacccaggctggaacaacctccgcctcccgggttcaagtgattcccctgggaggcagaggttgccatgagccgagatcgggccactgcactccagcctgggagacagggcacgactccatctggtgaacatttgctccccttcccttctaactgtctcataaggtttccagtgggaattgcatcttcttggcggccgc

SEQ ID NO: 631634 - DNA, 204 bp, Homo sapiens
gctcagaccctgtaggaaagacctctacctcatctagtgaaagtgctctacttagactaagggggtattttaggttttgctgcactcacggcatgctcgagtaaagcctaatttgcccagatcctcgggtgggggccaaatccttgagccttaatgttctagggaagggaggggggcctcaataatccttcagggtgtagtaga

SEQ ID NO: 631635 - DNA, 987 bp, Homo sapiens
  misc_feature (315)..(315): n is a, c, g, or t
gataagcattaatagactcgctgcgggtcttcagataaccgtgataagagatctgtaagcagcggtaagctagtatagatcatcaggtgcagcaggcttgtgccctaggctgtctagtattcctgacctggcgacgggtgtattatcaagtgtaacgaactacggattgcttccgtgccagtggggacatagacttctccactatgagctggagctagtgctgtgtagcgccttaagcggccatgtagtgatgaggctttcctctcctgctcagtgtcagtgagacccgttaagaggaggctcaggaattgggtnctaagcgcttggcgatgcaaggctggcagggagtcttagcatcgaaaaaccccttcagatagcagcatacgctcaaccacacggggcagggctaggctaccatgtacctcgtcagcgcccggacagtcgagctcagcgcatacgtctatcaggccaaatcttcatgggccatgagtcatctctctacaaatgcttttgaaatctatcctccatagggacttgtctttgacgtaagggcgaccctctctcgacctcttcgactcattacagtatcacaaattccatgcggaacagaggttcccccaatgcaaacgctgacataatgaagaggggtccttccgaggacattcgtcgaaccaaacggtgcccaaatgaacaacgggggacacactcaaacccctacaggcatactgtctaacctgtggaaaccccagactcctacagtgtaatggcgccacaggggaccctcttgaagggcatggtccatcgtttaagaactcagcaagtacacagcaaccaaagaattggggggacagatggggaccacgaacggatcaaaaggccgagcgcagccaaaaggcgaatacacgggcaacaaggacgcagctaacggatccagaggacgcacggcccggggggaaagacgacaagcgagtagcacagcgcatagat

SEQ ID NO: 631636 - DNA, 514 bp, Homo sapiens
  misc_feature (194)..(194): n is a, c, g, or t
  misc_feature (211)..(211): n is a, c, g, or t
  misc_feature (283)..(283): n is a, c, g, or t
aagaaacagctcttatcctgatccaaaatcttgagccacgggactctaaccgaagagaaagaaaatgaatctactgcctcctccgaagctagtccttcagatactagaagacaattatgccctctttatcaaaggccctacttaaaccagttcagtgataatctatcttctatacccgtttttcataaataganccatgtgttgtttcttncataattatagaagtgttcaagagaaacgaagagagtgagtggcaggaccatggtgtgatgcaggaggaagngctcttggctagaatctgctcccaactctccaactaactgtgaatcattgaattgttacttaatgcctctataaaataaaggctcatatgagatgatctctagggtagttccagctctacttaatatttggtttctactatagccagaaaaagagcttaatttcacaaatagctagacttttcccaatgaaataccctaactcttcatcctaagtcctctttttttgaaaa

SEQ ID NO: 631637 - DNA, 144 bp, Homo sapiens
  misc_feature (83)..(83): n is a, c, g, or t
gccgggtggcaacaaactactttttcagagctaaataggaacatgtaattttaaaaagtgattgacagtttgcccaaattaangttggtggggccttatggaaaaaaatttggggctcaaaaaaaaaggcccacccctttgttt

SEQ ID NO: 631638 - DNA, 137 bp, Homo sapiens
aaaaacgacgctatggtgtcagaataaggatattggaagtcctgagaagataatgactcgggaaaaggcacaaggggagctttgggagatgttacaataggttgccatttctattcttagaggctgtggtacagcat

SEQ ID NO: 631639 - DNA, 470 bp, Homo sapiens
gttaatgatctctgccacaaacatgtctcctaattttttctagatttttcttctaattttagtccacttatcttagaaccaattcagtaaagaaccattaactaactactcccatctccttaaagcactacctacactacagtgcagcaagcccagagtcacagctgggagatggcttgaatgtgaaaggccagtaatgacctctgccatcagggagaggacggtggttcatcgtattctcatgcccagttgtgtcatctaggattcctggtaaacctaacctgataaaccatttttagtgacttgactgctgtataaaaactatagtatgattctcaattatatggccatactccatgtttgccctaacccaccttgttttaggagtttagtatttgatacatatagaaaatacgtcataccttttacaaagaataatagtaaacactaataaaaccattggctaaaaa

SEQ ID NO: 631640 - DNA, 258 bp, Homo sapiens
gacattcgtgtgctgcttagtgcaaatatgaccctggacagggctttgtccaccgtgaagccctgcagaaggtgcaatggaggggttctggggccacagaggagagcccacttcccaccaggacccccaacatgaagtctaggcctcaggggctcccgcccttcttcctccagcagcgggaactgccactgctctcccaggccctgttctggaggctaaccttggttcctggagagtgtgcccctccaccctccctcc

SEQ ID NO: 631641 - DNA, 405 bp, Homo sapiens
  misc_feature (1)..(1): n is a, c, g, or t
  misc_feature (385)..(385): n is a, c, g, or t
nagtcttgctctcttgcccaggctggagtgcagtggcatgatcttggctcactgtaacttccgcctcccaggttcgagcaattctcctgtctcagcctcttgagtagctgggattacaggtgcccaccaccatgcccggctaatttttgtatttttagtagagatggggtttcaccatgttgggccaggctggtcttgaactcctgacctcaagtgatccacccgccttggcctcccaaagtgctgggattacaggtgtgagccaccgcgcccagcctaaagtggcaattttgataaaacagtattctagttggaagtatgaaaatcctcaacgcttaaataagattttccacctttggaatttttaaacctttggttttaaggnaattcctttaaaatccagga

SEQ ID NO: 631642 - DNA, 1589 bp, Homo sapiens
cataggagatcacaaatcaacatctcacttccgaaccggggcacagaagacaagcaaacacttacactgacagaactggcagctctcaactatcacgcaacagctactggacagctacaacttactcagcgacacgactatcgcgcgacacttgctgcgcacttctggcctctcagcctgcacggctacgcaagcacccactgactggccacgcacaggctgcactgctgcgccttggcgcaacgacttgacttgacttgactgaaccgaagtgaattgcactttccaacccgtgaaatcccttgcacacaggttccaaggaatgcaactctcctggaaatagggcggaattccaggcacgctccacggaagcaaacacgcaaacgaaaactccctgcccctgcaccaccgaaatcttcccacacggccttgacctggaaggccaaccccctggaacctggaaaggcttggcacgaggcacttcccccctaacacaaaaccaaacacacaatcacgaacttggccacacacacaacgaccacaacctcttaacttaagaccacaattggccacttggattccgctgggtacctgaacacaaccttcccccaaggcctcggggagatcttccaacgtttaccagccattcgcctccaaaaaataaccacgggcccatctaaacgacattccggttctctagataggaagttacctttttcaaacacaccaacggcctttacaaaacgaccaacgattttcaagcttataggaacttacctaaccccaaaaatctattggacccatgccacaaacgtcgttggccgccaaaggaggaacaacccctattgggccgcttacttcaccctcttaccgggcaaaagggacacaaagcccaacggtgaaaaccccccatttattcttgaggcataaaacttttctctacgctgtaggcaaagtatattttatcacacattacacgagcacgacatacaaaggaggaaccaccccccacgatacacccatcagaacaaacaagcagttaacaaacatgtatgaaaccccaatcaagcaggcgtagagagacattggactttacacatgggcccagattgcttagtaccacaaaaccgacatttaggcccccccacaatatggaggacgcgctttaataaccccacacccgttactatacactcaaaactctgagcgcaggcacccaacacctgtggacaacccgcctatacacctttacacgaagccccccaacactgtgctacccaaacacggggctatcacaacacacacggtgaaagggcctaaacacagggctaacagaccataaggggctcaccctactacacccccgctagccttccaccacgcggccaacaccacacctccaccaacacccattaccaccaaagggcgatcaaacgccacaccacactaagcaccatctcaccaccagtacacacgcacccagaccccttcataactttccaccatcggcgcccacaacttctccaaaaccttcaccgacaaacaacccacccccctatacccttttaaaacaagtctatcacaaaccc

SEQ ID NO: 631643 - DNA, 416 bp, Homo sapiens
  misc_feature (87)..(87): n is a, c, g, or t
  misc_feature (147)..(147): n is a, c, g, or t
  misc_feature (152)..(152): n is a, c, g, or t
  misc_feature (182)..(182): n is a, c, g, or t
  misc_feature (185)..(185): n is a, c, g, or t
  misc_feature (200)..(200): n is a, c, g, or t
  misc_feature (203)..(203): n is a, c, g, or t
  misc_feature (349)..(349): n is a, c, g, or t
gaacatcaaggacatcaccagcagcatccacttcgaggcgtaccgtgtgaagcgcctcaacgagggcagcagcgccatggccaacgngtggaggagaaggagccagaagccccggagatgtagacgccgcccttttctttcccgggntcctncccccaagtcatttccctttctccctccangcnctcccatcaccccantanattgaatatgattttctccatttgtcatcgttccccaccccttcgacatgctgccaggaaacaagggaaggggcctccctccgagtgagtcagtgatgaggccgcggctccccgaggttgtggggaggctgcactggagccacagnaaggggtgagagcacccactgaaattgacatgaccctctgtccccaggcctggctccccgagggctc

SEQ ID NO: 631644 - DNA, 152 bp, Homo sapiens
ccaggctggtcttgaactcctgacctcaaatgatccacctgccacggctcccaaagtgctgggattacaagcaggagccactgtgcctggcctagtttggcggtttaaaagcagattttctgatttcttccaaagaggatgttttaaaatcg

SEQ ID NO: 631645 - DNA, 1745 bp, Homo sapiens
gtcctgtggtggaagaaaaatccacagtcaagaacgaggggaggttccagatggaaaacacagatgacctgataaccgctgtatcatcatggacgtacagaaacaagatggtggactttataccctgagtttaggggaatgaattcggatctgactctgccactgtcggaatatacgatattcgatccatattaagagggcctgtgcccttgatactctacactcattcttaactttgtcgcaaacgtgttcacgcgggactaatctgtctgaagctgtaaatattgtagagaggaacggaataagagtagctgtcagtatcaacctagaatgagtcaacgttcacggaatattcatttcaatactttacataatggttgaccgtaagtaataataatacagtcttgcgagtgacatgtacatacggtatatagccggattaacggttatcaagtgtggtaccatcttatttcatgacatgtacaacgtaagtatgaactaacgtgggcgaggagaaagttcttatggaacgaatacctggtcaacgtgtatcacccttggggctcaagcatacggtgacgtctacgcatgctcagggggtggaaaaaaatcccccttgaagaagttctgggccagccaaagagagggggggggcacaacgggaggggccacaacaacggaggtcgcaactgtggacggggcgcgtgggatacccccgtcacacctacggccacacgcgcgagaccaccatacagcaacacacaggaggacagcatgcgagcaaaacacacagccaactaatatacatcctaccttccttcttgtttctattcttggtatatttattaagtttctacgtacctcccaactccacaacctaccacaccaaccacacaccccatcaccacacccatcacaccccccaacaacccacacatacacaccatcaccgctagtccacactagaccaccatccaaccacacctcactaaccacctccacctacacgcctatacccactacccccagctatcaaccgcaccaccatcccacacaccacacccgagcacacagtatacagcaggtccaaagggactgtcaactatgagaaggcgatgagcacagcacgcaaagctcacagacgctagagactaggacaaaagcagcagccacagaggcatcgagggcgagggtgaagtcgtagagaatcagaacgcataagcagagcgatcgaaacggtaacagccaacagacggacagataacaacaggataagacagaggaaacggaagacgcagcgcatgaggaacgggagaggagacgcgacacacacatgcaggacaagagactgcagacaaccagagagaatcacacactagcagagatagcagcagacgaggagctataatgatgacgcagtctaagggaggagtactggtgaaccgacaacgagacaagacgcagcgtcgaggcagcggagcggaggggtacgcgtgaacgggagacgagggaagaggctatacaagaagtaaagatacaacggaaacacaagcgacagagaagcagcacagaagtggaagacggagagcgcaagcagagatgctaggacgagcccacaggggacaagcggcagtgagcaggcgacacgcgagagagcagatgagtcggagatcaggcagaggaaggagtgcaggggagggacaaggagagtgagggagaaaaacagaaaacggaacgtcaggaac

SEQ ID NO: 631646 - DNA, 299 bp, Homo sapiens
  misc_feature (44)..(44): n is a, c, g, or t
  misc_feature (47)..(47): n is a, c, g, or t
  misc_feature (50)..(50): n is a, c, g, or t
  misc_feature (107)..(107): n is a, c, g, or t
  misc_feature (110)..(110): n is a, c, g, or t
  misc_feature (241)..(241): n is a, c, g, or t
  misc_feature (274)..(274): n is a, c, g, or t
gggactacccgtgcatgacaccctatctggcccttgttttttgntgntgntgttgttctttcttttttcacgtggtttcgcacttgtcacccaggctggagtgcggnggngtgttgtcggctcactgccctgtctctcgggttggagtgattctcgtgtctcagtcttccgggtggctgggattgcgggcgtgtgccaccacgcctggctgatttttgtatttttagtagggacggggctncgctatgttggcaggctggctcgatttcctganctcgggtgatctgccccctcggcct

SEQ ID NO: 631647 - DNA, 154 bp, Homo sapiens
taattccgtgaactatatattcagaacatattattagtaaatgagcataaccccttctttgatttgaaaagtcacctgcaaaccttgtcagacacatgaacttgtgcttgtgtgtcagggccccagctaccctgcaggaatgtggaggggtggc

SEQ ID NO: 631648 - DNA, 823 bp, Homo sapiens
cagacactaatagagctcctcagaatagctcgtcctgttttccaaacatcatactgaaatatcagtgtcaactaatgagcaggcaattgctgtagcagaatgcggttactaggccgctatgtgctagccaactctatttctacgaagatcaggaaaatatttgtaacttcacatcgaatgagaaatccagggtaggttgatgaagcagcccttatcctgagtgctaaatcctgaagaagtttctccagaaagttcaggaaatagtgacatcaggtagtagacaagaaggatgcataggccagattttccaaacgagaagagtatacgtgtggaaaagatctctagggccaatgattgtaactcaagaaacctcttgagaatatggaagaagcacaggcagtgacaatatgaacggattacgtaagctctgggcacatcactatacacttcaggtgagaaggaactctgacagctctgcttctactagatcttcctgttgaggaaaagtccagcgtcaaggccacgaatcttgttttcaaaatataccaactctaaaataccttatttgccttgttgttctgatatgtcttataaactgttctaccattatgagcttaaatgaattggcttgacatttctacggtttgtcattggtcctgggtatcctggggaaccacaggctggacaaacaagagtcctggtctagaaagagttacctcccgggaaaaatcttctcttttaaaaaaagctaattaaacccccaaattgggtgggggcaggggcattccatggggccaaaaccccggaggccccgaagagacta

SEQ ID NO: 631649 - DNA, 453 bp, Homo sapiens
actggggccagtggaagatgcttgatatgtatttgcttaatgaatacacgggttaaggaaggaaaagctgctaaacaggagctaagttcaaggggtccagccagagtctggctcttcagggagcattcttactggactgagctgataaacagggcagggacgcctacctgggcaacagcagtgccctgtggaaagtatgcagctgcagagttagcagagaaccatggttgtgggtcttgggcctgtttccccatctgtcaaatgaggttagtgctttgccacctctgtctctgaagtcagctccagatgatatcgtgctttgaaatattaagccacgtgcgagcgtgaggggctgtcacgctccaggaggtcctcatgcgagcccaggagcacctccctgtaacactgggaactgtcagcacctccctgtaacactgggacctgtgagcttca

SEQ ID NO: 631650 - DNA, 270 bp, Homo sapiens
  misc_feature (254)..(255): n is a, c, g, or t
cggtccggtcccatgcacagttcagtgctccattacaaacggatccccgggtctgggtctgcgaccgggacaatgactgtgtggatggcagtgatgagcccgccaactgcacccagatgacctgtggtgtggacgagttccgctgcaaggattcgggccgctgcatcccagcgcgttggaagtgtgacggagaggatgactgtggggatggctcggatgagcccaagggaagagtgtgatgaacgcacctgtgnnagccataccagttcc

SEQ ID NO: 631651 - DNA, 140 bp, Homo sapiens
gcggccgcctactactactactgctcgaattcaagcttctaacgatgtacggggacatgggaaaaaaaaaaatcctgtcttgttcataaattgacaatgtcaataaattgaaatatggttcactgtcaaaaaaagaaaaa

SEQ ID NO: 631652 - DNA, 376 bp, Homo sapiens
  misc_feature (77)..(77): n is a, c, g, or t
gacagcattcggctcggatgctcctccgggccttagctggctcgcgctctctctcttttgcctggggctatccagcngactccaaagattcaggtttactcacgtatccagcagagaatggaagtcaaatttcctgaattgctatggctgggttatccatccgacattgaagtgctactgagaatggagagagaattgaaaagtgggcattcagactttctttcagcaaggctggctttctatctttgactacactgatacccccactggggatcggcatgtagcagcatatggggttgaagatgccgatttgattggagaattcaattctgttgctgcttttaaattgaatgcctaacacttaccttatgccaca

SEQ ID NO: 631653 - DNA, 963 bp, Homo sapiens
gactcccggcgaagacagctgacgcgcgatatggatgcgcactcctatactgactgctttggtgccggggtggtgaagccggagtaatagttaggccgtttgcgtacctttggagcattatctataattcggaaggatagccctgaggaggaaacatgcatcgcgcgtaggccgggtgtgcagtcgcagggttgcaagcaaccggttggactggaagacttttgacggctggggcgtctcaaagttgtagtctaccggacgatcgaagttttaaggtgaatcgtgtggtcagacccattattctcgaggagcgtacataggtaccccaagatggcactcgagggttcgggacatatgtcgagatttggatgagttggactgagtggtggggggtgcctattgggtggagaaaagaattgggggacaaaaacttgagggtggtgagtcactgggtggggagaatgaacctctgtggcaagataccaacgttccgtagttgttgacttctagaacaaatagccagagggggttagggtggctaggatgaagggggtatcttgatggcacgttgaatgagcaagtatatcgtaaagcgaagggatttaacctgttgaagtaaggggaatatgggtggggcagtctgaagtgcaaaaacagttgacgccaaggcaggggagacaaaaggtataaagtgggcatccgggtgggtacaggagtggtctcctaccagaagacattctttggattcgacgtacgtaacggtccgggcaactcgctgggacctgcgcaagaacgactgtggcctgtcgaaggagtttgtcatgggatcaccatgtccggacggaatggtggggggagtccagaatcccctcggtcacccgggcactccacggggggggggggaacaaaccactcggattggattccgacctggggaaacatgtggcggggggacggtccaac

SEQ ID NO: 631654 - DNA, 384 bp, Homo sapiens
tatgatacatacataacacatgtttttatccatggaaaaatccaatccaagttcatccatccaatgaacatgagagtgtagatatctctttaagatactgatttccgtgacttcagagctatactcagacttgggattgctggattatatagaagttttatttttagttttgtaaggaacctccataccgttttctatagtagctataccaatttacattcccaccaaaaatttgagacagttttcatttatccacatttttgccaacgcttggtatcttttgatattttttattagagacatcctaacagatgtgagattatctctcattgtggttttgatttgcatttccctgatggttagtgatgtttagtaccctttcct

SEQ ID NO: 631655 - DNA, 529 bp, Homo sapiens
  misc_feature (34)..(34): n is a, c, g, or t
ccacgcgtccggttatctaaatcacattttgtanaagcagttagatgtagtaagtctcttaaaactatattaactcactagaaacagccaagttatcaaaacagaatatatgtaatggaaattaccatttttttcaactataactaagttacttttattttaaaccaaaagtaacttagttatagttgaaaaaaaagagtttccctcacagaaaaagcatgtttatctgtaaaactgttagctgagcaaaataactagtgttgccagataaaagcaagctaccgataggggtatataaaataggacatcagaaatgccattgcaatattttatcaattctgtgatgcatgtaattttacattaagttatgtaaaattaagtgatgctatagttaaattgacagcattttttttcctagtggtaaatgaggtatgtcttgtaatgaatagtatcttagattttatgaaacacaatattactgaatttagactggaaacgtgttttaatctcctaaagttattacaaaaaa

SEQ ID NO: 631656 - DNA, 176 bp, Homo sapiens
tggtgatgctcccatctccacgagaagtataagaattagcatgggctatggtaactggtgcctgtagtcccagctacattgggaggctgagatggaaggatcacttgagactgggaggtcaaggatgcagtgagccaagattgcgccactgcactccagcctgggcgacagagcaa

SEQ ID NO: 631657 - DNA, 440 bp, Homo sapiens
attgccctaatgatgaaaataatttctaggacaaaagagtgtgtacattccaaagcagatgttctctattgcatctctggctggcctcaaactcaccctgtagtctatgttggccttgaacttgaatcctcttgtctcagcctcctgatgctggaattacaggcctggctgtagagtaaaatttcatcactaaattggatgaaggcgacaaggcacacacacatgactgttctgtcctgggctcctcagactgttactgaggtttgtgcttgaggtttgttttttgtttgtttgtttgctttgacatatttcaacaacacatgccaaggcaacttgcttcccatgggttaaagcttttccttccacagggtcttgtgtgaggacagcttcggtatcatcctcgtcgacgcggccgcgaatttagtagtagtagtaggcgg

SEQ ID NO: 631658 - DNA, 300 bp, Homo sapiens
gacacttctggagtcagctccctgccacaggaccaccgttggtgcatcagttgtaccaagcaccttaagctaaagctggattcgctctagcatccctcctctcctgggtccacttggccgtcttcttcccaccgatcggtgttccccacatcttgggcgcttttgggttggaaaccaccccacacttggaatagccaccttgcccttgtagattccatccgcccattccgtccattcatacattcctccctcggtgcactgaacttaagagcagtttccatttctgccccgcccatattt

SEQ ID NO: 631659 - DNA, 388 bp, Homo sapiens
  misc_feature (58)..(58): n is a, c, g, or t
  misc_feature (86)..(86): n is a, c, g, or t
  misc_feature (245)..(245): n is a, c, g, or t
  misc_feature (284)..(284): n is a, c, g, or t
  misc_feature (308)..(308): n is a, c, g, or t
  misc_feature (347)..(347): n is a, c, g, or t
ggtgggcagcttctctctgcagctgctctcccatcatctggctgaatatggggctttnatgggcctcaggggaggaagtgtgtgcnaaatggtccgtgggcaaacatgggcgggcctggaaaaggcaccacaagttcccaccccagtcagtaggatcagcagtctgacacccaggcttcaggccctccccgacttgaaggtggtgcttcaccaaggactcacccactcctgcccaggagcttgtntgcctcctgctgccatttatggtgcccaggctgtttgtnccaaggagtgtctgtgggccagcnctgagctgccctcagcacccccttggcctcttttctgtnctcattggtgcccaaagtccgcagcaggctgaagtggcagg

SEQ ID NO: 631660 - DNA, 236 bp, Homo sapiens
tacacaggacaaattatagaagaagataaaatgtattacataagcaccatacacagtgaaatcatgcttatattacaaaaaataagtgaagctatgtttggaccttatttccttgcaagagcagtaccatatccttagtaaacaactaccatatttacaagttaattacgttaatacttagcatagaattgaaagccagaagaaatcatggaaaagtgagctttgaaataatcttt

SEQ ID NO: 631661 - DNA, 1991 bp, Homo sapiens
  misc_feature (238)..(238): n is a, c, g, or t
  misc_feature (510)..(510): n is a, c, g, or t
  misc_feature (1142)..(1142): n is a, c, g, or t
  misc_feature (1482)..(1482): n is a, c, g, or t
gtactagtcatttgtgtactcgtacgagctatgatgttgcttgataacagcgcaagtagtggtgtgctgcagtaccacgtaacgtacaaggaaacgaatgaaagaagacatcaatgaacgtacatagttactagtggacttggcgggccttttacgtatcatggaaggtggactccgtgtgacgagagtaatctatctcagacgagacgacgacttggtcatacttctatcatggggnactactctcgcccacgcactcctggctcctgtactcatgggtcgtaggcccgtaccttgcgcgcttcacgcatacgtgcctccacacgtcccacaagcgttttcaaccgctctcaatcaataatcatgtggaatatacagatcgtttcccgtctctgcttgcgtttgcgtcgctggaaaacaactgccactctagtgtctccaagtaaatcgcgagtttgcaacaagtttgagttacgctggagatcttcgtctcattcaactgttgttttntttaaccacaaacggtcttttgaaacaggtataataggccttgcggaacaatgctcactgtgccacgaacctcaagttgttggctatggatgttgaacgtcgcacgaccttgagaggtggtcccacacatggtgcgcgttgcatactgtgaaatgacgctcactgtgaagaattccctcttacgtgggtcgtttgcgcatggaagggaactctcacgaacaatgagcgatcacaattttcctataatgcgctacggtgtttcataaccttttgcaaaatataggcataacaccgatattgccccgaatttacacagacgtgcactccacactgggagtattgccaaacaaatacaactttgggtactaacccacaacaaggtgcgcggtacttacaacccttatagtaccccgaaccgctcccagagcggcaagcacaccacggggggggtacggcatttggcatgttacggagagcggttcgttctaattcagtgccaaggagggcagtagaggtgttaagccccagctgtcgcgctttcctgtagggaaattaggttggcccccaaaaaaaaggattgtaacgaggccctgacaagacactcacagttgtggagggggtgttgcacttcntttcgaccacacggtgtgtcaactgtcttttgggcaacatataagagagcttcccatattaaacattttcctcgcatttttctattttctaacccttggtatagacacaccaggctctccagttactatcaatctggtgtcaacataagttatccggcgtcaacagggagttgttcaaacaccgaatctaaagtaaaaaactacaacggggtggacagggggacctctaacaaaaagagccgttacttaaatattccaattgggagtcgccactattggttacaagcgtgacagcacgaccgtgtggccaaaacgtatcttttcaaaagaacgcgcgttngcagccaatatgcccttcgtaaagccttatgggggagacaaccacagtgactatccttgcccagacaccctgtaatatataccaacagggcgggcgacaagcctctgtggaagagccgcaccgattatagaccacaccggcgagttgataccagcacgagattaccagcagggtgcagccgggagaaacacaccactcagacagtgcgtgcgtctagttacacaacacaaacaccccacgccagctaatctactgcgcacggagcccacaacaccaagagaagcaccctcagtcgcgcaaccatccgtgtcgtaggcactcacaccacgcctcggtgcagctgagccgagactaaaagtactacgtgactgacgtagcagtaccccatactacacagaacactgacccatacagccgaaccgacaaaacacaacactaagatatcgtagctgcaagtcgagagagcgatcaccgccgatccagagaccagagaagaaggggagaggggc

SEQ ID NO: 631662 - DNA, 392 bp, Homo sapiens
ggtcaggaacgattaactcactcacgctttgtagcttcagctgcctgcactgtggctcggtatgtaatagttgagtataagaatggatgggaaagaaaggagtatgagaataagctgattgcatatttcaccgctttatgttttaaacttaggtcagctctggatctgtctctgtttttagtgtttctggttataaacaaagagatgggccaagtggtgagtaaactgagaacttatgttccatacctattgggcaggatactagtattcaatactgcacagggtcataacttggcgtgcatattcattttgttacacatttctatttgattattaccagagtttacatttaatgtgggaagaattatcttattaagcacgtctgttcaatt

SEQ ID NO: 631663 - DNA, 605 bp, Homo sapiens
  misc_feature (33)..(33): n is a, c, g, or t
  misc_feature (126)..(126): n is a, c, g, or t
  misc_feature (189)..(189): n is a, c, g, or t
  misc_feature (194)..(194): n is a, c, g, or t
  misc_feature (240)..(240): n is a, c, g, or t
  misc_feature (272)..(272): n is a, c, g, or t
  misc_feature (292)..(292): n is a, c, g, or t
  misc_feature (319)..(319): n is a, c, g, or t
  misc_feature (339)..(339): n is a, c, g, or t
  misc_feature (342)..(343): n is a, c, g, or t
  misc_feature (349)..(349): n is a, c, g, or t
  misc_feature (393)..(393): n is a, c, g, or t
  misc_feature (398)..(398): n is a, c, g, or t
  misc_feature (404)..(404): n is a, c, g, or t
  misc_feature (412)..(412): n is a, c, g, or t
  misc_feature (428)..(429): n is a, c, g, or t
  misc_feature (433)..(433): n is a, c, g, or t
  misc_feature (435)..(435): n is a, c, g, or t
  misc_feature (451)..(451): n is a, c, g, or t
  misc_feature (494)..(494): n is a, c, g, or t
  misc_feature (497)..(497): n is a, c, g, or t
  misc_feature (500)..(500): n is a, c, g, or t
  misc_feature (509)..(510): n is a, c, g, or t
  misc_feature (512)..(512): n is a, c, g, or t
  misc_feature (516)..(517): n is a, c, g, or t
  misc_feature (532)..(532): n is a, c, g, or t
  misc_feature (574)..(574): n is a, c, g, or t
gaattctatttcaattaacaaccaaggcaagtnaagcactttacctaacttcagaaataccaccagaaaccattccacttctgtaacagcttcttcccctcactccagcacaaatatttaaatgcngtccttaccttagtccacaaaagcaaaacatgaattacaaagctaagattaaattagaaagcngccgncttaaatatgacaaagtttttttagccttaaaataagaactaagtnaaatacattcaacaaaagtaactcttaaaggnaaatttttttcttatttggngttttcttcccttcccatttaaatttnagactcaatttttaataatnttnntatgtncatttttctaaataatatatcctctttaaaacaatacagaatgnctagnggtgcnacctatgngtccacataaatatgnnaccngncacataaataaaatangggggtttttcggtctttttttccggcatttgtcactgccaanccngcnggccccccnncnaggnntattttggggggggnggggggggggggggggggggggggggggttcactgtgtgggntccgtctttatgggtgtcctaaaaagtagtg

SEQ ID NO: 631664 - DNA, 1169 bp, Homo sapiens
ggtgaaggtctctctgtctgtcgggcgtctttttcctaccaagggtctcacatcctcgtgtgtttctggcccgcccccctgggtcgcccggcgccccgttgtacttttgggcgggggcgttcacccgtatagggaccccccgtccccggggtgctcgtctggcgggcgtttttgttttcccggcacatcgtacaaattgccgcgtgttgatctgccggccccttttgcgcccccccccggggcccccggttctttgtgttgcccccccccctgtcattgtgccgggcctctctccggcggtttttccacgaccagccgtccgggtctacccgggctttccccgccgatttcccagggtcccccgcccgaggcggaggggtgagccccggattccctggaatggggagtgcccatttccccagtttcccccggtattttggggaacactctgtccccacggggctaccgcccccttgatggggaattgaaagaattgcgaaggccccttgggcacaggccacaaacccgccccatgggccccccccccccccccgccccggagtgtgtgcacaacgcgcggggagcccccctgacctccttgggggaacttatatgaggctctcttttccttgggagaggctcgttggaacgccacaaaacacccgctggcacaggaggttttccctcgaaaagctcgggcttttaggttcacaagcctcggtgccacagaagtttccccctcgctggagcttccactcacccaccacactccccccacgcctttcaccctcggaccctgaaggaccctctttgagccacaactgccctcgtcactttcctaaccttacccttagagtccctcccccccatgcacggccacctttctcctccctcctctctaaatagtagtcccctctcctcccttctaaagagccaccatatccttaccccatatagtctccagaaaattgtttttaagccaccagcccccaaatagctggctgccccccagccccagaaccattggggcccccctacctgcctggccctggctgatgggcacctctgttggttcccatcagacccgagctctgcccaaggcccccccagatccctctccccggaggaccctagaggccaattaaatgatgtccctgttcccttggcca

SEQ ID NO: 631665 - DNA, 915 bp, Homo sapiens
tttacacttatagtagactttatttagtgaatccaaatgacatgtgataattgtttggaaaggcctattgattttatatctgatcattcaatccagagacattaaattcagttgattaatggagttccccaactgtaagacttctttacgagattattttcaagctttgaaaagatcttctgagataaaggggatcagcaaacagtaagagtgtgttgctatacccaagcaaaagaaataaatcttaatctctcagcaaatcattcaaaatgtcagaaatgttagtgtttctatatcttggtaaaatggattgattgagaagtatgaaaagtataacagtggcatgcagaatattgtttttatgaatattcagaatttcagttgtttacataattatgtatctttatagtaaacgtaaccacatttacttgtgctgtgctttagagaacagctgatgttccctttccactttgttgaccggctgggaaagcacgacgtgacctgcacagtctcagggggcgggaggtcagcgcaggctggagcaatacgactggcaatggcaaaagccttgtgcagctttgtcaccgaggacgaggtcgagtggatgagacaaggtatgagtctaggtgggacgggcatggtggcccaatactggctatacatgttcatctgcttcttgtcctagtgccttagactactgctttagaagttggaataaattggggaagtttgagctgaagaccatcttcgcactttacagtaagtttttcttctctgcctcttgtctccattaaaactctgtcctcttcatctgggcctcaggaaccccgagctcatgggaaaagtcttgaggatctccccatcaggaaggtcacggagggactgcaggagcagggagttgctagaaggaagatg

SEQ ID NO: 631666 - DNA, 572 bp, Homo sapiens
ccaaaagggagccatgattcttataatttaagggaagcaggtttaaataatgtaacttgtgtttgtctcagaggttggaaaaatatcctgaaagagtggaagcaaactgccatcatgaggttgatactgggctggtaaattattactggtctggttgctttcctctagttttttttctcagacaacagtacctataaatttatgaacctgcttttcttctgggcagcatgcatattaatggttcctaaaggcttctctttttatgctgcagctggactacttactactgatccacgtgtgagggaacggaagaagccaggccaagagggagcccgcagaaagtttacgtggaagaaacgctaagggtttgctcccaggaaaggagaggaagagctatatatatgtgccgacatgtggcagacacacagtaaataatggctgaccagcatgagggcagtactgtcagaaatttctttgagctgtgagatggatttatttttaaatgctactttgtaaaggtgacctttaaaaaataaaaggaaaataaagaatgttagtttcaaaaaaaaaaa

SEQ ID NO: 631667 - DNA, 627 bp, Homo sapiens
tggctactttttatttgtttccttggaagcatttgttcaaaaagacagtatagatttatgagttttttgtggttgtaggagttatgtcatccctacatcgtattgttataaattccgatttgctatggcttttgaaagtcatcttttgcccatctgcttgtgattattttactagtgtggtatgaagaatagcacttgaatgtcctgtccatacctgtctctctcagggggcgggaggtcagcgcaggctggagcaatacgactggcaatggcaaaagccttgtgcagctttgtcaccgaggacgaggtcgagtggatgagacaagctggactacttactactgatccacgtgtgagggaacggaagaagccaggccaagagggagcccgcagaaagtttacgtggaagaaacgctaagggtttgctcccaggaaaggagaggaagagctatatatatgtgccgacatgtggcagacacacagtaaataatggctgaccagcatgagggcagtactgtcagaaatttctttgagctgtgagatggatttatttttaaatgctactttgtaaaggtgacctttaaaaaataaaaggaaaataaagaatgttagtttcaaaaaaaaaaa

SEQ ID NO: 631668 - DNA, 156 bp, Homo sapiens
tagtcaggctcggcccttattctggcagcagtctacagagacagctgccagatgaagccagttttattaacgtagatggaaatttttacatttcttcacgttttccatagtttccgtggcagctgaggaagtggtggtcgcaactggtacggcggg

SEQ ID NO: 631669 - DNA, 99 bp, Homo sapiens
tataacggctgtcgagaagacgacagaaggggaattggaaaagcgcagaagaacccttttggagcaactggatgatgatcaataaattataccaaattc

SEQ ID NO: 631670 - DNA, 1094 bp, Homo sapiens
acctcctaccccacgaggaaagagacatttagccaacatgatgggagaagatccagaaactttcactcaagaagatattgacagagctattgcttaccttttcccaagtggtttgtttgagaaacgagccaggccagtaatgaagcatcctgaacagatttttccaagacaaagagaatgcatgatgtatatggaatgttactcaatttagaaaaacatcaaagtcacttgcaagccaaaagtctgctcccagaaaaaactgtaaccagagacgtgattggcagcagatggctgattaaggaggaactagaagaaatgttagtggaaaaactgtcagatctagattatatgcagttcattcggctgctagaaaagttattgacatcgcagtgtggtgctgctgaggaagaatttgtgcagaggtttcgaagaagtgtaactcttgaatcaaaaaaacagctgattgaacctgtacagtatgatgagcaaggaatggcctttagcaaaagcgaaggtaaaagaaagactgcaaaagcagaagcaattgtttataaacatggaagtggaagaataaaagtaaatggaattgattaccagctttacttcccgatcacacaggacagagaacagctgatgttccctttccactttgttgaccggctgggaaagcacgacgtgacctgcacagtctcagggggcgggaggtcagcgcaggctggagcaatacgactggcaatggcaaaagccttgtgcagctttgtcaccgaggacgaggtcgagtggatgagacaagctggactacttactactgatccacgtgtgagggaacggaagaagccaggccaagagggagcccgcagaaagtttacgtggaagaaacgctaagggtttgctcccaggaaaggagaggaagagctatatatatgtgccgacatgtggcagacacacagtaaataatggctgaccagcatgagggcagtactgtcagaaatttctttgagctgtgagatggatttatttttaaatgctactttgtaaaggtgacctttaaaaaataaaaggaaaataaagaatgttagtttcaaaaaaaaaaa

SEQ ID NO: 631671 - DNA, 593 bp, Homo sapiens
gagtgatcgctaagagatttgaacacgaagtagcaattggattataccaaggaattactgttaatttgcttagatgtgatacagccctgtgtgaaatcagttgtccattaaaagagatgcagataagtttctgagatttgctttaaaatacttaagcatatacacacccaacactggagcacccagattcataaaacaagttattctcggcttacaagaagacttagccacacaataatagtgggggacctcaggctgggtgcggtggctcatgcctgtaataccagtagtttgggaggccgaggtgggtggatcacttgaggtcaggagttcaagatcagcctgaccaacgtggtaaaaccctgtctccactaaaaatacaaaaccagcttggtgtggtggtgcatgcctgtaatcccagctgctgggcaggctgaggcaggagaatcgcttgaacccaggaggcacagattgcagtctttttttttttttaagtgggtaatccccttatggagcggactcaaataggtggctgtgattaaatgtcccaagcaaggatagggaaggggaatggttgagcctctggagatcat

SEQ ID NO: 631672 - DNA, 1167 bp, Homo sapiens
acctcctaccccacgaggaaagagacatttagccaacatgatgggagaagatccagaaactttcactcaagaagatattgacagagctattgcttaccttttcccaagtggtttgtttgagaaacgagccaggccagtaatgaagcatcctgaacagatttttccaagacaaagagcaatccagtggggagaagatggccgtccatttcactatctcttctatactggcaaacagtcatactattcattaatgcatgatgtatatggaatgttactcaatttagaaaaacatcaaagtcacttgcaagccaaaagtctgctcccagaaaaaactgtaaccagagacgtgattggcagcagatggctgattaaggaggaactagaagaaatgttagtggaaaaactgtcagatctagattatatgcagttcattcggctgctagaaaagttattgacatcgcagtgtggtgctgctgaggaagaatttgtgcagaggtttcgaagaagtgtaactcttgaatcaaaaaaacagctgattgaacctgtacagtatgatgagcaaggaatggcctttagcaaaagcgaaggtaaaagaaagactgcaaaagcagaagcaattgtttataaacatggaagtggaagaataaaagtaaatggaattgattaccagctttacttcccgatcacacaggacagagaacagctgatgttccctttccactttgttgaccggctgggaaagcacgacgtgacctgcacagtctcagggggcgggaggtcagcgcaggctggagcaatacgactggcaatggcaaaagccttgtgcagctttgtcaccgaggacgaggtcgagtggatgagacaagctggactacttactactgatccacgtgtgagggaacggaagaagccaggccaagagggagcccgcagaaagtttacgtggaagaaacgctaagggtttgctcccaggaaaggagaggaagagctatatatatgtgccgacatgtggcagacacacagtaaataatggctgaccagcatgagggcagtactgtcagaaatttctttgagctgtgagatggatttatttttaaatgctactttgtaaaggtgacctttaaaaaataaaaggaaaataaagaatgttagtttcaaaaaaaaaaa

SEQ ID NO: 631673 - DNA, 1053 bp, Homo sapiens
ggttatgtaagaactgtttgtaggtgaataaatgccactgtaataaactgatactagggaatggatttgtctttgacgataatctctttgtttctggcagaaaagatttgggcactaagaaacgccaggataagtgatgcatctgcatgctggtttaaaaagcagcgtgaaagatgcagaagtgtcatcctgtcaatactcatcaggtaaagcaacattggaaagatcaagtactcaaacaatagacaaaagttagcaaatgcaagtacacttgcaccttctaatgaatttttattgtctgcagtatatgcagttcattcggctgctagaaaagttattgacatcgcagtgtggtgctgctgaggaagaatttgtgcagaggtttcgaagaagtgtaactcttgaatcaaaaaaacagctgattgaacctgtacagtatgatgagcaaggaatggcctttagcaaaagcgaaggtaaaagaaagactgcaaaagcagaagcaattgtttataaacatggaagtggaagaataaaagtaaatggaattgattaccagctttacttcccgatcacacaggacagagaacagctgatgttccctttccactttgttgaccggctgggaaagcacgacgtgacctgcacagtctcagggggcgggaggtcagcgcaggctggagcaatacgactggcaatggcaaaagccttgtgcagctttgtcaccgaggacgaggtcgagtggatgagacaagctggactacttactactgatccacgtgtgagggaacggaagaagccaggccaagagggagcccgcagaaagtttacgtggaagaaacgctaagggtttgctcccaggaaaggagaggaagagctatatatatgtgccgacatgtggcagacacacagtaaataatggctgaccagcatgagggcagtactgtcagaaatttctttgagctgtgagatggatttatttttaaatgctactttgtaaaggtgacctttaaaaaataaaaggaaaataaagaatgttagtttcaaaaaaaaaaa

SEQ ID NO: 631674 - DNA, 756 bp, Homo sapiens
acctcctaccccacgaggaaagagacatttagccaacatgatgggagaagatccagaaactttcactcaagaagatattgacagagctattgcttaccttttcccaagtggtttgtttgagaaacgagccaggccagtaatgaagcatcctgaacagatttttccaagacaaagagcaatccagtggggagaagatggccgtccatttcactatctcttctatactggcaaacagtcatactattcatttgattaccagctttacttcccgatcacacaggacagagaacagctgatgttccctttccactttgttgaccggctgggaaagcacgacgtgacctgcacagtctcagggggcgggaggtcagcgcaggctggagcaatacgactggcaatggcaaaagccttgtgcagctttgtcaccgaggacgaggtcgagtggatgagacaagctggactacttactactgatccacgtgtgagggaacggaagaagccaggccaagagggagcccgcagaaagtttacgtggaagaaacgctaagggtttgctcccaggaaaggagaggaagagctatatatatgtgccgacatgtggcagacacacagtaaataatggctgaccagcatgagggcagtactgtcagaaatttctttgagctgtgagatggatttatttttaaatgctactttgtaaaggtgacctttaaaaaataaaaggaaaataaagaatgttagtttcaaaaaaaaaaa

SEQ ID NO: 631675 - DNA, 915 bp, Homo sapiens
tttacacttatagtagactttatttagtgaatccaaatgacatgtgataattgtttggaaaggcctattgattttatatctgatcattcaatccagagacattaaattcagttgattaatggagttccccaactgtaagacttctttacgagattattttcaagctttgaaaagatcttctgagataaaggggatcagcaaacagtaagagtgtgttgctatacccaagcaaaagaaataaatcttaatctctcagcaaatcattcaaaatgtcagaaatgttagtgtttctatatcttggtaaaatggattgattgagaagtatgaaaagtataacagtggcatgcagaatattgtttttatgaatattcagaatttcagttgtttacataattatgtatctttatagtaaacgtaaccacatttacttgtgctgtgctttagagaacagctgatgttccctttccactttgttgaccggctgggaaagcacgacgtgacctgcacagtctcagggggcgggaggtcagcgcaggctggagcaatacgactggcaatggcaaaagccttgtgcagctttgtcaccgaggacgaggtcgagtggatgagacaagctggactacttactactgatccacgtgtgagggaacggaagaagccaggccaagagggagcccgcagaaagtttacgtggaagaaacgctaagggtttgctcccaggaaaggagaggaagagctatatatatgtgccgacatgtggcagacacacagtaaataatggctgaccagcatgagggcagtactgtcagaaatttctttgagctgtgagatggatttatttttaaatgctactttgtaaaggtgacctttaaaaaataaaaggaaaataaagaatgttagtttcaaaaaaaaaaa

SEQ ID NO: 631676 - DNA, 1327 bp, Homo sapiens
acctcctaccccacgaggaaagagacatttagccaacatgatgggagaagatccagaaactttcactcaagaagatattgacagagctattgcttaccttttcccaagtggtttgtttgagaaacgagccaggccagtaatgaagcatcctgaacagatttttccaagacaaagagcaatccagtggggagaagatggccgtccatttcactatctcttctatactggcaaacagtcatactattcattaatgcatgatgtatatggaatgttactcaatttagaaaaacatcaaagtcacttgcaagccaaaagtctgctcccagaaaaaactgtaaccagagacgtgattggcagcagatggctgattaaggaggaactagaagaaatgttagtggaaaaactgtcagatctagattatatgcagttcattcggctgctagaaaagttattgacatcgcagtgtggtgctgctgaggaagaatttgtgcagaggtttcgaagaagtgtaactcttgaatcaaaaaaacagctgattgaacctgtacagtatgatgagcaaggaatggcctttagcaaaagcgaaggtaaaagaaagactgcaaaagcagaagcaattgtttataaacatggaagtggaagaataaaagtaaatggaattgattaccagctttacttcccgatcacacaggacagagaacagctgatgttccctttccactttgttgaccggctgggaaagcacgacgtgacctgcacagtctcagggggcgggaggtcagcgcaggctggagcaatacgactggcaatggcaaaagccttgtgcagctttgtcaccgaggacgaggtcgagtggatgagacaaggtatgagtctaggtgggacgggcatggtggcccaatactggctatacatgttcatctgcttcttgtcctagtgcctgaagttcgtaagaaaatatatagttacatatgtaatatttcacttcgctgtcttctttcttgctacagaaccataacagtatttctcagatttgatttctacaaggtgagcttgaattagaaaaaggggagaactccccacactgattatttgagccctgctaaaatgttcagttccaaggtcagggaaaagttaattttggccttaatgcataaccttttatccagcttaacaaagtgcttagcttagttatatttaagagacaaattgcttgtttttgttttatcatagaaatgtgtgggttttttgtttttgttttttaaacagtctctctctgtcagcctgggcaatagagggagactccatctcaaaaaaaaaaaagaag

SEQ ID NO: 631677 - DNA, 1110 bp, Homo sapiens
  misc_feature (997)..(998): n is a, c, g, or t
  misc_feature (1035)..(1035): n is a, c, g, or t
tttgtgtagattgtgtgtttgttgtcccacgtggtgtggtgttcactatgtggcggttgcttgcgacttttcgggcgtgtcaaatgaattgggcacctttaggggctttggctttgtggttagccaggtcccgtgcccttttgctgagatgcattgtgtgccctgcccttccgttccctattttttgagttttctagttccctccgttttggcccttttggtccctgtattagcggctctttccctatgattcctcccgtgtctttgtattgtgaggtccttgggttctgttctcgctctcctctttggcagggcccttgttcgattgtcttggccacagcgtctcgtgtgtttgcccttggcgtgcaccgtttgaaatggggggcctgggagttttctaaatgggctccccttgtgaactatcgtatatttttggccaaacaccattccacgtacttctagggtgttaaaagtttgcccgactctttttagaccaccgggttttggaacttaagagtggttgccctagggtaattctggtgatgctgccttcttgctgccacttctgtgtgtgctcccttctgggtttctactgtaattttttttctcgttaatgccctgggggtggctccagggttcacctctgagttgttctgtgaattttctgggcgtgggttttgagcaaaggactcagcctcatagtagccacgaataaggggtggtgggttcatggcgcgtgtgttgaccctcacccagagccacatccctccccacgtaactttgtttctgcaatgtgtaaaggtctccccacttttttttaacgcacacccttgtcccctttttcctaccccaccacaggtcttgttccacatgtaaagtgtgccacaacacgttgtcacctgaaacacgtgggggaaatgtgatggttttggcaagacatcttcacgtattgagggggcacgtttgacttacctttgagggtgtgatgtctgtagcnnatgtggaaggtaaaaatagtggtgtgatcatgaaccnaaggaatttatgttttgtaacttgggtactttattttgcattttgttatactattaaataattttttccctgtta

SEQ ID NO: 631678 - DNA, 425 bp, Homo sapiens
atatacccgatgtttatatgtgttagtgtggtggcaggtagtgtagctggagcaatatgattggcaatggcaaaagccttgtgcagctttgtcaccgaggacgaggtcgagtggatgagacaagctggactacttactactgatccacgtgtgagggaacggaagaagccaggccaagagggagcccgcagaaagtttacgtggaagaaacgctaagggtttgctcccaggaaaggagaggaagagctatatatatgtgccgacatgtggcagacacacagtaaataatggctgaccagcatgagggcagtactgtcagaaatttctttgagctgtgagatggatttatttttaaatgctactttgtaaaggtgacctttaaaaaataaaaggaaaataaagaatgttagtttcaaaaaaaaaaa

SEQ ID NO: 631679 - DNA, 102 bp, Homo sapiens
atcacagagagccagaatcctcagtactagcactcagtcctcccatgcagctgaccccaactcagaagccataatggtgatggagcagcagatcccatgaga

SEQ ID NO: 631680 - DNA, 279 bp, Homo sapiens
ctcggcccactgcaacctccctctcccaggtccaagtgattctcctgcctcagcctcccaagtagctgggactacaggcgtgcgccaccacacccagctgattttgtatttttagtagagatgggggtttcaccacgttggccaggctggtcttgaactcctgacctcagtgatctgcctgccttggcctcccaaagtgctggaattacaggtgtgagccactgtgcccagccttcaatatgagtttttaaaattcagtaaaaatttcctaaggctgac

SEQ ID NO: 631681 - DNA, 207 bp, Homo sapiens
accaaatacaaaagaacacatagctgtaacacagctgtagtagactagaatgctctgtatactttatattaaaaaatgctagcataacttccagctgcaatgcaaattcatacatggtgtcccacctatatgtaatgatggtacaatttacaatcttagtcaacttctgtagaaagttctctctatgacagttttgctgtctgaaaa

SEQ ID NO: 631682 - DNA, 348 bp, Homo sapiens
taggagttcctggtggtgatacagtgatgtatttactaaacagagacctgtgcagaaattacatactatccatctagataggttgttacacttttgcctattgatggaatagttccatttatcacagttttataacatcaacaaagcttttgaatgttcaccgagacgtgtccacttaatttcaccctctgaacaaagttggcatttacatttcagcgacttatattttacatgcattaacaaagcttatgcattaagggttgcttctctgcacaaatggcattgatgcagacagagctggagtcccattatcacgcaccagagaattcttcccgcgtaccgcagctc

SEQ ID NO: 631683 - DNA, 199 bp, Homo sapiens
atgctttagaggcacaaggaggcagaggcacaagtaagggggtgagggtgaagcagcgtccagcttgtgaagttgcttgggcagggagaggggatcttccagggggatctgtgtccacactggggggcctcctaggcctgagctggggctggcgcagcctcatgttctgtggtgcagaaggacctggctcggtggggtg

SEQ ID NO: 631684 - DNA, 104 bp, Homo sapiens
ggtatatacaagtagtgaatctatgaccaggaccatagtggcacatcaactgtctgctttgagtgtgaaaagaccctggtggtgatcctcttagaagctcgaaa

SEQ ID NO: 631685 - DNA, 273 bp, Homo sapiens
  misc_feature (27)..(27): n is a, c, g, or t
  misc_feature (39)..(39): n is a, c, g, or t
  misc_feature (59)..(59): n is a, c, g, or t
  misc_feature (135)..(135): n is a, c, g, or t
  misc_feature (198)..(198): n is a, c, g, or t
  misc_feature (248)..(248): n is a, c, g, or t
gaaaaaaacaaagtttgagaacctctncttctttttttnttcttcatcctctggaagtnccaggccttctttggtgactgacactaaagtaggcctggaacttccagaggatgaagaagagaaaaagaagcaggnaagagaaaaaaacaaagtttgaggaacctctgcaaaatcatgaaagacatattggagaaaaangttgaaaaggtggttgtgtcaaaccgattggtgacaatctcccatgctanattgtcacaagcacatatggctggg

SEQ ID NO: 631686 - DNA, 109 bp, Homo sapiens
ctggaagtggctcgagacagcgaaacgctgtattctccgtgcgcgtgacacggtccacttgtccttcctcagcaaagttcatccatacccaggatggcaatcatatcct

SEQ ID NO: 631687 - DNA, 713 bp, Homo sapiens
  misc_feature (111)..(112): n is a, c, g, or t
  misc_feature (141)..(141): n is a, c, g, or t
cccgctttaggctgcatcagccggggattgccggcgccaggcatctgcatctgggaccgacctcctggtgctggctgatcaaagaggaagcagcagcaatgtctgctgtgnngggctgcaactccatacctgcatcatccnggtgatagtcacatgtggcctgatgtgagtttcttgaggggcccagcttcctccagaggtggcagcaatgtgccctggctactaggtggacctagacagtgagcacgttcagaaagttgctgaagtttgtgtgtcagcaagcctgcagtgtgggatggactgcctgagaggctgtgcagctgtacttggtggtcagccgccaacctgccggaggagcagctgggtgccctgctggcagtgcatgcacaacactgctccagcaggccctccgtctgcccccacaccagactgaagcctgacaccttcagggaccaagctccaggagctctgcataccccaatgaacctggtcggggacttggccaagcgtggtatacgggagccagcggccactccttgattcttgtgagcccaagcagcagggggcctggcttgctgaatgaatgctgaactatacggtggacggggtggatgtagcaatctccaccagtgccctggctacgtccctgaactcgcgcgtcctgatgcagtgaagcatacaatgggtaacatacggttgaggcccaagccaga

SEQ ID NO: 631688 - DNA, 1576 bp, Homo sapiens
  misc_feature (1006)..(1006): n is a, c, g, or t
ttagatgagatcccctcgttgtgatgaggatgtgtctttctcgcccgcgctcctcttgtgtgatggatgttgtttctgtgccgccgtgtctatcactcgcccgggttgtcctgtgttgcctccccctcccctcccactagtagtggcgctccttggtgtctgtttctctctttggtggcccccccacagatgagatgggcgcccccccccccccgttgtgtgtggtggaggtgatgccccgcgagtgttgtctctcggggagtgggtgccccccctcgtgtgggcgtcccccgaatgaaaatgacatcgtgttgtgtaagctcggggggctccccccgccctgaaagagtaagtgtggccctttggttatctcttcactccccagcgtggtgtataccaccgtggtgttggagaagaccgcccacaacgggtgttttttttgtgcgcgcccacagcaggatatattgatagtagaacttcggatatttttctggatgaatgggttcatacattcctcggggggggagtgcgtaacacctcaacgaggggggccaccaaaatgagaggcggctaattccccaaaaaaaaagggggggggttcctaccaccccccaagaataccttgctgttgtgggcggccccaccaccaccccaattggaagaataggcttcttgcccccccccccgccgtccaatggtagcccccccctcccctcggagagcgccaccgttggtcgtcgacacactacaagaggtgtggtcgccacccttgtattataatttttgtgggggcggcgactattggtgccgatattctcatctggtgtgtcctcgtattgtttaacagccacccctttcctcttctattgtgggggcccagccccgcgctctcggggcgcagagataaagagggctataagcacactatctcaccgccactctcgtgagatgatttcctctacacccagatgagggagatatttttatataaagagatatttgggcnccctacgcgagggtctgtacccctctgtatatcacaagaggaacgcgccacaagaatcttgtgatttcacagaggaacccacacagtgcctctcccacctgtgaactcatgtgatcctcaattctgtacacacagagagagcactccacacccctctctgtgggtgggctctttgtgtccacatattgtggtgtaaagtggacccacacagggaactttgtccaagcttgaaaaggcttgttgttggttgggagacccaagagaaccgggtggcctccacccctctccgcaaagtgccctttgcgttggtcccaagaccgagaaccggccgggcgttttggagagaaagagttgagcccttaaagttctacattgacacccaccctcccaagggttggccacatggccggcttctcagagcccatggagagagaagaaagaaaagcaattcactgggagcccctgaaagaaaagagcccgacattgccaaaggagaagaaagagcttaatgcccgggaccagattttgcagattggtggggtttccaattaaagattattttccccctga

SEQ ID NO: 631689 - DNA, 427 bp, Homo sapiens
  misc_feature (40)..(40): n is a, c, g, or t
gctttttgatagttgaataatagactcagcaacacagcanctacaaggaaaaaggggatgatgtaaggtgagataccaacactgctttaaagcaatcctagtcaggacccagcatggctaaagcacatagtggttttgctcttattgggttttggctgctttatttttgttatgattgtttttttctattataagtattattttgtttgaggcaaataaaatgtcttctttatatgacaggtgttaaggtggttacttttgcttttagcaaatgcataggaggaaaatctaagctacattctatgaaaaagagctaattttgaccaaatatcgagcagctacgtcatgagtggagttagcatcgctgatgggtctctacactagggatagttattttggatctgctgctgcgttgttgcatagggaa

SEQ ID NO: 631690 - DNA, 148 bp, Homo sapiens
cctcgcttagtgctccctggagtaccctatcgttgaaatgccggcatgccaaagtcaagtagtcctgcggcttaagatacccgctccgatattcgacctcattaatattgaatgcaaagttccatgcaatagctggcatgctagtgca

SEQ ID NO: 631691 - DNA, 192 bp, Homo sapiens
tttttgctttgacttgacgtaatggcatcacatggtacagttaggtgccatgttcattaggcagttggaaatacgagcttatagctcaggagagtgtttggacgttgttctgggactctgaagcatctggctttttagtcctagctctgccatgcagctgttatctgtgacaagtcaagtagtttatgctgt

SEQ ID NO: 631692 - DNA, 702 bp, Homo sapiens
  misc_feature (438)..(438): n is a, c, g, or t
  misc_feature (523)..(524): n is a, c, g, or t
  misc_feature (527)..(527): n is a, c, g, or t
  misc_feature (551)..(551): n is a, c, g, or t
  misc_feature (585)..(585): n is a, c, g, or t
  misc_feature (599)..(599): n is a, c, g, or t
  misc_feature (614)..(614): n is a, c, g, or t
  misc_feature (616)..(616): n is a, c, g, or t
gcgttcatacctgatagagagggtgcagttttcaggtgagtcaccagtgcctagtgtcacttcctgttcaagcgatggtctttgcatgtgtcccattcaggtaagttcttgattcccataattaataatagtcatccttaggctaccacttccctttccactgggatagttctgcattgaggcctattatgtgtgtttgaactacagactgttaaactaaggagtatcggattgtatttcgtgtggtactaggaacagaagctgtggatatcagctgcagatcacgtcgaagtacatggccgaggacaaatctacataggacgagaagcagctctagatggcctcttggctgacttagtccctccttattagtgattggcgattcaggccatgtcatagggcctttcagacaaaaggttcttatcccagtcagctggncaaaacattaactttggatttcttaccctgctacagcatcttctagaaaggcagcaagataatattgtggcagtgcacagataanntcnagggtagacttgactggagaaaancaaattctgcgcttgctcctgtgtgcccccatcncagctgtgcatgcncacacaggacacctntntagtatgaagaacttgcatcaatgtcatggcctctattgagtcacccccttctagaaaatacttccaaaggtattaacatgtgaac

SEQ ID NO: 631693 - DNA, 677 bp, Homo sapiens
ccattttttattaattgaagcacacagaaaagaggcaacttgattaaagaaaggatgttttctacacattggcgtggctttcccccaccgcactttagaaaccgaagaataagcttgtgatcttcattttattcaaattattctcatggaaagctgagatgcgactaaaatgtgaagttatgcccctcaggcaaattgccttgcaacagcaagattggtaccctcctcgggggagggggtctgcttaatataagacttgcggtatttctatacaaaagaagggctggcatgcatcacagctttcatttgatcttttgttggctagggcaagaggttcacaagcttaacacgcgcacgttggcaattgaattgtctctccttctcagtaagcgggcatatacctgcctggcacgagaatagttctgctttggactctttaggaaccgtttgtttcacgaccttcaccaatggaaaggatgggcacccggttacccaaggaaacccgcaagaattggctgcgtgtttacttggtggcgtttaaccatggcccacacattacctggtgttgaacagggggagggccgcctcttcccacggcaatagtattttttaaagtagtttccaaaacactgcgccgactttttctttggtttttgggaacaccttcataggtgtgt

SEQ ID NO: 631694 - DNA, 317 bp, Homo sapiens
tctcctccatccagcaaactcgtaatgatccgccaaggcccaaatcagatacattctgctggtctgttcccctctctccgggtttgacaaagaatcctccttccattggactgtcacagtcatttgaacattcattcaacatgtatgtactgggctctcccactgttcacccggcattgttctaggtgatgggggtacagcatgaccaagacagagtccctacccacaaggcaggattcagtctcatattactgtctttcccatcaccaagcactgtgtggtcctgtgtgtcactgaaggaataaagggttgggccg

SEQ ID NO: 631695 - DNA, 888 bp, Homo sapiens
  misc_feature (438)..(438): n is a, c, g, or t
  misc_feature (523)..(524): n is a, c, g, or t
  misc_feature (527)..(527): n is a, c, g, or t
  misc_feature (551)..(551): n is a, c, g, or t
  misc_feature (585)..(585): n is a, c, g, or t
  misc_feature (599)..(599): n is a, c, g, or t
  misc_feature (614)..(614): n is a, c, g, or t
  misc_feature (616)..(616): n is a, c, g, or t
gcgttcatacctgatagagagggtgcagttttcaggtgagtcaccagtgcctagtgtcacttcctgttcaagcgatggtctttgcatgtgtcccattcaggtaagttcttgattcccataattaataatagtcatccttaggctaccacttccctttccactgggatagttctgcattgaggcctattatgtgtgtttgaactacagactgttaaactaaggagtatcggattgtatttcgtgtggtactaggaacagaagctgtggatatcagctgcagatcacgtcgaagtacatggccgaggacaaatctacataggacgagaagcagctctagatggcctcttggctgacttagtccctccttattagtgattggcgattcaggccatgtcatagggcctttcagacaaaaggttcttatcccagtcagctggncaaaacattaactttggatttcttaccctgctacagcatcttctagaaaggcagcaagataatattgtggcagtgcacagataanntcnagggtagacttgactggagaaaancaaattctgcgcttgctcctgtgtgcccccatcncagctgtgcatgcncacacaggacacctntntagtatgaagaacatacaatcaggtaggccctagattgcacacccccatggtagacttaagagcatctactaacacacggtctgcggagttcaccgcacgtcttcttgatatgtgataagcacgagtgacgatttcagtattgttatggatattgatatacagtcaagtggtaaggactagcttgcgattgaatgaagggcactaacggaaggttcaaaaatatggggtagatgatcgatccgtgacctgtgaaagtaggtaccgagctcga

SEQ ID NO: 631696 - DNA, 400 bp, Homo sapiens
  misc_feature (21)..(21): n is a, c, g, or t
  misc_feature (143)..(143): n is a, c, g, or t
  misc_feature (224)..(224): n is a, c, g, or t
  misc_feature (328)..(328): n is a, c, g, or t
  misc_feature (340)..(340): n is a, c, g, or t
  misc_feature (380)..(380): n is a, c, g, or t
ttaagacagagtctcggtctnttgcccaggctggagtgcagtggcgcgatcttggcttactgcggcctccacctcctggattcaagtggttctcctgcctcagcctcccaaatagctgagactccaggcatccaccaccacanctccctaattttttgtgtttttagtacagacagggttttgccgtgttggctacgctggtctcgagctcctgggctcaagtnacccgcctgcctcggcctttcagagtgctgggattacaggtgtgagccactgcacgcagccatgttttcagttttcttgagggagattcctaggagtagaattnctgggctgtgtngtaacttccagggctccttaaaaggtttagcctgggactnggtagagcatggttttccac

SEQ ID NO: 631697 - DNA, 112 bp, Homo sapiens
ataatcgcaggtgtgaccaacagttctcaggttccagtagcacagttctcgcatgcacagcaaaccaccaattgcagcattttgttccagtgcatcaacaatctgccatcat

SEQ ID NO: 631698 - DNA, 174 bp, Homo sapiens
gacttggacgccccaaccactccatcttactaccagacaaccttagccaaaccatttatccaaataaagtataggggttagtccttgctatattatcgcttggttataatttttcatactttcccttggcggtactaatatctatatggcgtccacaaggtcaggggtgaccga

SEQ ID NO: 631699 - DNA, 726 bp, Homo sapiens
ggccagagcagagggtactcagctaggtttgtgagatcactaactttacacacacacacacaccccatataagacagagcacactactcgacaaaacagcacatacagacactcatgtgcatcacactgtctatgttgtaccaggcttcttagcgtcggttggagcatcaaggagtactacaagttgatgtagtgtaaccatcacctgagacttttaccacatcacacacaacatccacctcatcattgagcatgagataccacttactaggaacatactaggattaagagagttcctagagtgtgcgactacgaaattggcctcttgcagtactagttatttaattccacttatgagtatcacacaaagataaagatgtgagacgaacattctgctagtaacgaaaggatttattcacactttggatgaaaagtagatacagatgatgaggaggagtaaccgcgtcgaggtttattatgagagcatacaagtggttcgtggatgttgctccggaggaagtggcctatataagaccagttacttttattaggagtctatgacttatcatatattaattaataatatagtgatgaagagagcgtgccagcaaccaagaagttaaccaacgaaggtagcatcattagttgtatgtgaggaggagcagagggtgagtgatgaacaaagcgcgaatatcataggtatgatattgcagtttggaccataat

SEQ ID NO: 631700 - DNA, 122 bp, Homo sapiens
tagaggatcccacacacaggcagaaaaagtgcacacgttcagccccacaggcccacccggtaccaggcctccattccaagtggctgcagggttggatcgtgaggcgaggtggagccggggcg

SEQ ID NO: 631701 - DNA, 285 bp, Homo sapiens
  misc_feature (33)..(33): n is a, c, g, or t
ctcggctatctcatgttctacatctagagacgngcccgagggtgattaccttgcgccgtagactctagtatatgttaaagatctgccacctgcacaggtgttgtcgaaagccaggtaaggttatctttgtgtccccctttctggtaatacatgataacagttcgcgagtctttctcactgccttcgttagaatagagtggctcgtcctcactggtctacactggtcgccgaataaaattgtattcctaactgttttgtatatgctgcattgagacttacggcaat

SEQ ID NO: 631702 - DNA, 819 bp, Homo sapiens
  misc_feature (47)..(47): n is a, c, g, or t
  misc_feature (49)..(49): n is a, c, g, or t
tacatgataacattaactaccacccaagcaaacaacaaaaacactgnangtgcactgactctcttctcaaccaccgaacccctgacctgccaggagcctggagaagatgaaggcatccgcggttctctccctccttggctacctggtggttccaagtggtgcttacatcttggggcgttgcacagtggctaacaaactccacgatggaggcctgcatggttgcaagctgtagccgcctgcatggcccctgcagcactcaccacttgtattttgtgaatgaaggtgcttttctgcttgctgcttcagtcaatacttctgatgatctcaccactctaacagttccacatggaaacagacacaagcttgctccatccggggatgccggattgctaaattaaccatactagttactcatatcaaatatcaagcgatgcggcccgttccctttactgccggttatctacgatactagctcactgactcccttgtcttcgcccgatagcttgtgcctctgtactcaactcacttctaggctgtcattatcgttttcctcaaaacaacggatcccctatgacccaacctctttccttacgccaccctaccgtcctcacccatctaatgccccgcttccgcccgttctcctaacctttcttccccttgcgaccctccccacaccgctgctaccccacactttgccacacccctctgattcacacctctacaccgctcccacctgcaagctccttccctcccttttctcccacccccattttctaagccccggccctcctttccactctaacggcgcccttctacacc

SEQ ID NO: 631703 - DNA, 1092 bp, Homo sapiens
gatataagctctgatacctcaaaatatcaagagataagcatgatggtctcagagttgagaaaactgcctaaactatgatgctgtaagtgtaatccatgtgcagatatgaataccgctgtgaagcattcaaatccacgagctaaaagcctaaatgtgaaatgctaatgacaagcctgagaaggtaaactgtgaatcttcatttctatcattgatctaaacttgcacagtattcggatcagagtatatactatggtggtatttgcaaatgctatggtaggagtcgcactagtactatcaagactatcaggtcgtcctcacaggttacaaatacaccttgtgcattaattgcttactcctacttcctagtataacagttgtcaagttatggcccgttttatgtgtagaaacgccgacattttcacccagatgtaactttcccagggaataacttaccgggttaaacattgctacggcagtataaacaccgagcccataaaatgccaggtaagtaaagtacatgctaagaaggatgttgggcttggattgctagtattgggaatccacgactttaccagtttgacgggcgattcctaatatgtaacgaagaatacagagcctatttaacgatgtgggataaattcaattaaacctctactcttcttaactactcctcggctctcaaggaaccaccagcggtggaccctgttgggattctacccgaatttcacccctgggatacagaaaactaaaaggcctcaaactgaaggttccctttaagacccactcgagctgctattgtgtgtgcgccgctagagaacagtgatatcgcttggaaaatgtttttcccccaccagagtgggtccacaatgattgatcccccccgagatttctcacagacgggcgtcaacctgaacgtgtgcgttgttactaaggacaatatccccgggtgtcgcataggcgccaacgcaatttataccagcgacacacttaattgttaccggagaggtttaaccccggggcaatgaaaacgtatttgaaccccagtgtccggcataggacatccttccacgaacaccatttgcggggtccctt

SEQ ID NO: 631704 - DNA, 203 bp, Homo sapiens
  misc_feature (3)..(3): n is a, c, g, or t
  misc_feature (141)..(141): n is a, c, g, or t
  misc_feature (143)..(143): n is a, c, g, or t
  misc_feature (181)..(181): n is a, c, g, or t
gcnccttgatgattacgcatgactggaaggagggaaggggcccagatcaaaaaaagcaccataagcctgaccaggaaggacccaaaggccccaatcacttcctcccaaagaacacccaagacaatgactgggtttctcagngnccctgaagcaaggaaactcacaaaaaaaaaggccaaancggaaggggaatcacaatgggg

SEQ ID NO: 631705 - DNA, 214 bp, Homo sapiens
aaacgcagtgcacctgaatgcctgatagtcgtctctagagtatcaccttccaggcttatagcgggtcacagcgatctctatcgatagtcagctaaattagaattgtgaacgatataagtgtaacgtgaaggttactgtttgatattgctatcggtggcgcttccaattacggtgcataatctcggtagcctgcaatcaagcctggtacaggggc

SEQ ID NO: 631706 - DNA, 1414 bp, Homo sapiens
tctgtggtatgatgagttgttgtatccataagttttagtatgtcgtccactgtggggtggaccgtgtgctgctctcctcttctgtggggcgtattttctggatcttcggagctatttcgcggggtgttgttcctgtgtcccgcccctccgcagtgtttacaccgtgttgtggccgaggtagcttgtcttctgcagcaccccacacaccccttgggggcacgtgcgattgtgccctttcattggggggcacatctggtgctattgttttgggaccatttggctctccccggaccgtttgacctttgcgtgttctctcttagccttttcgccgtagctttatttgcgcgtgcggttgggccccgggtttgtgtgcgccgccctttccacacgcgttttgtctttgggcgcttttttgcgcgggggcgcccgcccacaaaagggggaggccgctcgggccacggggggtttcccacgagccgcgacaccctgtgggtggcgcctgacacccctgcggacaggtaccagcgttgccccaccgtggggcgcaccccttaatgtgccaccccaacgtccacgtccttttggccacggaaaatatggccgtattttctctcccgatggccacacctgttccgggttgggcaaagaagagttcaccccccaatgggccctgcgtttttgaggactctgtccccaaaccccaagataggttttaaaaagtgttgtgattaccccccgggccccccggcacaggtgaccactatgcgcctatgctttgcgctctgcctgtgtgaacccgctgtggagaaaatattgggtgggccccccaaagggagattcccaaacggcgtgggcccaatttgggcccgcccccttcacaggacccacatgcccgcacggcctttccacgtgttttgtggaaccttggtggccccccccaccgggcttttcacaaggttttggtgagtcacacgctatccccgccctttccccccctctgttggtgcgccctctggggggttaccctcgggccacaaggtgtgcaacagcgtgtgcccgtgtgtgggcacttgtctttgaggcgcaacaccggcccccccactttctccccgaagggctctcggggccccccttgggagccaccacaatttccgacccttgattgtatatgccacaagagggcctttgtgcacactggtaatgtgggtgaagggcactggaaggagggtgagtttctccgaaggcccgctgaggaatattggctgcccctggaagaaaggaattatatgaaggaaggtgggcactcgaactcctatatgaaggaacgaggatgagggagaagaatataaccccctgcctggagcctattcactatgtttattgccaaatcctttcgaaattaaccgtttccttg

SEQ ID NO: 631707 - DNA, 444 bp, Homo sapiens
ccttaagagcaaccacatgttgcagaattcagtcaatttgaagcatttgctgcgtcaaaggtaaacgacgaacaagatatgaagccgagaaacatccagaagtcctgccggctgaaaaagcttctgatcctgcaagttctcttcgagttgccaaaacagatagtaaaactgaagaaaagacagctgctagtgctcctgccaatgtgagcaaaggcacaacaccacttgctccaccacctaaacctgttcgaagaagattaaaatcagaagatgaattaaggccagaagttgatgaacacacacaaaagacgggtgtcttagctgctgttcttgcatcacaaccttctattcccaggatgttcttgaggagagaatttccctggaagttcaactggaacaacttcgaccattctctcacctataagccaattgccgttaactgtg

SEQ ID NO: 631708 - DNA, 153 bp, Homo sapiens
  misc_feature (22)..(22): n is a, c, g, or t
tttttttttgagacttactcgnctctgtcgcccaggccggactgcggactgcagtggcgcaatctcggctcactgcaagctctgcttcccgggttcacgccattctcctgcctcagccccaaatataatttttaaaaaattatttggccatag

SEQ ID NO: 631709 - DNA, 1371 bp, Homo sapiens
tggaaaaattcatggagcccagtggggttgtggctttaaaaccagctttgggggggtttcaattttcttctccttttttgtgttcataaatttaattgttatctacgggtttcttcaaatgtgttggtggataggggtgggggcgcatctccatattagttcacctccaggtttatatgtgggagggttccttctcatactatattatgaggaactttcgcgcctttcgaaagccgaagagagcttatcctcaaatctccgtgacacaaatcttatttaaatattacacgtggcgtgtttagaagaaaaagtgaatgtgaacccatacgaggactgtaataggaattgtgttcacagtggtgggtgtattgtgcatatgcgggggttaagctcgcgaagataaagcgtgtgcgaggggacatatatccgagaaatagaggcgcaaaaaaagaggttgtggtctgcacctgacaattttgattgggcccccatagaaatataagagagagagagacacaccccgagactaagggtgcgataagaggagagaaacaattgggggtgaagcgggaagcaacgagagaaagagaaccccgggggagaggaacgcaaggtacccctggaaaaaggggggaccggcctaagcacacgggcaacccccctggctccccgtagacccgcaggcccctacaacaataataagccaagagcgccgaagccaggagacaaactagcgaaaaaaaaggggggaggcaaacagaactttcaagaaagaaaatagtgtaggaaaaaacaaccaggacaaaaaacgcccaaataacccgggggggggacccacgcgataataatcaaggggggggaaaacagcaggcaacagaagagacaaaaagagccccccccaaacagaaaaagagaggggcgattcagcctcgtaggagcaggaaactacataccacaaaccgcatgtgcccagggaaagacaaaaagagtggagacaaaagcggtggagaaaccaaaaaaaggggtagacagaggagcgccccaccatcaagcacacaacaagggagaggactaaagagggagccagtgacgggcagagacaagtcgcgagcacaaaacacgacactcccgcacaggcagaacgggggagggggaagaagagacaaggccgccggcccaggctgacacaccatcgagaagaaggtgggcgaccaagaagacgtgcgagcccagctcatagaagagtagagggccggcgcagacctagggagaaaaagaggagagcaacgacgcacgaggaaggacgaaagaggaggaagagagagaaagaactgggaggagcaaaaggaagtgacgggcagagggcgccgg

SEQ ID NO: 631710 - DNA, 883 bp, Homo sapiens
  misc_feature (524)..(524): n is a, c, g, or t
  misc_feature (883)..(883): n is a, c, g, or t
gatctcagttgccttccctttgaacaggattcctggagggaaattgcatacatgaacggaaccggactcttacttaatagtgaattcaagacattgaacatgtcccaggtggcattttttcccttgaggatgtgaaacatttaaattagccatgtttaagtaagcaccgttgctgtcaatcacaaatgcaaacctggacttggagtagaaacaaaacaaagacttttattctgcttttccaataaaatggcttcttactataaagccataataaatacctactgtttcattttttagtaagagtattagagcaattgtctgtaccatcactgctgttggttggtaggagatatgggccagaaagagatcatataagtgaggggttacaggctcattggccaacccaacccccaattgaagatgtgatggtcctatgataacgggctttaattggctgcttaaaatgacaagtaagtttcgggttggtaggtagtagtttttgagacagactctcgctctgtcanccaggctgcagtggtgtggtctcggctcactgcaacgtctgctttcctgggttcaagtgattctcgtgtctcagccttctgagtagctggggactacgggcgcacaacacataacagctatttttttgatttagaaaaaggaggtcccatggggagtagattcggaaccggaccgcggataaccgccggacatgggggcacgggggggaacatgaggcgatcgaaacacggcacggggaacccgttctaaacaaaaaccgggggggcgcggcaccccgaagggggaaaaaccgcgaggaggcgaggacaccacacgggagcacaaaaaaaggccgcgatcgcagagatgtaaacagcan

SEQ ID NO: 631711 - DNA, 115 bp, Homo sapiens
  misc_feature (5)..(5): n is a, c, g, or t
cccgntcaattgcagcatgccgggggcaataggattcatgtgcattcaggcagtcagggttaggcatgcagatgggcaagcaagcacagcagcaggcacagtcaaagtttcaatt

SEQ ID NO: 631712 - DNA, 119 bp, Homo sapiens
gctctgagtcctatggaaacaattgcagcagccggagacgaaagggccaggaacgcttcaacctgctggttctgacgggcatgactgtggccggcgtgttctgctgggctcactcttca

SEQ ID NO: 631713 - DNA, 374 bp, Homo sapiens
cgagtcgatcccccggggcagaccgaggaagtgcaagccatcttctgcattactgacacgggtgcagatccggtaatgctcgagacccttgatgtgaaaaagacccagttcagagggctgatcgagctggacgaggacgactacgacgaagacgtcagcgaccaatacaacgagctcgaacctgtgatgacccctgatcgctatgcgctgatccagcgcatagcagcgaattacctggcccaggtcggccaggacgacaggaggactgcatgaatccgcgcgaagagctagttgctcatcaggccgctgtggaggccaagtatgcgtcggtgcgtcagcgtcatctcgacggcttggctcgggaggccggcttc

SEQ ID NO: 631714 - DNA, 416 bp, Homo sapiens
ttgagtgttttttgtgttttttttcccaaggatgccgggcacggccggttctaatcagtttctataacttcgggtcaaggaaccaatgggattcttcccacttggccctgcctcgtggggcttattttctaaccatacttccattttcatacccaatgaaaagaaactcaattccaaaggatctcacctttcacaaaattctccccttaagtaccctaaagcagtcctatatcatcgggtgccgcaagaatttgggggcagtcacaagtttctaacagcaaggcagagtcttaaaagcaatgtggagatatataatcggtgtccagatgccccctcatcgggggtgggtcaaagctgtcatgaggcggtgtgcctgtgtggaagggagatgcccgaacctggtggccaaactgtct

SEQ ID NO: 631715 - DNA, 751 bp, Homo sapiens
agcggagtcagaatacttgataatgatggtaaacaactatgtactggttatttattagattatacttaattgtatattggagtgttaataacttattaaagagagaaaaaagaaaaagttaactgtaaaacagcttcaggaggataccagaaggagacactgctatcatagagatgatagctccatgcatgttatatgcccctgaagaccctccagtggaacaagatgtggagatggcaagacagtgacattgaggatcctgaccctgtgtagacctaggctcattgtatgtggatcttaatttttaacaaacaaagtgaaaaggtaaaaaaccaaatagaaactagtttatagcacataatgatataaagaaacagctttgtaccagatgtacaatgtgttgtattttaagctaagtgttattacaagagtcaaaagtggaacaattttaaaagtttataacgtcaaacaagttacagtaagttaaacattactttattatcacacagaaagacattttaaaatagattatagtgttgcctaagtatccaggtttatgaagtactacagcggtgtaccactaatgtcctagggcttcgcattcagtcctcactcaatgactacacccagagcaactttcaatcctagcagctcccatgcatagtaagtgcccctataccaggaggctcctattgacaacaagaatcattcatacccatatataaactactcaccaaactgtaagcatacc

SEQ ID NO: 631716 - DNA, 811 bp, Homo sapiens
ggtgatgtctatcccatcgttcggagttgttgctgtctctcactctctctctcgtgtgtttgatcaaattattttgtgagtgtcccacctcgcactctactctccgtccgcgtcgaggctgacatcccttaccacacttcgcgtgccgcgcagctcgctgctcgcaccaacacggtgagacagcgacacaccaactcgcgcgatgtcgttgtcgtatgtcttcgcgtcttctcgtcgtagagaacacgacactctcgcttcgcgcgcgttggtgatggagagcagagcgcgggggtcgcgcagctcacactcgcgcgcgagcgcgagtcgtggagcggacgacgcgacgcctgggtcgctcgctcgtgcgcacacacgcgcggcgcgagagcgagacccacacacacacgatgtcgtagtggtgtgtgtgtgtgagagtatgtgtttgggtctgtttcgttaacatccactcccgccgaaggaacaaacgatcatatctgtatatatactattagaaacacacacaagacagattatgattctccacaccacacgcacgcgcgcgagagagagattctctcttcctcgtacgtacacacacacaaacagatccagactcacctcactgcgtgatggagatgatctctctctctccatctacttctttatgtgtcgatagggccaccaaccaacacatcaccccagcgtgtgttgtttgtgtgtgtgatactacccctccctcgcacacaatcaaaacacatccaggtgggccacgccacaacacaaataataaagataataaatataaata

SEQ ID NO: 631717 - DNA, 343 bp, Homo sapiens
cctcctgaagagagcctcatcaggctgggagagcagactgcacccaggaaactggagcccagcacagtgtgggacagggtcaaggttgagaaatacaacagaggaaaactgcagaagctcagaggaggaaggatccacacctggctggggaagggaggtacggggagcagatagcaagaatgactggcaaacgcttcctgaaggcagtgggggtggggggctcgatgatgaagtaggcaaatgtgggggctccccctctccagtggccgggggacccaagtgtagccaggtccaggcccggctggccaggcgtctcgttgcaaacacagaaccaggtctggta

SEQ ID NO: 631718 - DNA, 1691 bp, Homo sapiens
  misc_feature (770)..(770): n is a, c, g, or t
  misc_feature (778)..(778): n is a, c, g, or t
  misc_feature (790)..(790): n is a, c, g, or t
  misc_feature (792)..(792): n is a, c, g, or t
  misc_feature (801)..(802): n is a, c, g, or t
  misc_feature (806)..(806): n is a, c, g, or t
  misc_feature (813)..(813): n is a, c, g, or t
  misc_feature (828)..(828): n is a, c, g, or t
  misc_feature (834)..(834): n is a, c, g, or t
  misc_feature (994)..(994): n is a, c, g, or t
  misc_feature (1033)..(1033): n is a, c, g, or t
  misc_feature (1090)..(1090): n is a, c, g, or t
  misc_feature (1101)..(1101): n is a, c, g, or t
  misc_feature (1114)..(1115): n is a, c, g, or t
  misc_feature (1120)..(1120): n is a, c, g, or t
  misc_feature (1202)..(1202): n is a, c, g, or t
  misc_feature (1209)..(1209): n is a, c, g, or t
  misc_feature (1233)..(1233): n is a, c, g, or t
  misc_feature (1237)..(1237): n is a, c, g, or t
  misc_feature (1239)..(1239): n is a, c, g, or t
  misc_feature (1247)..(1247): n is a, c, g, or t
  misc_feature (1250)..(1250): n is a, c, g, or t
  misc_feature (1275)..(1275): n is a, c, g, or t
  misc_feature (1285)..(1286): n is a, c, g, or t
  misc_feature (1302)..(1302): n is a, c, g, or t
  misc_feature (1310)..(1310): n is a, c, g, or t
  misc_feature (1326)..(1326): n is a, c, g, or t
  misc_feature (1335)..(1335): n is a, c, g, or t
  misc_feature (1346)..(1346): n is a, c, g, or t
  misc_feature (1367)..(1367): n is a, c, g, or t
  misc_feature (1381)..(1381): n is a, c, g, or t
  misc_feature (1391)..(1391): n is a, c, g, or t
  misc_feature (1396)..(1396): n is a, c, g, or t
  misc_feature (1401)..(1401): n is a, c, g, or t
  misc_feature (1422)..(1422): n is a, c, g, or t
  misc_feature (1438)..(1438): n is a, c, g, or t
  misc_feature (1443)..(1443): n is a, c, g, or t
  misc_feature (1464)..(1464): n is a, c, g, or t
  misc_feature (1466)..(1466): n is a, c, g, or t
  misc_feature (1484)..(1484): n is a, c, g, or t
  misc_feature (1492)..(1492): n is a, c, g, or t
  misc_feature (1507)..(1507): n is a, c, g, or t
  misc_feature (1535)..(1535): n is a, c, g, or t
gccatgacttctcctccccccgtcagttcttcaatcactcccaccaatacaatgacttctatgagaactacaacctattggcccacagccactaatacattatcaccactcaccagtagcattttatcttctacacctgtcccaagcacagaaatgatcaccagtcataccacaaacaccacccctctatccaccttggtgactacactcctcactaccatcaccagatctacacctacatctgagaccacctaccctacttctcccaccagcattgtctcagactccacgactgaaatcacctattccacaagtataacaggtacattgtccactgccactactctcccacccacctcttcctctctcccaaccacagaaacagccacgatgactcctaccacaaccttgataaccaccacccctaataccacctcccatagtacccccagcttcacttcttcaaccatctactccacagtcagcacatccacaactgccatctcctcagcttcccctacctcaggtaccatggtaacttccacaaccatgaccccatcttctctgagtacagacacccctttcacaacaccaacaactatcacctacccttctgtgggctctaccggtttcctgactacagcaacagacctcacatcaacattcactgtttccagttcctcagcaatgtctacaagtgacatcccatcttcccctagcatccagaatacagaaacctcatcccttgtcagcatgacctctgccaccantcccagtntgagaccaactntnacaagtacnnacancactctnacaagttccctcctnacgacnttcccaagtacatattcattttcatcttccatgtctgccagcagtgcagggaccactcacacagagactatttcctcacttccagccagcaccaatacaatccacacaacagctgaatccgccctggcacccactaccaccacctcattcaccacatccncaacgatggaaccaccttcaaccactgtagcgactacangcacaggtcagaccaccttccccagctctacagccacattccttgagaccaccacantgactcctacnactgacttttctnnagaanctctcacaacagccatgacttctactccccccatcacttcttcaatcactcccaccaatacagtgacttctatgagaactangacctcntggcccacagccactaatacgttntcancnctcaccantancattttatcttctacacctgtcccnagcacagagnngaccaccagtcatacnacaaacancaatcctgtatccacnttggtgacnacactccccantaccatcaccaggtctacacntacatctgagaccncctaccctanttctnccacnagcactgtcacagagtccacnactgaaatcacctatnccacnactatgacagagacatcatcnantgccacctctcttccacncacctctnccttggtctcaaccncagaaacagccaaaactcctaccacaancttggtaaccaccaccaccaagaccacctcacatagtaccaccagcttcacttcttcaaccgtctactccacagccagcacacacaccactgccatcacttcagttcccactaccttgggtaccatggtgacttctacatccaggatcccatctag

SEQ ID NO: 631719 - DNA, 744 bp, Homo sapiens
gccatgacttctcctccccccgtcagttcttcaatcactcccaccaatacaatgacttctatgagaactacaacctattggcccacagccactaatacattatcaccactcaccagtagcattttatcttctacacctgtcccaagcacagaaatgatcaccagtcataccacaaacaccacccctctatccaccttggtgactacactcctcactaccatcaccagatctacacctacatctgagaccacctaccctacttctcccaccagcattgtctcagactccacgactgaaatcacctattccacaagtataacaggtacattgtccactgccactactctcccacccacctcttcctctctcccaaccacagaaacagccacgatgactcctaccacaaccttgataaccaccacccctaataccacctcccatagtacccccagcttcacttcttcaaccatctactccacagtcagcacatccacaactgccatctcctcagcttcccctacctcaggtaccatggtaacttccacaaccatgaccccatcttctctgagtacagacacccctttcacaaacaggaaagagataagataacgttctgtgggttgtgccggtttccagactatagcgacagaccgcagatctaaattcacggttgccagctgatgtagcaatgaccacagaatgtacagttcatgtatctccgcagcatgcagaataatggaacga

SEQ ID NO: 631720 - DNA, 416 bp, Homo sapiens
ctgctcttttgtactgccccccgactcattaaacagctcccccaggcctgagtgcactgatgtccgcagcgctgccctactgtgtcagtgtgtgtgggagtgccagtgcacagcaccatcccccagtttgggccgactggggagtggcctggggccacgacatgtgagaacacctgtggcgaggcctgtaccaagaatgtgctgtaccctttggagactggccctcgtggacacggaccacgacccctcaaccaagctcaagtctagcagagggagacatcatgaagtactctagtgatacgtggacagcaggaaacgacacaacgactaccgaacaactcacttcgttgcgacgtccacgataataccacccacacagatataatgacgaactccgtcgcaccgagcaccagggc

SEQ ID NO: 631721 - DNA, 552 bp, Homo sapiens
ggttcctgacgacggaaagtgtgccctgcttggagcccgagctttctttctaccctcttttaaaggggggggggtacactccctcatgaaagggtgtagaaacccgggacaacaaacgctccgggggaagacacagggcggccaaaacccccctctgctcacgcggagataaccgccgcgtcagccgaccccgaatggctgcgccccccctgggagactactggtaacctgtgcttttcgatagaaagccctttgtgaccgaggttaaaacaagatcatttctaaggatacatattttacctcacagagagagacgatgatgaagagcctagtattacaattacgccccccatctatcccctgatgatacagcattatgcccgcagcacaaaatcactcactgtatatgcctttttcccaacagagttgcctgattagccaacacccaaacagaaattttcagactctcacgagcatgaatcgccatgtgaaccgctctatcattagtttttggggagccctcaataaaaaattctaatcctgtccaacaaa

SEQ ID NO: 631722 - DNA, 867 bp, Homo sapiens
gttatgataatgcagagagcaggttcggaaagcttgtgtcttctgcctggtggcggtacatgcggtaagtggtgatgaattaaatccacgtctcagtcaacttactgggctggaaccatgaggctactgattttttactttatacgtgcggattgatagggttctggaggagcgtgatccctctactgggtgtttctggacaaagattagtgaagactcagtctaggagtgaactcagagtgtttcgaaattagcaaaggacaagatgagatgctatgcctcatgtaatgaggtaggaagttgtctaacacatcctttggaacttactatgtttcccagttttagtttttgttcgtgtgcgttgtggtattgttctgtaacagaggactatcctcagtctgcatgtaacttttatgatagttattccaaattcaagaagaagcagtattaacatcaagttgatcgacacaaagtgaatttttaatgtaattcatcatttcacatgtttgtactttgtcttcccattaagctttgccagtgttggtgattgttagatttttttacatgctggttaaagaggaatgcttaagctttaaaagttagcagtctaagacatttgcttggatcaaggtgacgaataatatgttatgggtacttgagtctgcccgggatcagtctatgtcgacatatttggtggggtgacacgcggggctatttgacacagagggtccgttggggggggatacacggataagggacctgggcgggaagttggaaagaaccccggggggtgaaaacctttggaggatgtttggggcgcgtataaagctttatttcaagggacgggttgttttaaaaagggtgtgt

SEQ ID NO: 631723 - DNA, 132 bp, Homo sapiens
ttgtgtcttgtgtgtgtgtgctgttgtctgtgtggggtgtgttgcgtgtggggctcctctcacgtcgcctgccggactccgcttggcctggcgtcgtttaccccgtcgtgcctgggccccacggtctgcccc

SEQ ID NO: 631724 - DNA, 286 bp, Homo sapiens
cgtgggatgggaaacgacgacagtaacttttcccccctgtagaaccgataggcgttttcacctggaatgtcctttttaactgattgatgcctggccccaacgcccccaaccaagtctgaacctgagcaataccaggcacagagaggtgtctacttgtaaccccaacacttgacaaaaaacaaaactgaagctgtgattggtttaggcagcaagtggccaggtgcaacttgtgtgtttataattttgttttccccaacagtaatgagatcacttacacttttgggga

SEQ ID NO: 631725 - DNA, 461 bp, Homo sapiens
tctggtctacaggtttgagccactccctggggcctgtgcagatggagggagagagggcgcacatcagtgttgactctgagctacagaagcttccatcaggttcttccagcaaagaggcaaaggcccagggttgacttttaaaatcagaactactcagttcttttttaaagcaaatttttccatcttaaacatcaatgtgatgcttcttacagtataatgctaaaacacttttgaaaaaaaaatcattatctgaaaagccagaattagaagttagcgtttcagtttttgaaaaacggaaaaaaatggttaaattcacaagaagctaacaatgaaagtgcctgatacaaataaatgagaaaagccaacatcacagactgtaaaaacaatgacttcgggaggtcgaggtcacttgaggtcaggggttggagaccagcctgagcaacatagcaaaaccctagctc

SEQ ID NO: 631726 - DNA, 901 bp, Homo sapiens
ctcttgtatggagtaaacactacgggggaaaacccgtccaccaaaactatgtatgatatttctccctctctctgcttagaataatgtgtgtttggtatgcgtgttgtggcttttgagacagcgtctcactgtgtgccgcaatctggagcgcagcaatcttggctcactgcaacctctgcctcctgggctcgagcagtcctcccacctcagcctcccgagtagctggggctacagctgctcgccaccatgctcagtttaatattttaaggtttggtagagacgaagtctcactatatgtgcccaggcgtgatctcgtcaactccgtgggctcaagcgatcctgctacctcatcctcccaaagtgctgggatttacaggcatgagccaccacaccagactctaaaatgattttatacaagtggacttcatctcttcccttggtatctgtaaaaattacaagcatacggaaaattggccccattttcttgtctctctctctctctcgttcttgtgcttattggtagtagtgtactgttggttcatctgtatcatctgagaggaagtcgcaatcagtgagcatttggccccgtaaaatacttcagccctatatctctttacaaggacattctcctttatgatcgtgatacaatcatactgggatcgaaccttaaaacagtatcaaggttcatatacagaccacattcagatttccccagtgtctcaattctgtcatttcaggatagccagttacaaaacaactccggggtccaatcgaggatctgcactggtactgcgactgtcttgtgaatatcttattcccagcagccatttcactcagggtttagaatcccttgacgactccttatcacgagcttactggcctacaaacgcggcatcatacc

SEQ ID NO: 631727 - DNA, 718 bp, Homo sapiens
gctgtcaggatgtagtgttagctgtccagcaagtcatggtcctgcatgtgaggaagagacctaagagtgttgagtgtgtgtccacactacccgtgcatgcctgggtacctgtgcgacactatggatgctcctgacacacctgtgtacaactgcacgcctgtgtatggccatgcatgctataccccatgtaaccgtgcgtggctgtgcatcactcgggatctggcagtggggcagtccaggcataacaagactcctgaagaactccttattgggaggaattgtgtccattccgtggtgacaagtgaaggcatgcatattgctcaatcgcacagagtctaggtgtatagaatggtcaagatttttacttggccatgtactggagatcgccgttctacatcgactacagcaaattacaagaaccgagtgcccacccggttgcgtcgcgagtcctgatggctagtgtgctgtgtaggctgtgctggtgcgtcagccatggttagctgctcctgagtcgcactttgtccctccacgagtaacgaatgactctggggttgatgtgggcggactctcaggggtggctagtagattgaccaccaggagcttgctgtgcaccctcgtggactgctttgttcatccgctgggcggtctgtgggcaccccgggggttccccttcagtcatcaaacggatgggtcccggatatggggttgtcctaggaca

SEQ ID NO: 631728 - DNA, 90 bp, Homo sapiens
cacgagatctactatgcatcattgtctgactatagttaataacactgtatattttaaaattgcaaagagattgcaaatggtctcaccacc

SEQ ID NO: 631729 - DNA, 290 bp, Homo sapiens
  misc_feature (73)..(73): n is a, c, g, or t
ggtatctagagatcccctccatatgtgtgccagaaatatcagaatgtccttgaacaggatattgtgatgtgtngttctttgttactcatttctgtatgcataatgagatggttggtcagagaggggaaggaagtattaaagaatgttatggggaaaaagcaaagtacaacaggaagaacacttgggggaactaatagaatctaaggactcaaggatgggctccttggaggaaataccagcttagaacaaagggagaggaaatgagaaggtgattgtgattggcggtggga

SEQ ID NO: 631730 - DNA, 171 bp, Homo sapiens
tatgttgggccatcagtaattcgtgttcttactcaagtcagcccgtcgatggtctctgctacgcccctacctgatgcaaggagagcccgtgacgagggctgcctggagtgctgtaggagaataaaataagacaagtaagacaagcgagaggggtggcatgggaccgacgta

SEQ ID NO: 631731 - DNA, 384 bp, Homo sapiens
  misc_feature (23)..(23): n is a, c, g, or t
  misc_feature (112)..(112): n is a, c, g, or t
  misc_feature (245)..(245): n is a, c, g, or t
  misc_feature (248)..(248): n is a, c, g, or t
aagcccgaatgtcaccccgagantatcaaatcattggtggtcgagaagctgaactgttcagcggagaaagggcgagtcagcgcttcgggcgctagacgcaagctggcagcancaggatcaggcatcgggcttccttacatcaggcggggcagatggggcattctggctcccggttgagcgctctggcaaggcgcgctttcgggaaagcatagccaccgcacgcgtcctgcaaaaaaatcgcccgncantgaatgtttataaaaaaacacggaaccctgggaacgtgcctaaactccaaactgcgcgggttggactaataactggcccctagggtgcgttgagcacctgaacccttgtccattggtttgcacacaaagagaacaa

SEQ ID NO: 631732 - DNA, 161 bp, Homo sapiens
attaactatacaatgagagctcacacattcaaggatgtactaagcactacaggctcacagaacagagatcccatctttgagttttcagtaccccatgggggttaaagggttttgaccacgaatgccaaaccaccaccacgaggagatttttttccccttta

SEQ ID NO: 631733 - DNA, 661 bp, Homo sapiens
ggctgtgacttcacaccacacaaacaaaaaaagtgtctgggtcgaacgtttcagcatgccacagaccaaattgagtaaagaaatgtcgtactccagattaaaaaaaaaaccttacatgaatcagatgagtgtaaaaatacagaattaccattaacatggtgtacctccacagctcaacatcctgtggggcttcatacacgccatcctcagttagacaagggccatgaattcgactgatccctgacggaagaactcccgtagacacagagacccttattaaaacgactggaatagtagactgatcatcaatcttagagagaacaccaaagaagtacacaagacagaaatgacagaaaccacccgacaggaaccaagcataccaaggcaacacaggactgctggcccatgaaagaggaccccgtgatacaaagtacaccagggtcacgagccaacagattcagatctactaacgaagaaaagcttcaagggccacagaaggacgaacatcctagggcgacaccaaggttccagtccccttctatggcaaaccaggtggactacggacgatggtcacccagatacagggacgtttggcaaggcatcataacaaccaacttgacttgtgggatgcccccccttttcaaaccaagcagcagtaaca

SEQ ID NO: 631734 - DNA, 618 bp, Homo sapiens
gcccggaagcacccgcctcccggcatggtgctcaaggccttcttccccacgtgctgcgtctcggctggacagctgggctgctggtgggacggtgggtgccggagcatgagcagcgccgtggtcctggctggtcctgcactttcccttcatccccatccatggtcaatgcagctcctggcccaggtgcggcaggccatgccaggtgggctgtggccgtgctgggcacctggtgccactgccggcaggagcccgaggagagcctgggcctgttcctgggagatgcctggtgtgcgtgtacttcaccccattgagcccatggctagctggcttgtgcctgggatgatgatggctggcactgttctaggatgctgcgaggccacccacctggcaagctgcccacttgacccctggttgcccctggtgaggaccaggtcatgctcatcttctatgaccagcgccaggtgttgcttgtcacagctacaactgccacctgtcctgccacgacctgcaggctggagccaccactgacagcactggggggcctggcttgcctgtcttcgacacggtagcacgcagtgaggtgctcttcctgcagtgaccgctttgatgagggcccga

SEQ ID NO: 631735 - DNA, 173 bp, Homo sapiens
  misc_feature (117)..(117): n is a, c, g, or t
ggagtagtccaatgcagacatacattcactatggtcggtttcaggaattccaaagaaatctgacgtcaatgcgatatccattatatacaagctataaaaatagaaacaggcatcatntccaaggataacagtatcaattcttttgaagaaattggttttaacggaaacttcgg

SEQ ID NO: 631736 - DNA, 222 bp, Homo sapiens
cacgaggggcaatgctccttcctgcgcgctgcactcaccggccccgactccgcggatctcgcccgagagaggatgggatttgaatctaccgcggactgcatcccggagtgtctatacctcaaccacggcatggagctctcctgcaccggttcgcggtgaccggtgcaagagcatagtgcccgctgtgagccgcaaagcacctgtaccgcccaggagctgcta

SEQ ID NO: 631737 - DNA, 126 bp, Homo sapiens
cgatggctcgagtaagcacagcaacatagtgtaacttcatgcttcttcaaagaagatgatcagtaactcccaggaaacatgcgccacggtcccgcgaagtcgcccacccctagatccccgcgtcat

SEQ ID NO: 631738 - DNA, 189 bp, Homo sapiens
tctggccttctcatgacctctgctggatcctcctctcctctcctgatcgatgccttccacgctctgacctctcactgttgatgccggacctgtggatctccgtgggactccgagcaacggcctgaacgagagagggctgaaaggctgcatggggcatgccacctcgctattcccgataagatgtaactc

SEQ ID NO: 631739 - DNA, 192 bp, Homo sapiens
atcgagatcaagtacggaagcaatgagatcacggtacgcaccatagaatccagtccggccttgctcaataggttaaggatctggcattgctgagagctgtggtataggttgcagacgcagctcagatcccgtgtgctgtggctctggcgtaggctggcggctacagctccgattagacccctagcctgggaa

SEQ ID NO: 631740 - DNA, 264 bp, Homo sapiens
agaaaaaaccaattttttattatgatggttctccatatttggcattgctgtaaatggctaacatttactgccaattcgggtcaaatggggggtttggtaatccccgaacccccaatttaaatgaaaaaataaaagttaaacctttccacccaagggtttacagtttgacctttcactgggtaggtaaaaaaacactttttttttaactaccgattattattccccctgaataaaaaactccaacttttatttttaaacaggagt

SEQ ID NO: 631741 - DNA, 406 bp, Homo sapiens
  misc_feature (7)..(7): n is a, c, g, or t
aagcaancaagttagaacttagaataaaatttagacaactgtataactagaataaccaatacagagaagagcttaaaggagctgatggagctgaaaccaaggcttgagaactacgtgaagaatgcagaagcctcaggagccgatgcgatcaactggaagaaagggtatcagtgatggaagatgaaatgaagcgagaagggaagtttagagaaaaaagagtaaaaagaaacgaacaaagcctccgagaaatatgagattatgtgaaaagaccaaatctatgtctcactggtgtatctgaaagtgacagggagaatggaaccaagttggaaaacactctgcaggatataatccaggagaacttccccaatctagcaaggcaggccaacattcacattcaggaaatcca

SEQ ID NO: 631742 - DNA, 287 bp, Homo sapiens
gcagaaaggatgctatagaaaattttataagtcgggcgtggtggctcacgcctgtaatcccagcactttgcggggctgaggtgggcagatcacctgaggttaggagttcaagaagagccagaccaacacggtgaagcccagtctctactaaaaatactaaaattagccagcatggtggtgcaggtctgtaatcccagctactcgggaggctggggcaggagaactgcttgaacccaggaggcagagtgtgcagtgagctgagatcttgggcatcctttgtggcagca

SEQ ID NO: 631743 - DNA, 115 bp, Homo sapiens
aattcagactactatcactacagaaatatgcagtcagtccacatttggggaaatcgcaggagtcagcacatccggagtgcaatggatagagctctcgccctggtggtatcagggc

SEQ ID NO: 631744 - DNA, 358 bp, Homo sapiens
ccagcgtagcaagctatcttgcgtgctcacttcaaggccgggacagtgtggccaaacagacggctatgtgctagaggggaaggagttggagttctatcttaggaaaatcaaagtccggaaaggcaaataaatcctcgttttgtcttcacccatgtaatgaaggtgtatattgttctgttcccaaaaaaaaacccaaaatacaaaaataacaaaaacaaaaaaaacaagtaaagccagtgaaattcacccaggaactcagcaaaaaagagccctgtataaggagaagcagcataaggaagaaagaaaattaaactcctaaattttactcaggtagaaagtttcatttaaacaatactga

SEQ ID NO: 631745 - DNA, 136 bp, Homo sapiens
agcggctctagaagcggaaatggcacactagacaacctaatgtgcctttgcctgagaggtaatgaccataaatgctcagagggcctcgatctgcaccatcagcatattgccctggcagctccctaggactggggct

SEQ ID NO: 631746 - DNA, 453 bp, Homo sapiens
  misc_feature (103)..(103): n is a, c, g, or t
  misc_feature (144)..(144): n is a, c, g, or t
  misc_feature (147)..(147): n is a, c, g, or t
  misc_feature (153)..(153): n is a, c, g, or t
  misc_feature (162)..(162): n is a, c, g, or t
  misc_feature (211)..(211): n is a, c, g, or t
  misc_feature (216)..(216): n is a, c, g, or t
gtgtgtggtccccagccccagactggattggaaaagtgtatggtgggggctttggggttgtccccatgttgtccttttgctataagtttgtggggcaagaggntgtaatattctgtattgggtgtttgggatgttaacttggcntgnttaggnttcccaccntgtgtggggcacacccccaggaagggaccctggacacggctcccatgtncaggnttaaggtggatgcacttcccgcacctccagtcttttgtgtagcagctttaacccaggtttgtctgtcacgtccagtcccgagacgggtgagtgaccccaagaaaggcttccccgacacccagacagaggttgcagggctgggggtgggtgagggtggcgggcctgcggggacattctactgtgctaaaaagccagtgcagacacagcaatatcaacatgtcattttccaaagcagaa

SEQ ID NO: 631747 - DNA, 894 bp, Homo sapiens
gagaaccgaggaccgacttcttgctctttaccctcatggcgcttctctcctgcaagtccgcctctgggccctgccgatctcttgagacttaaagtgcatcctaggggcattttaaaaatcatgtcaagctcagttgacccagaaaaagtgggcctacaaggacagcgcaattgtgcgcttggtgtaacgtcacatagagaccacgggatttgtggccagttcattattatctgaaacccaagaggtgtgcagcgcacccaataggtgcttgctcttttacatctgctttggtatcaatccacactctgatacatgacaagttctgtgggggatttctctatgtggacagtttggtcccaccggggcgcatcttttaccaaggagggcaccgaaacggctggactggtggtcctggcgtgcccaattgtggtccctggggatggacaaccaaatgtggtttggtggattggtgggacaaacacttgtgttccaccaggggcactattaacccagtaccaaattgttggcttttggcattggttttaacaggttccaaatttacagggagaggaaacctctttcacaagggaattcttaccattggtcctaatgggccgaaaaccacaagataatgttggctcattaactcccggcaggctggttttaacgacaggaacacgttttaatgtgaccatttgtagtggggcccctcaattcacctttaatggtctacacaaggcatgtcgccaaggggcagggccagaaacaacataatttaaaggggctgccagaagtaccacgggtcccaattctcccatggaccagattgtatgggagaagtctgtcctttgaggtaggttccacacagaaggcccttgtgacccaggccaatgg

SEQ ID NO: 631748 - DNA, 768 bp, Homo sapiens
caccttgcatgatcacgcgctcataatcattttccgttatctgcttcctactgctgtatggccctttgcctaacactcacaacaaaagctaagtaatacataacatctcagacgctcaggaaatagaaaccgtctgaagctatcctgcccgccatcatcctagtcctcatcgccctcccatccctacgtcatcctttactataagcagacagaggtctactcgagtgccctctcttactcatcgaagatcaagtgggcgcaccaagtggtactgatacctacgcagtacagcgcgactacggtggacgtaatcttacaagtgcctacatacttcccccaattattcctagaaccaggcgatctgcgactccttgaagtagactatcgagtagttactcccgatcgtaagtcccctcattcgatataagtgaagttgagcatgcacaagacggttctgtggcagctcatgaggctgttgcccaacattaggctttgagaagatcaggaatgcaattcccggagcgtctaagatccaagacccattttccagcgttacacgagccgggggtatactacggtcaatgctctgaaatctgtggagcagaaccacagttttcgatgccacaatccgtgcctaagaatgtagattcccctgaaaagatcttttggaaatggggcctcgtattttacctcttatagcgacccatctcttaaccccgtctaggagcccaaaataaaacaagccaagcggggccaatgccaaccaag

SEQ ID NO: 631749 - DNA, 499 bp, Homo sapiens
  misc_feature (79)..(79): n is a, c, g, or t
  misc_feature (146)..(146): n is a, c, g, or t
  misc_feature (187)..(187): n is a, c, g, or t
  misc_feature (243)..(244): n is a, c, g, or t
  misc_feature (255)..(255): n is a, c, g, or t
  misc_feature (275)..(275): n is a, c, g, or t
agtgtttgaaccccccagggttacctccttcattaaccagcaaaggatttgaagaggtttaatatctggaacaagttcntatctggctagcatgatggagttctggtttgctgaaaattttttaatgtcccaaaaccctccccccnggaagccagaatctttggtgtaactaccagagtttcttaanctaatacctgttaagaaataagggtatagtagggaggcatggtgctcaaactcttnngggaaaatccncagagatgtttgcaaccccntatgcctcgtgaacaacccccaagctgggaagtcctgaatcaaccctaagaggcccccagtgatgtgcacgaaaaatcttagggtgaaggtaaggggttcagtgggccagacccggtggctcacgcctgtaatcctagcatgttgggaggccgaggtgggtggatcacctgaggcctggagttagagaccagcctggccaacatggtgaaaccccttctctact

SEQ ID NO: 631750 - DNA, 169 bp, Homo sapiens
tcccactcgtcggtgtccgtgttgtacacctgtacgatgcccgtgacgttgttgagacgccagttgtagcccccgacgatgtagatcttcctctccagcaggcaggcccggcctctgactggccggcccgcatgggcgtcacactggtccactgtccgtctccggcaca

SEQ ID NO: 631751 - DNA, 206 bp, Homo sapiens
  misc_feature (34)..(34): n is a, c, g, or t
tgatcatgaactttcattcgcattttgttttttntttaattttattttgggtctttttttcttttaggccatgcccttggtatatggaggttcccaggctaggggtccaatcaaaactgtagctgtcggcctacatcacagccacagcaactcaggatctgagcctcatccgcagcctacaccacagatcacagcaatgccggatc

SEQ ID NO: 631752 - DNA, 190 bp, Homo sapiens
aggggtcttcaagagacactagggcttgatcgaggaggggccctggggctctgcaaatcctggccaaaccctaaggctaggctgtgactgtgtcccccggaacacaggaagacacacggagacctcagaatgctctgagcgttgagaaccaccgtggatacctttaatagggacgggggaagctagaggc

SEQ ID NO: 631753 - DNA, 433 bp, Homo sapiens
  misc_feature (423)..(423): n is a, c, g, or t
gacgccgagactggcaaaaccctgagcgtcggcgctggccaaggacgtcaccggcttcatcgtgaccaccatgacgttcgccgccaccatgagaaggcgaacccctcctccgccaagttggaccgcaacggcgtgccccgctccatttcgtcgctgctgtacgacctcggcgaggagatcgacaacgccctcgctctcgccgcgaaggcagtcgccggtcgggaagaggagggcaaggtcgcggaatactacaacgacctcaccacgccgccctacgatgactccgccgcgcccggtgaccagcccctcatcgtgctcaactcggtccccatcgatgtccgattcttccggaccgatctctccaaggcgaccaggcttgccaaccccttcaccccgacccgggattgctccgtctatcgcggngctggcttcg

SEQ ID NO: 631754 - DNA, 128 bp, Homo sapiens
taataaatgatacagcaaagagtcagcaaattatgacctatgggctaaatctggaaagggcctataagctaggaacggttagtaacatttgtgaaacgttgttaaaaaaatgtatatatatacatgta

SEQ ID NO: 631755 - DNA, 1398 bp, Homo sapiens
tctgcaagagaaaaagaagagacacccacaagggggggggtcccaccaacgcgcccccccccccctgcggtgtgtgaaaaaccctctcttcgcgtcggcagaagaaactgtgcgggagaaactcccctcccccctcggtggggagcaccccaccccacaaaaagggggggcccactacgcgcgcgcaacacaaccgccgtaataaagttctccggcagggggcgtccctccaaccaaggggccccccgctgtgtggggcaccacacagtgctgtcaagaggtgggcggccgccacaagacgacgcgtgctctccacacatgggaatgagagggtgagcgtgcgtcccccccccatcggggggggaccccaccacccacaacggtcgtctgagtcttgcgtgtgtgttggagtagacccccccccccctctggtgcgcccaccaagtcgtgtctcgttgtgcgccccccccacacaagagtgtgtgttgtgttatatgatgtgtgcgcccccccctcgtgtggcaccaccgtgtgcgctcttgtgtggtggccccccctcgtgagaggggcgcccgacccgagaggggggtgtcgtcgcgtctctcacagagagagtgtgcggggggcgacacaaataagaccgtcgtcctccgggcgcacaacaccctcgcaacacacacacgtgggtgggcgccccacccgtctcggacaggagtggagagagcgcgctgtgtcggcgtgcaccacaacgcggaggacacacacgcgcgagagagggggcgcaccacacacacgcgggctcccagcagcgtgtcacacagttgtgggctgtgtccacacccgccacaggcgcccactctctgggggcgctctctgctccactcgcgcgcccgcggaaacacccccccggggggggcgcgcacacactgtgtggaaagagcgcggcgccaccgcacacacacaagagaacgccccacagagggcgcgccgccccccgcgcgcacacacggtggggcgacacacacagagtatagagatagaactcgcaaaatgtgttgagaaagaggcgtgtgggacaccccccccacgaatcccacagcgagggccccacacgggaaacgcgcgcgggtgtgtgaataaaagagagaggagagtgtgccacaaacacacccgcgcgccccaccacagaaaactgtgtggaaagggccccggcccccgcggaacacacaccccgcggaggagagacccccgaacacccggcgggggggtgaggggaaaaacgcggggagagggagagggggccccccgcctcccccgcggtgtgagaaaaaacccacaaggcacaaagggggcccccccggggggggggcccaaaaaaaaccggggccccccccccca

SEQ ID NO: 631756 - DNA, 202 bp, Homo sapiens
gagaaataaggctgttggagagaaagtagtaagagatgcatttccggaggccattatcgtaaagccgtcggacatctttggaggagaggatagattccttaatcttttgcagtatgcatcggtttggtcctatacccttggtccttggctggagacagttaacaccagtatatgcgtgatgatcaagaattgtaatgcagta

SEQ ID NO: 631757 - DNA, 329 bp, Homo sapiens
  misc_feature (5)..(5): n is a, c, g, or t
  misc_feature (11)..(11): n is a, c, g, or t
  misc_feature (47)..(47): n is a, c, g, or t
  misc_feature (125)..(125): n is a, c, g, or t
  misc_feature (167)..(167): n is a, c, g, or t
ccagncatttncagttgggaaagtccagtgaagagatggttcaccgntggagcatctattcgtgacttcataaatcagtactccatacagagacttcaaatcaagtgtttgggtgtcattcttanatatgaaggtaatccaagaatcactaaacatttgatgaatgnctccaaaatggtaaggaaaacacatacttagaactaagagggacctggagaagtggagaccatgcaaggagaaggcaacttcaaaaaaaactataataggccaggcatggtggctaacacctgtaatctcagcactttgggaagctgaggtggggggatcac

SEQ ID NO: 631758 - DNA, 287 bp, Homo sapiens
  misc_feature (3)..(3): n is a, c, g, or t
cangtcggatgtggagtaagaggtaaactcgatggaaggagttaaaaacccagaatagggtgattggatgtgaaagcttccggggattggtcacggggataatcaatttaaaaccttcttcccattggctttcttttagcccaactaacgtaaggggaaaccgtcttgggatgtgttttgggtggcttttaatattttctaagtctcccggaatttactggaaatccttccggtaagtccattcaatccctttctccttcttacggttaattccacatccgtccggg

SEQ ID NO: 631759 - DNA, 270 bp, Homo sapiens
gaattccgcgtcgaccacgatcgagttcggcgtgaagccgttcagcagcgccgtggtgtagacatagggcttgaacgaggagccgggctggcgataggcgtcggtggcacggttgaactggctggcgccatagtcgcggccgcccaccatggcgcggatgccgccgtcgagatcggccaccaccgtcgccgcctgcgtcgcgtgatagtcgcggccgaactggcgcaattggttctcgaccgcgtcctcggcggccttctgcacgtaggt

SEQ ID NO: 631760 - DNA, 182 bp, Homo sapiens
gacatagcagtataccattggacatcaatgtcaaaagtaacttcaaatctgaggaacgcctcgggttgcaggaggtatgcctgtaagtacaaacttgccaagcaggtagtaatcctatggtacatggcacgctacgctttacataaacctagaatacagcacacccaggctaggtatgtcag

SEQ ID NO: 631761 - DNA, 1279 bp, Homo sapiens
gcaagtcaaccaagcaagtcattatgtaccctcactgtcaagcgccaacacaggcgatgctcatagagggaaaggtggaaaaaagagtaaaaggaagctcgggtaaatcgttacccgcgccatgtttactcaataaacatcaccatctagcatcaggcagtgattcagagggcaccgatcgtgtccctaggtgactaggatgtgtgtaactggcacgcggttgagcactaaacgcgatgtcaaaggataggcaataactcacattgtctgccgtgtaacttacgggaccgtgtaatgaagtggggtaccacgaggggatatcagactgatctgctagacctgtattataccagctgaaactagagctggccgcggtgaaggaggacgggcagtgagcaacaggcgagagacgacgaagacgccgtagtgggatgctttacacttcgagttaatggcgacaaacagtaacacgtaaccaagatccctacaggggtcactacaagctagcacaaaacacgtggcgatttagaacacattctcagcgtctaggagggcgaaccctcgagaagcaagaaagccgcataggtcctccgaagccaaggtacatggcgtaagaggaaggcttcatccaatggtccacaaaggacgaatcatacttgataagcgtcgaactggaagtcgcgagataatcttgaccgagacgggacacagagtgtacgcctagggcataacagtcgcaagtcgctattcgtagcagtccagtatcagacaatcaggggttgtacgaaccttcggatgttggagtccaggacatgccgtagtggtggccagacgcgtactggaaaggtgccgatcggtgcaaccggattcagaagtcactaacgtgatcctgaagattcaagagccgggagttaaaccagaggcgggacacaaactaaagtcaaatttcctcccctgggacgcaaagcggcccgaggaacgtaaggggctacgctaacaaagggccatgcccgggaaaggagatcacacaacataggagtgttataccacagacgacccacagaaaacagggtgtggcgtcgaaaaaggtggaaacccgcggaagcccgtagaagcactaaaaaagagcaggaggaacagaaactctcttgtaaaagaaccaggcggaaccagaaacagaggaggccactacagaaggaaggccaggcacacaaacatcacgtatacatactaggcacggtagcacacacacacagagaaatcagcaggtgagactaca

SEQ ID NO: 631762 - DNA, 606 bp, Homo sapiens
gctcgcactctgtttcttccgccgttccgccgtcgcgtatctctgccggtcgcaatggaagaagagatcgccgcgctggtcattgacaatggctccgggatgtgcaaagctggtttggctggggacgaagtctccccgagccgtgtttcccttccatcgctcgggcgcctcgcagtacaccgagaggcgtcatgtgatgtgagcatgggcgcgagaacaggactaccatacgttggtgcggacgtaggccacagagacaaagccgtgggcgcatgcttggacctcgtgaaagttaccgcctagttgagactatggctatcagtcgaccaaacgtagggacgaacaatggagcaagatcgtggacatccaaatcgaactatactacaatcgaagggctgcaggcctgttggtcgccccgggaaggatgccagcgccagtggctggctagaaccgaaggaccctcccttgaagcgctccatagtgccaagcagatgagaaaggatgactcaggatttagtctttagaggacccttacaatcaaccgcccgggcccatgtaacgtgggccattccaaggccgttgctggtcccttctaccgtcctctga

SEQ ID NO: 631763 - DNA, 580 bp, Homo sapiens
acaagattgaggtctgctcccagatggttcactccaggactgctacgctagtgctggcatttgtccaggcaagctcagcctcaggctgagggtcccaggcttcagtgtccctgtcctatagatctctccatgtacctgggcttcctcacagcatagcagctgggttccaatgacaagcatcccaagagagagacagacagaagccatatcacctcttagggcctagcctcagaacccacacagcatcatatgcattgcattttatttgttagaaacatatgactaaggctagccatacctaaggagaaggacattacactatacttcacgagggaaaaatatcaacggatctacagacacgttgtacaactacatacacacagtttcacacttactcacccacttcacctccattctgctcaactattcatcaaactgacacacctcaaacgcatcagcatcactgacagggacatcaaacacaagatattcactctggagctctacttctttaactgtatcctgttctcaccgctctcattaccttacttgcttctgaccatgaccttctccgccaaga

SEQ ID NO: 631764 - DNA, 921 bp, Homo sapiens
  misc_feature (516)..(516): n is a, c, g, or t
gtcggccgtaagggctgaggattttgggtccgttacgctcatgcttccgttgacctcaccgcgtgttcgctctcgccgaggtaacaagtcggttagtgaagcccgtgcgcaaacgagacatggctatttaaggataccggcaaaacacaaccgtggagctggaggtgtcaattcatcgaattcgaatcactcctatcaagccgcaagcgtaatatccttgtgaagaggttgtgtgctagacattgataagaggtagacaaatagaaaagagaatctcaaatgtgaataggaccagttcgaatgccattaccaagactttggagtaatcatgtacttatataaatacttcttgtggtgatggttctaagaggtgggatcgtttccgagatgagtaattcagaatagagtcatttgaattgcgagcagtcattctgagattgttgaagcacgattaattccatcacgtatttgattccaggacgtttgaaggttggaatgtcaccatttgtaagattngcttaaagtcaacgtattgttaataatattggattgatcaagttcgttatagaaaaaaaaagaagtgatcggggggcgcgcgtctaaaggtattgactttctgtatggggctcaagggggtttgacgctgttatccaaggttagtttgtttacaaatggtggctgtagaagtagcttgtacttataagcggtgagggcggactgtgagactagcatcatttagaagacgtgccaaaaggtggagaacctcgaggttgttgggaaaggaacttttgttgttgtgggtgtgccttaatgggagatcttgctaagagaattaaagcataaggtaattaagagttacgagtttgggtgtaaacgtggaatgatggtatgaaaatggaaaggtgtgtttggaatttttgt

SEQ ID NO: 631765 - DNA, 360 bp, Homo sapiens
tgatgtatcctccttgtctctggattcctctgctctatccctgatgtatagccatgctacaggactcacgctggtatgcactccccaacttcccagcatgcgtgtactaccccaccctgtcccagagcctgcttccacatcctgctgcctctccctcaagagtccctgaacccttccagatggggggtaaaggtcacacgaaggggactaaggtcatcataggcactcaggaaaacttcctccccatttacctcctcaactacaggcctggggccagcggaaactcacggaacaagcagctgagggccaggacaaattgtgcctcatccagagactggcagtagtacacccagaggcaag

SEQ ID NO: 631766 - DNA, 1319 bp, Homo sapiens
ggcacgagggaccagtctttggttatacatttggcaattacttgggagttgttttgaggccacctactaagaatacttgggatagagattacaaattaaacccataagccaggtagacgaggagcaaggaaatgtctgggaattcgtatttcatcggcatatatttaaaacatcttatgcttctaatttccggtgtgagtcaacctctgcggactgaacatcactaaaactctaaggaaacgtctctttttaatcctctgaaaaatcaatacatttaaaaactgcccgttgtgtcgacgctcggaaagagggtagaaaacagcgagtctaagggaaagaggtgcccctgcctccccaggcagccagggcccaggcccggtaacggagtcgtcctctttatgcccaaagccgccggacgggatgcaggtcgaggaccggccgcgcggcgcggagcggggatgcaggtaacagggcccgcgcgaccattccaccggctacggccacccgacacacaccccagaggcagtgtccacgcagccggggtcctggatggcttggcctcgggtcgtccggggcttctcggtgcgcccgcccccgcccccgctctgactcagcatcccagcctcccacagggggcgggagcgctccccgccgggcggcgcaggcctgaccgaccgcgccccgcgccgccttggcccctcagcccgcggccgtctcacttacccagccgggtctccgccgcgccaccgccggcgggctcccgcggcctcctcgagactcaggacacttccggcttcgcaagccctggccggaggccacgtgaccgacggccggcgcgccggtgcgggtgcgcgtgcgcacgcctatggcccgtctggtagtcaccacagccgcggcggcaactgccgagtcggcttccgcggccacggtaatgagggggatgtctggagacaccccgtccactgttgccctcgccctttactctaaaggggaatgaggagccctgagcagcgaacacagtaattgggattcccgcaactgcaaatcccgccccttccccgagcgctggccgacagtagggcggaccgacgctgagcaagggattacatcccaagatttacaggtgtgcagaacgtgggacacgtggggggcaggcacagacggccggcagagctgggagggatggattctatgttttaagggcccactttggctgcagtggagccagattatcgtctcgcagtaattcagactttacattgtttttttcattttcccatcacccagaaatacattaaattcttaatgtaaaaatgttc

SEQ ID NO: 631767 - DNA, 100 bp, Homo sapiens
tacttcattccagccaataaagatcctccaatggcaaaagtcaaagctaaagacttccaagaaacgggctactggggcagagatttcaacaataaaacaa

SEQ ID NO: 631768 - DNA, 989 bp, Homo sapiens
tacaacagcctctacctgtcgccccagggagaaaggggtagtgatacaagtctcatagccagagatggttttccacgtccgttctagatattcccgacacaagaggctgagacaggaggttattttcaatttcatttctggaattcaaatcatctaattccctttattactgttgtagtccctcacttggactatccctctgattttcacgatagaaatacgggaggtctagagcttctattccttggccataggtcacaccggagagctggcccagtcttcacaaacccttgcaacattgcctgaagattatggaataacgatgtattctcactcccttgaatctcaacgggcgtaactctggaagcacagcttgacctacatgctcatttcataccacatgcatcatcagagtgcacccgaggctcaagctccatccaaaaccatgggagctcatcccactacacacaggcacccgcgccacacacataccaccgcagtccgccacgccaccctcaagagctacacgccgccaattccacttggcacccgtcacttcttggtgctacctgacacacctctcccctcccaccttacgcctcctgccgtgcacacctcccacaccagaccacaacgaacatccttcactctccatcaccttcaccgcctggctcacacctggcgcaaaccacgcacacagcaagctagcgccaaagcgcccagctcgggacacgagcacaccgccccaagccccgcacaccaccaccacaacaccccaccacatccgcgcgggcagggcgcccgcgcggaggctagaggacatacacaacgcggcccccgccccgcacgcaacacagcacagcgccccacagggacgccagcccaaccccgcgcgcacacccatgaccggggggccgagacaaaacacacaccgacacccaccgcgcagaccaaccccagggaccgcgcaccgcccccgcacagccccc

SEQ ID NO: 631769 - DNA, 329 bp, Homo sapiens
tgcgggcggggggcagagtttcattgttgttgcccagggtggagtgcaatggcatgatctcgactcagcgcatcctctgtctccctggttcgagtggctctcctgcccccacctcctgaggagctgggattacgctaggcacccgccaccacgcctggctcattttttgtatttttagtacagacagggtttcaccatgttggtcaggctggtcttgaactcctgatctcaggtgatccacctgccttggcctcccaaagtactaggattacagactaggtgagccaatttttttttgtatttttctttttttcgtcgacgcggccgcg

SEQ ID NO: 631770 - DNA, 313 bp, Homo sapiens
ttcattgtgactgattagcctgtactgaaatgatatggtccgataaatattatcctattctcgtgaatctcactgcacttgatttcgctgtataacaggacaagtactccaatttatgaaaagaactagtccagcgcgcaggtggcgcacgccgtgttactctcatcacagttattaacctcctgcttgttatgttgttctcctccaactaagctcactaagtatgctgtgaccgctggtgtatgccaccaggtctggtccaggtatgacttcttaatctgggagacaaggccgccctatgtcgcctaggctg

SEQ ID NO: 631771 - DNA, 672 bp, Homo sapiens
gaatgtgaaataggtaggtgcgtgtagtcccagctactcaggaggctgaggcaggagaatcgcttgaacctaggaggtggaagttgcagtgagccaggatcgcgccactgcactccagcctgggtgacagagcgagactccagcacagtggctcactcctgtaatcctaccactttgggaggccgaggagggcagatagtgtgagctcaggagttcgagaccagcctgggcaacatggtgaaaccctgtctcttctaaaacacaaaaaattagccaggcgtggcggcatgtgcctgtggtcccagcgacttgggaggctgaggcaggagaattgcttgaacctgggaggcggaggttgcagagagctgagatcatgccactgcactccagcctggaaacagagggagactccgtctcaaaaaaaaaaaaaattaatctaagatttccttggggttccatttaagaataattaagggatatctcatattctggtaaaaaagactctagaacatagcaaagaaaatgggtattcaaggatttcaaaaggaactatttaagcggaaagatagttcatgtcctgggataagaaagctcaatatattcaagatgtcagtgcttctcacctggatctatagatgcagtgcattaccattcaaaatccagcagatattt

SEQ ID NO: 631772 - DNA, 1743 bp, Homo sapiens
  misc_feature (403)..(403): n is a, c, g, or t
tacactcccaagagtgccttcgggaacccctctccccactacccaaccagagagacagccccacgcccggcaagacgcaactccgggccacggagggcgccgcccgtacagcccggccgggtcagggggcttcgccgccgagcaccctccggcagccgccctcgggcctccgcggccgggcgggagggcgcctccccgaccacacttcggccgcttggcacccacagccgggagggcgtgaggaaggactcggtctaactccggggaaccctcggagttccggcgcagacacccgagggggtgtcctgggaactccttcgcccgcgacacccgttcttctccgtctcccgaccaccagcgacgcagcagggcggctgccggcccggcccggcccgccttgcgngctgtgcgcggcgcactcttcctccgcggggccgtgaaggcaccggcgcccccgcgcgcccagctgcccggccccgccgcctaagccgccgcgttgctggcgggtagccgcgggcctccggtgcgcgggccccggcgcgtccccgagcgcgcgcctggccgcggccccgcgcgagttgcactaactttccggggcgggggaagggtgggcgccgcgggcccggctcccaggccttacctgtgctcaagttgtcgttgattttcaaaggcacccgcaggatgtagaccaggaatagcacgatgaagaaccacacggtccacagatacgtccaagaccaaactatgcaggacttgagctgctccagaaagcccgtggccgcttcagccatgtttcagcgctcctctctgctgccgcggctcttggtgtctgccgggatgattcaccggcccggagcgcactcgcgccgccgccgccgccgcgcccgggcgccccggagccgcccgccgcggggacgcggctcggcggaaatcgcgcgggccgcgggcgcgccggcttttccttctccagccttattgctaactctctaaaggtccctacaagtggctttcgtggagcgatcacgtggcccctgccccctcgcgttctgggtccatttatatttattatgctaatatttagaaagagaaggccaagtggcgcgccgaaggaaacgcctcaggcagttacaacccgcataagttgagcgtttaccacacgccaggcgctgctccacgatccgtacaatctcatttaacccctgcaacaattccccactacgatcctctttctataggtagggaaactgaggctcacagcagctgcgtagtttaccttaaggtggaaccaaaattcaattgcagtggtgtattctggggtccgaggtcttaaaccctactctgctcccttatcaggattcaggctcagggaatgaataaacccgggacagctaggagaagggaggaggtgcgctcctgtcgccggctagtaggcctgaagataaatcactctattcagcaagatttgggtggcagatgctatttacctttgttctgtctctttgaagcagcgcagggattttccagagaaatcttgacagatgaatgtttatcctccaggttttttggtgatcagaggtcaaactattctcagcctgtttttaatataaacaattctctgggataattttgactgtgaaacggccacctctaacagaaagtccattttaaacattgttttgttgtttttgttttgttttgactgtgctgaataaaatgtttcttttattctaaaatgttttctca

SEQ ID NO: 631773 - DNA, 1164 bp, Homo sapiens
  misc_feature (408)..(408): n is a, c, g, or t
  misc_feature (962)..(962): n is a, c, g, or t
gattgtctgctgactgaccttagattacttatcatctccatcgtcatatacaggacgagatgttcattccacataggaagatggtaacacgggtatgctttgaagatggtatggccggacgggaagtgctatacttcgggaggtcaacaacatgatctcggaaattaatccaagatatcgttgtgtcgcaggcggtcattatgtcggtgcttgggggactgcacgtatacgcagaactatgaacctatttgacaagtactgtccagctgccagggcattcactcggtgctgatcggcgtatggttgccgtgaggcctctcgtcacaagtcttgactcaacgtaattcactattcctgtggtcacatctgcactgtaggtagtcatccgtgcgatatcagcggtggtgnactctgtagtaccaccgacggatgtgcattgaactgatgacaagtcgctggtacgacaatcgtcattcaacggtgagcaagatcgcgtggcattatagacggtcatgctaacgtctcactagtgtagatgccaccttgccaagtgatatagagccgactggtacatactcggagtggagtagcgtctactcactcgaccgcgtgagcaacatggctagtattcgacttctcacatgcagccatagtatagaattgtcatctaaaagaatggtggaagtgattatgtacgtcgagcttgcatctcagacggtgggtgccgtttccgtgccatgcacctaagtatccgctgtctgatacatatccctgtttagagcatgtcctggccatatagcgttgatctcggtggagcccttcccaatggtcgtttccgagggtgggccattgtggattggtgtgcgagagcagtagacctttcacgtgggagtcccagggctgatcgcctgtctcggcaggtctggtatcccgggtggggtcatgcgtgtcgggcactgganaccggcggttgcgccacgcgtttggcgccccaccactggtgtgccgcccaacctcgtgtaagtctcaacagagcagggggtgggacaccacttgtagggcgcgccgcgcggaggagcactcaggccggagaggcgccgacaggatgacggccatctcacgggtggagtaaacacgccctcagacctgtccggtagcaaagca

SEQ ID NO: 631774 - DNA, 2651 bp, Homo sapiens
  misc_feature (160)..(160): n is a, c, g, or t
  misc_feature (341)..(341): n is a, c, g, or t
  misc_feature (352)..(352): n is a, c, g, or t
  misc_feature (1311)..(1311): n is a, c, g, or t
tcatccctcctttgtgctctactcattttactttgcattatagttttgtgcccatttttctttccctgagtgctcaatatctcaagatactgaagacagggaccatgtcttggtcatcattccattcctctacacccgcaccaagcactgcgactcgctntagtatgactcaatgaatttattatttgattgtaagagaaaagaggttcaacataaagtccttttctaagccaggcatggtggcgcacacccgtagtcgaaataatcagaaggttgaggcagaaggattgcttgagcccaggaattcgagtccagcacggtcaacatagtaagacatttantgcagtggccnggaaccaaacttgcaatatctccaaggtaagcctgtcttttctgcagctgaaaggatcagaaggcagcatgccagctggtccataaaatatgatcaaatgaggattaaaattgtcacagatggtcaagatattgagaagataccaagcagatatccaagaacgactccagaacacttttagcagattccatccccctacaggtacagagctgggcctatggaagccctggctcctggctgcctgattgtgatggtgtctttggcttccttgaggaggaaggggaggcctgcgccatctgcaactcctaaaagcagctccagattcagtaacctctccaggaacacacttgccttcatcacaggaagagtaagcaccacagggttgtctaaagcgaagaagacaatattgcgacaagcagccatccaaaaagatgaaaagcgagaaagccatggtctttccgatgacagactcaaaagggctgagcagcacctattcaaatggtgagacaattctagagtgctgaatcctatccgcctcccagggacacgatcccgagggatacttgaaatttccagatttaaaggactgtaacccttagctcgaaatttactttgtgtttcggaactctctggagtgttaaggctcgtgtgttttctttgcgggtgtttttttaacgactcagtgggccggctccaagtttgtgaagatcctgttaattacctcctgcatttaccaccgaccaaggatgggaggcacgcggcacttgctgagcatatgtagagccgggagggcgtgaggaaggactcggtctaactccggggaaccctcggagttccggcgcagacacccgagggggtgtcctgggaactccttcgcccgcgacacccgttcttctccgtctcccgaccaccagcgacgcagcagggcggctgccggcccggcccggcccgccttgcgngctgtgcgcggcgcactcttcctccgcggggccgtgaaggcaccggcgcccccgcgcgcccagctgcccggccccgccgcctaagccgccgcgttgctggcgggtagccgcgggcctccggtgcgcgggccccggcgcgtccccgagcgcgcgcctggccgcggccccgcgcgagttgcactaactttccggggcgggggaagggtgggcgccgcgggcccggctcccaggccttacctgtgctcaagttgtcgttgattttcaaaggcacccgcaggatgtagaccaggaatagcacgatgaagaaccacacggtccacagatacgtccaagaccaaactatgcaggacttgagctgctccagaaagcccgtggccgcttcagccatgtttcagcgctcctctctgctgccgcggctcttggtgtctgccgggatgattcaccggcccggagcgcactcgcgccgccgccgccgccgcgcccgggcgccccggagccgcccgccgcggggacgcggctcggcggaaatcgcgcgggccgcgggcgcgccggcttttccttctccagccttattgctaactctctaaaggtccctacaagtggctttcgtggagcgatcacgtggcccctgccccctcgcgttctgggtccatttatatttattatgctaatatttagaaagagaaggccaagtggcgcgccgaaggaaacgcctcaggcagttacaacccgcataagttgagcgtttaccacacgccaggcgctgctccacgatccgtacaatctcatttaacccctgcaacaattccccactacgatcctctttctataggtagggaaactgaggctcacagcagctgcgtagtttaccttaaggtggaaccaaaattcaattgcagtggtgtattctggggtccgaggtcttaaaccctactctgctcccttatcaggattcaggctcagggaatgaataaacccgggacagctaggagaagggaggaggtgcgctcctgtcgccggctagtaggcctgaagataaatcactctattcagcaagatttgggtggcagatgctatttacctttgttctgtctctttgaagcagcgcagggattttccagagaaatcttgacagatgaatgtttatcctccaggttttttggtgatcagaggtcaaactattctcagcctgtttttaatataaacaattctctgggataattttgactgtgaaacggccacctctaacagaaagtccattttaaacattgttttgttgtttttgttttgttttgactgtgctgaataaaatgtttcttttattctaaaatgttttctca

SEQ ID NO: 631775 - DNA, 1887 bp, Homo sapiens
  misc_feature (403)..(403): n is a, c, g, or t
tacactcccaagagtgccttcgggaacccctctccccactacccaaccagagagacagccccacgcccggcaagacgcaactccgggccacggagggcgccgcccgtacagcccggccgggtcagggggcttcgccgccgagcaccctccggcagccgccctcgggcctccgcggccgggcgggagggcgcctccccgaccacacttcggccgcttggcacccacagccgggagggcgtgaggaaggactcggtctaactccggggaaccctcggagttccggcgcagacacccgagggggtgtcctgggaactccttcgcccgcgacacccgttcttctccgtctcccgaccaccagcgacgcagcagggcggctgccggcccggcccggcccgccttgcgngctgtgcgcggcgcactcttcctccgcggggccgtgaaggcaccggcgcccccgcgcgcccagctgcccggccccgccgcctaagccgccgcgttgctggcgggtagccgcgggcctccggtgcgcgggccccggcgcgtccccgagcgcgcgcctggccgcggccccgcgcgagttgcactaactttccggggcgggggaagggtgggcgccgcgggcccggctcccaggccttacctgtgctcaagttgtcgttgattttcaaaggcacccgcaggatgtagaccaggaatagcacgatgaagaaccacacggtccacagatacgtccaagaccaaactatgcaggacttgagctgctccagaaagcccgtggccgcttcagccatgtttcagcgctcctctctgctgccgcggctcttggtgtctgccgggatgattcaccggcccggagcgcactcgcgccgccgccgccgccgcgcccgggcgccccggagccgcccgccgcggggacgcggctcggcggaaatcgcgcgggccgcgggcgcgccggcttttccttctccagccttattgctaactctctaaaggtccctacaagtggctttcgtggagcgatcacgtggcccctgccccctcgcgttctgggtccatttatatttattatgctaatatttagaaagagaaggccaagtggcgcgccgaaggaaacgcctcaggcagttacaacccgcataagttgagcgtttaccacacgccaggcgctgctccacgatccgtacaatctcatttaacccctgcaacaattccccactacgatcctctttctataggtagggaaactgaggctcacagcagctgcgtagtttaccttaaggtggaaccaaaattcaattgcagtggtgtattctggggtccgaggtcttaaaccctactctgctcccttatcaggattcaggctcagggaatgaataaacccgggacagctaggagaagggaggaggtgcgctcctgtcgccggctagtaggcctgaagataaatcactctattcagcaagatttgggtggcagatgctatttacctttgttctgtctctttgaagcagcgcagggattttccagagaaatcttgacagatgaatgtttatcctccaggttttttggtgatcagaggtcaaactattctcagcctgtttttaatataaacaattctctgggataattttgactgtgaaacggccacctctaacagaaagtccattttaaacattgttttgttgtttttgttttgttttgactgtgctgaataaaatgtttcttttattctaaaatgttttctcagctgaaattttcaagtctgtttctgtccgtaagtgatttgactttctatgtattagatggtaatgaggaaattgcaggttttccagtctacatctatttttaaaattctgagcataaagaatattttattataaaaaaaaaaaa

SEQ ID NO: 631776 - DNA, 1067 bp, Homo sapiens
gggcaaactgtattcattcaagccatgggcgacctgtattcactcataacttttagctgagaaggcctaccagacacaagacataaaatcaatgtacaacacaaattgtgtgtcacaacgtgatgcagatactaagttttatataaaagaggttcataggatccccaaattagtattcactcggctcaatttatctaccctaagcacgtggtgaagttcgttcccagctccacgacgctccttggacgacccgtaagatggctcaagggtgagtactattgtattagaaatgaacttggtcgtcacgactttggagcctgatccgaagtagaatgtcttttccatgcagcagaaggtgggtaagggagatgggtcccctccagaaaatgcgtgagaaatggtagcaagacgggattccctctcttcggtctactcctcagatggcttccctctgtgagtgagatgaagcatttgtcccctcgatcccatgcacatctcgattgctagcgctgctggcgggagcctatgatccagtgtgtccaggatagagtccagatctgctccctccggtacgttgttctctctctggtaggatcgctgtctatagctacagatgagcaagagggcatccagggactgccagggctttcgttctcccatactctgtgggtgagaacgtggagaacagaacacattcagtcaggaggtcaatcccccatgcaattgctccagcttcacatgtgaggaaaacagctgggtcaagaagctggtgaattcatttattagccacttagcagttatgaagctagaagggcattctgtagcactggttttggtccagcatatactggtcacctaccggtctaagaggcgaagatacttcacgccaactaggcgggatttaaacggagaaaacctcccctggggcttctctcccataggggtggtaagagacccccctcgggggggtgggaaacccccggatatggcgccggaaaatatgcatggggaggcgatttggagagaagaggaaccacttagaacccgtcagcgagcatcaacacaaa

SEQ ID NO: 631777 - DNA, 2350 bp, Homo sapiens
  misc_feature (160)..(160): n is a, c, g, or t
  misc_feature (341)..(341): n is a, c, g, or t
  misc_feature (352)..(352): n is a, c, g, or t
  misc_feature (1010)..(1010): n is a, c, g, or t
tcatccctcctttgtgctctactcattttactttgcattatagttttgtgcccatttttctttccctgagtgctcaatatctcaagatactgaagacagggaccatgtcttggtcatcattccattcctctacacccgcaccaagcactgcgactcgctntagtatgactcaatgaatttattatttgattgtaagagaaaagaggttcaacataaagtccttttctaagccaggcatggtggcgcacacccgtagtcgaaataatcagaaggttgaggcagaaggattgcttgagcccaggaattcgagtccagcacggtcaacatagtaagacatttantgcagtggccnggaaccaaacttgcaatatctccaaggtaagcctgtcttttctgcagctgaaaggatcagaaggcagcatgccagctggtcttgtctaaagcgaagaagacaatattgcgacaagcagccatccaaaaagatgaaaagcgagaaagccatggtctttccgatgacagactcaaaagggctgagcagcacctattcaaatggtgagacaattctagagtgctgaatcctatccgcctcccagggacacgatcccgagggatacttgaaatttccagatttaaaggactgtaacccttagctcgaaatttactttgtgtttcggaactctctggagtgttaaggctcgtgtgttttctttgcgggtgtttttttaacgactcagtgggccggctccaagtttgtgaagatcctgttaattacctcctgcatttaccaccgaccaaggatgggaggcacgcggcacttgctgagcatatgtagagccgggagggcgtgaggaaggactcggtctaactccggggaaccctcggagttccggcgcagacacccgagggggtgtcctgggaactccttcgcccgcgacacccgttcttctccgtctcccgaccaccagcgacgcagcagggcggctgccggcccggcccggcccgccttgcgngctgtgcgcggcgcactcttcctccgcggggccgtgaaggcaccggcgcccccgcgcgcccagctgcccggccccgccgcctaagccgccgcgttgctggcgggtagccgcgggcctccggtgcgcgggccccggcgcgtccccgagcgcgcgcctggccgcggccccgcgcgagttgcactaactttccggggcgggggaagggtgggcgccgcgggcccggctcccaggccttacctgtgctcaagttgtcgttgattttcaaaggcacccgcaggatgtagaccaggaatagcacgatgaagaaccacacggtccacagatacgtccaagaccaaactatgcaggacttgagctgctccagaaagcccgtggccgcttcagccatgtttcagcgctcctctctgctgccgcggctcttggtgtctgccgggatgattcaccggcccggagcgcactcgcgccgccgccgccgccgcgcccgggcgccccggagccgcccgccgcggggacgcggctcggcggaaatcgcgcgggccgcgggcgcgccggcttttccttctccagccttattgctaactctctaaaggtccctacaagtggctttcgtggagcgatcacgtggcccctgccccctcgcgttctgggtccatttatatttattatgctaatatttagaaagagaaggccaagtggcgcgccgaaggaaacgcctcaggcagttacaacccgcataagttgagcgtttaccacacgccaggcgctgctccacgatccgtacaatctcatttaacccctgcaacaattccccactacgatcctctttctataggtagggaaactgaggctcacagcagctgcgtagtttaccttaaggtggaaccaaaattcaattgcagtggtgtattctggggtccgaggtcttaaaccctactctgctcccttatcaggattcaggctcagggaatgaataaacccgggacagctaggagaagggaggaggtgcgctcctgtcgccggctagtaggcctgaagataaatcactctattcagcaagatttgggtggcagatgctatttacctttgttctgtctctttgaagcagcgcagggattttccagagaaatcttgacagatgaatgtttatcctccaggttttttggtgatcagaggtcaaactattctcagcctgtttttaatataaacaattctctgggataattttgactgtgaaacggccacctctaacagaaagtccattttaaacattgttttgttgtttttgttttgttttgactgtgctgaataaaatgtttcttttattctaaaatgttttctca

SEQ ID NO: 631778 - DNA, 744 bp, Homo sapiens
gccgcgagcagagccgccagccctgccagctgcgccgggacgctggtggccatgactggctttcgtggatgtgtatgttcctgaggaaagatgatttgctgtgcgtgctcctgtggggaggacatgcagtgtctgcctgggagaagaggcagctgaggccgtggcccggagtagtaggagccacaagccaccctgggcaggacgaggccctgagggaggacaactgtcatctgggaagtaacaacgcaggatgccccctggggtggactgccccatggaattctggaccaaggaggagaatcagagcgttgtggttgacttcctgctgcccacaggggtctacctgaacttccctgtgtcccgcaatgccaacctcagcaccatcaagcagctgctgtggcaccgcgcccagtatgagccgctcttccacatgctcagtggccccgaggcctatgtgttcacctgcatcaaccagacagcggagcagcaagagctggaggacgagcaacggcgtctgtgtgacgtgcagcccttcctgcccgtcctgcgcctggtggcccgtgagggcgaccgcgtgaagaagctcatcaactcacagatcagcctcctgagtagctgggattacaggttgtgcaccaccgtacccagctaatttttgtattttagtagagacgggggtttcaccatgttggcctgggctggtctcgaactcctgacctcaggtgatccaacccgctgagcctc

SEQ ID NO: 631779 - DNA, 1235 bp, Homo sapiens
ggtagactcgctgcgtcgtgcgcacggagtcagcgtcggccgggatccggcgctagtatctgggcctgcctaggaatgccgagatggccgacgacgcgccagcttcagcctcgaggagaactgtgctctgatgacccgcggtgttcgagccccaatgctcccgatggtactttgtgctgcagcggagtttggtggagctgcgggaaatgttgaagcgccaggagagacttttgcagcaacgagtaagctggggtcccgcgtgagtcatccgcccaggctccttcaggcttcgagctaccctgggcggctccccttccccttccacggaacttctgattccctattccccgtggaacgggtgacgttgtgacctcagatcgaaacaatatcgcattcagatccataccgggcgacgttggaccggcaggggcttgctgacggaagaagcctgtgccatctatcctggacgcaggagaacattcactttctggccaaacactttggcgccctgcacccagagcgttaaccgcgacgcatcgttttggacctcgtataatggccaacacgtgcacagaggcttgccccaatgtggccagaaactgtggaaagcacagcttcaggaaagaaaaacaggtgcagcctgtgatagaccccgttgttaaaggatacttacggaaactcggtagcgccgtcaagtggcgaaccaaacggcacatttgccagaccagtttggaatcgtgggggttacacggaactacacgcggcccgagaaaatctctcgaaccccggactaacgttaggagtaccgatttcatccagcttaaggtatccactgcgcaattgattcgctccagggaacgaaataaacgcacgtcgcaaagactccaatcgtcacgagaaagcccctccaacacaaagcaccccacggggaacacctaggagcgcacggaaccgaaaacacacgatgagacaaccggacagactccaccagacaagaacaaccgccgcagggactggaaggagtaacagccagcatgtcaaacacacaggcggaccacagccatactccaaggagcaaaactaagccaggacaagggaggaacacagcccaccccaaacctgaacagccaaagtaagcccgtccaccccagccggccacaccgagatcacaaaaatacaccacggacaccaagacatctccagacagcaacagaacaaccaacgacgaatggaca

SEQ ID NO: 631780 - DNA, 149 bp, Homo sapiens
acccgaagacggggggggctattagtggccaaacaagggttttggaattgccccgtcctctaaattaacgcgtgggcccccccgggtaaattgaggccgtttttccccccggccgtttaagaacaaaccaattaaggactttcctggcg

SEQ ID NO: 631781 - DNA, 2255 bp, Homo sapiens
  misc_feature (160)..(160): n is a, c, g, or t
  misc_feature (915)..(915): n is a, c, g, or t
tcatccctcctttgtgctctactcattttactttgcattatagttttgtgcccatttttctttccctgagtgctcaatatctcaagatactgaagacagggaccatgtcttggtcatcattccattcctctacacccgcaccaagcactgcgactcgctntagtatgactcaatgaatttattatttgattgtaagagaaaagaggttcaacataaagtccttttctaagccaggcatggtggcgcacacccgtagtcgaaataatcagaaggttgaggcagaaggattgcttgagcccaggaattcgagtccagcacggtcaacatagtaagacattttgtctaaagcgaagaagacaatattgcgacaagcagccatccaaaaagatgaaaagcgagaaagccatggtctttccgatgacagactcaaaagggctgagcagcacctattcaaatggtgagacaattctagagtgctgaatcctatccgcctcccagggacacgatcccgagggatacttgaaatttccagatttaaaggactgtaacccttagctcgaaatttactttgtgtttcggaactctctggagtgttaaggctcgtgtgttttctttgcgggtgtttttttaacgactcagtgggccggctccaagtttgtgaagatcctgttaattacctcctgcatttaccaccgaccaaggatgggaggcacgcggcacttgctgagcatatgtagagccgggagggcgtgaggaaggactcggtctaactccggggaaccctcggagttccggcgcagacacccgagggggtgtcctgggaactccttcgcccgcgacacccgttcttctccgtctcccgaccaccagcgacgcagcagggcggctgccggcccggcccggcccgccttgcgngctgtgcgcggcgcactcttcctccgcggggccgtgaaggcaccggcgcccccgcgcgcccagctgcccggccccgccgcctaagccgccgcgttgctggcgggtagccgcgggcctccggtgcgcgggccccggcgcgtccccgagcgcgcgcctggccgcggccccgcgcgagttgcactaactttccggggcgggggaagggtgggcgccgcgggcccggctcccaggccttacctgtgctcaagttgtcgttgattttcaaaggcacccgcaggatgtagaccaggaatagcacgatgaagaaccacacggtccacagatacgtccaagaccaaactatgcaggacttgagctgctccagaaagcccgtggccgcttcagccatgtttcagcgctcctctctgctgccgcggctcttggtgtctgccgggatgattcaccggcccggagcgcactcgcgccgccgccgccgccgcgcccgggcgccccggagccgcccgccgcggggacgcggctcggcggaaatcgcgcgggccgcgggcgcgccggcttttccttctccagccttattgctaactctctaaaggtccctacaagtggctttcgtggagcgatcacgtggcccctgccccctcgcgttctgggtccatttatatttattatgctaatatttagaaagagaaggccaagtggcgcgccgaaggaaacgcctcaggcagttacaacccgcataagttgagcgtttaccacacgccaggcgctgctccacgatccgtacaatctcatttaacccctgcaacaattccccactacgatcctctttctataggtagggaaactgaggctcacagcagctgcgtagtttaccttaaggtggaaccaaaattcaattgcagtggtgtattctggggtccgaggtcttaaaccctactctgctcccttatcaggattcaggctcagggaatgaataaacccgggacagctaggagaagggaggaggtgcgctcctgtcgccggctagtaggcctgaagataaatcactctattcagcaagatttgggtggcagatgctatttacctttgttctgtctctttgaagcagcgcagggattttccagagaaatcttgacagatgaatgtttatcctccaggttttttggtgatcagaggtcaaactattctcagcctgtttttaatataaacaattctctgggataattttgactgtgaaacggccacctctaacagaaagtccattttaaacattgttttgttgtttttgttttgttttgactgtgctgaataaaatgtttcttttattctaaaatgttttctca

SEQ ID NO: 631782 - DNA, 144 bp, Homo sapiens
aacctgtggtccccgctcctgggagtcaccatattgatgctgaacttagtgcggacacccgatctggatacgcgcactacatgcccagaactcctgggctcaatgcgatcctcccacctcagcatcccgagtagctgggactac

SEQ ID NO: 631783 - DNA, 364 bp, Homo sapiens
  misc_feature (20)..(20): n is a, c, g, or t
gacactctaggggctccaantccctggggctgtgttggaaagctcaaagaggtcacagacccccgctcaagggaaaaattcttatttatatctttattattattatttttggagacagagtctggccctgtcacccacactggagtgcggtggcgcaatcttggctcaccgcaacctccgcctccaaggttcaagcaatcctcctgcctcagcctcctgagtagctggcattaaaggcacccaccaccacgcctggctaatttttgtaactttagtagagatggggttgcaccatgttggccaagcaggtctcgaactcctgacctcaaacgatccacccacctcggcccctagaggggtaccg

SEQ ID NO: 631784 - DNA, 195 bp, Homo sapiens
tgactaggatctcgtccaaagtgaacgtcgtgcgataccagcgaaagaggtacacacacattcttagccaacaagaatgtactctttgtaaaagtactagataagtcttccatttggtcactagggaagtagtataaaatagtgttgcgatgccaaacaaagaaaaaccaggctttccatgtagtaacactgact

SEQ ID NO: 631785 - DNA, 324 bp, Homo sapiens
  misc_feature (246)..(246): n is a, c, g, or t
  misc_feature (248)..(248): n is a, c, g, or t
gacgcacagcacctcggtgtcttcatcgccgacatcggataccaccaggcgttcgttctggacgaagtgcgcgtgccagtgggtcggaagccgttgctgcagcgcggcctggtccgccggtgcgatgtcggagaacagaacggacagacggttttgtgcggtcatgggccctcctcgattacccggtgcagggacaggatgcagaacgcggcgatgaagtgcccggtcttggtgccttgcgcgagntntcttgcgcgaataccgtcggcagccggccggcgacgcatcgcgcatggtctcgaatccgtcgagcaactgaaccgt

SEQ ID NO: 631786 - DNA, 299 bp, Homo sapiens
gtgaacatatttttgaaaagaaacaaaattgacaatcctttagccaaactagaaaacagagaaaaagcaaatacaatcagaaatgaaaaaggagacattacaaccaatactgtagaaaatcaaaggatcattagtggctattatgaatgagtatatgccaattgattggattatttagaaaaatgagataaattcctagacacatacaacctaccaaaattgaagaaggaggaaattcaaaacctgaacatacccataacaaataccaaggtctaaagcataatagaaagaatcctagc

SEQ ID NO: 631787 - DNA, 165 bp, Homo sapiens
gctcggtacctcagttccaaatcaaaaaaaaatggaactgaggctggcacggtggctcacaccttgtatcccagcactttgggaggacaaagcaggtggatcacctgaggtcaggagttcaagaccagcctggccaacatggtgaaaccccgtctctactaaaaa

SEQ ID NO: 631788 - DNA, 270 bp, Homo sapiens
cttgatcatagtgtcttcagatgctgcttcctcctgaaggaaatccttctgtaagccttgactctccctcctgtcggctggcatatgacagtggagcagtcaacacacaacactaccgtttgtgcatggctaacgaccgtggtgatgtaatacgcatcctgaggcatttcccctccatgacgtacgaacttggggctctgcacccagcgtcgcttcttgtgtctcctcttctcctcttctggagacgggatgacaggaaatcctttgcga

SEQ ID NO: 631789 - DNA, 490 bp, Homo sapiens
gtgttggatcctcagatgacgtggaagttatcagaaccccagtgtacttggagtacctctctgcaccatgatagctggctgatgttctgctcagtcacaattttacttgaaagcaagaattgtcctagctccttgtcgattattccaaaacgtttaacgttcaaagcagggtctcattaaaaaagaaactactggttgatataattgagatattacaatttcagaataaacatttgattaaaaataaggaaatcctcagttcatactgtatttaaaagagaattggtgacttgaatgtgtgtaatcttttggaacctgtctaaaaaccaaatacccctgcaaacagatacagcccaccctattctatttcaatatttggctgttttattttatagaaattattttgctgcattcacaaatagaatttgatttaagaagaactttttgtcctgtggtgtgtaattggataatcatagggttacttttttgg

SEQ ID NO: 631790 - DNA, 227 bp, Homo sapiens
  misc_feature (1)..(1): n is a, c, g, or t
ntgatctagaggatcccagcgctcagcatacgtgtaatttcttaagaaatgaggaaaagtgcaagtgatcccagtactggtgggggaaaacaaaaataaaaacaaacaagtggcaccgggccactggctgcctaaaccaatcacagcttcagtttggtttttggtcaagtgtgggagttacaagtagacacctctctgtgcctggtatggctcagcgcggggtaccg

SEQ ID NO: 631791 - DNA, 543 bp, Homo sapiens
cttgtgctgcgcggcttccttctgcttctgctcgtagcgcgtggcgttgtccgcccgctcctgcgccttctgcccagcctgctggtgcgcctggtcgagcttgtgctggaaatccgcctgcttctggtcgtatgcctgcttgctcgccgcgtgctgcggcccttccgcgccgcgttgcgcctgcttcagtgcattctgctcctgcttgtcgcggaatgcagccgcgtttgccgcctcgttcgccgcgcgctgcggcgcttcctacgcattctgtgcctgcttcagcgcctgctgctggtcgcgctgctgcgcgcgcaccgcacgctgctcgtcgttgagcgcgagctgctcctggcgaatgcccgcccgctcgtcgcgcatctgttcacgcgccttgccgaggcaggaattgacgaagaacttgctgtagcaatcgtgctcggccaccgcataacgataatcgttttcggcggagcgttgattgagcactttttgacgggcgtcgaaatccggtgcggcagaggctgcaacgggggcggccgc

SEQ ID NO: 631792 - DNA, 105 bp, Homo sapiens
gccaatactccaccagcaatgacagctgctaggacttctgtccgtttaaacagactgtctgagtgtttctcagtatacacatttgtatcctgttggctggcgaca

SEQ ID NO: 631793 - DNA, 1262 bp, Homo sapiens
  misc_feature (1262)..(1262): n is a, c, g, or t
ggctatgtttacatgacacagtgtgccaaacggctgacttactcgcggttgcgttagtttctatgctcatcaggactatctcaccctcccactcctgtttttaaaactcagaattctttcctaagagccctctcgagcaaagcgtgccgaagttagcttgtcttctctgtgctcggtcctttcttatgtcctcataaaagctcagatgatggtatctgtgagtatgttttgcaaattcaaaatatagtcttggtaattctattcttctccagttgatttgttaccgaagaactgctgtacagagctatgtcctttgtccagtttctactacgactggagaagccactccttgagaaagttgtttaaccttacacactaataggagaagatacttttctaaccatgagacatggacccgggacctgaactgacttacctcatgaaaagaatcctacaaccgaagacgcggcataccaggctgtgcatcccatctctatcggggcggaggcggagaacaatccgttgcgtgaccattgaaggaggaagctgttgctacgatcgccctaggactttcgtaggcacagagatgggccaaccgatcctgcgtgtcccagctccatcccgcgtgggaggacagtagcttacggaggctatgccctcgagcgagcacagcgtcgatcaaccatgtggcgccaaaatgaaaagccgggttccccggcattggcccctgaggggccacctccttcccaagccctttcgctttccttggggcaatgggaggtccctgtggagcattcccacggaagaaacttacgctttcaagcttcccattccattgtaagtgttgcaacgttgggaacaattcccgcaaaaaggaacctgttaacgcccaagcacaaggtgccttgttcctggggacgggacacccagccaatgggttaccccttggggcatttgcccgaaccatggaattgcaagaagcgaggattccaacttgcccccttgggcaaccccaagacaagcaaatggaaaggactccaaaggaatccaatttgggctacccttccccttgggaagacagcagaagtaccactccacgtggtcgggaatctcgagacaaggttcccaatcctctggggcctctcggcttggtcacacaccctttttccaaggcacatgatttgttggaaatcgacagcacaaagccaggagagttattgaaccaaatttccgagcaccccttccaacatgtgtcaacacgn

SEQ ID NO: 631794 - DNA, 163 bp, Homo sapiens
  misc_feature (65)..(65): n is a, c, g, or t
  misc_feature (92)..(92): n is a, c, g, or t
  misc_feature (119)..(119): n is a, c, g, or t
  misc_feature (141)..(141): n is a, c, g, or t
atcaaaggattaattcaattccaaacatcaaaggagaaatagcaaaaatcactatttcctctcanctcagcactagcacacagcatctgtgngcaggaaccaggagccggacctacctnactgagacccaggtcagtgggnctgtgtctgccaccctggcgtg

SEQ ID NO: 631795 - DNA, 450 bp, Homo sapiens
gaccatcgaaacgccacgctcgagatgactccacataggctcccggaggcgggcagcaccggtccggaattccccgtgcccatacatatatgaggtgaggggatgctccctcctttttacatagtcttaatctatatacacacttttttctcagacgacgcttacttggctagactcggccgctccaaggtggagacttcgcggggtctattcgccagattgatctaggttggagaggcatgtgaccagtctcaacatttagggagtatgggtcggatgaaacttatctgtaacaaacttacttgagaagaccagctgcaacgtctgacgactcatttggataggcttcatctcccacctctagaaatcattggacagcaacgaggatgggtcagtgtgagcacggtttccaggggtccactgataaagctgttgatgttccggctggga

SEQ ID NO: 631796 - DNA, 324 bp, Homo sapiens
tctttaccttacttgtcgatgcagattgctcgagactacctgattgcttcttctgctgttcagaccggtctgttaacgtgaatgtcgatttgtttgctggcaatcggtggtgtcggatacactacaatgttccattatttgcttcaatattcagacgatcttcaagggttatgttcagtcagatttctggttagtggaagaatctgtgaagcttctagagttcttctcctgctttgatctcataaaactggggctttaggacagactgctggtcctccttgagtcgtacctgccgtttcacttttttctcctgctggaggagtc

SEQ ID NO: 631797 - DNA, 322 bp, Homo sapiens
atgagcgatgcagctgatgctggctggatctgctgagcgcgagtgagggagcctgagcctgcccgccgccgccgcctccgcctcccctccgtgaacaagtgagccctgggcctggggccctggcactgcctgcccctagccctgtccctcggctgtctgtgcctgctgatggtgtatgctgctgctgctgatgctgagctgaggtgtggatgggatgatgctgatgctgatgctgcctgtggcattgatgtgctggcctgtgacctgatgctgtgtgctgcccgctgctgttgttgtgctgttgatgtgggaatgcctgctt

SEQ ID NO: 631798 - DNA, 1533 bp, Homo sapiens
tgtactctgcctggtcgtctcctggcggcgtgcgtgtcgatctccatctggcgctgcgttgcgtcactctccgtggggtgggttgcgattgtgtatgcagcgccgtggtatgctgtgtcgcactcgcggacgttagttgttgttggtgagccgtgccgccgccggtgggacctcgcgtgcgttcgcagagcacattgtgtgccgggtgagctagcacccgcgctctttggtggcacaccccgcctctctcgtttgggggtcaccctgtcccggtgggtctctcgtccctgcgtcgcctgtgtagcttgtcttttgctgcccgcgtgggtgcgtcttgggtgttttggcgccgtgtgtatcttggtggttttttacccgccggtttgtgccggagcgacccgtctgggtcagcgcttgcttgtggtggggtcgccaagtgtcccccggtcgaccaggcgcccccctgtgtccgaccctgatgggccaccagcccctctcggggggggagtccccctggtatattctgtgggggtttcctttgggcccacacactccggtggcacggttgcccaattctctgtgagggagtggcctcttttccggcgcccgttgtttcgccgggaggcaacccgcttgccacaggaggtgtcctgggggagcccccgtggtcccgcctccaggggctctcggcgattcccggcctctgggtccccccggggcggagatcacgcggttatctccacgctcttgtttggcgggggcgaccccccccctaggggttcccctctcgtttgctttcttgtgacaccttgggctctatttgggctccccgcgggccacgcccctgtgcgcacaggtggggcccttcctgcttgtgcaccccccagaggtttccaccctctttgtgtgcccccgcacacacactgtgcgtgtttatagaatggtgcgtgtcacacacactggggtttcacactgtggcgccctgtgcacacacactggggggcttatattgctttatatcccctattctcgtgagggaggcacgcccccttctctccacccacatctccctctcacacacaatcttgtcacaaggagcacgcacgcctgaatgggctttgagagccacgggtgttaaaggggcgctctcccaccaatccgcgtgaggcctcgtgtccccacaccttctggtccacacttctggggtggttccacagcctgcacaacttatttggagaaggagaattaacttcctccctcgaggggtatacacagcgcgcaggaaaaggtaagggagtgggccacaccctcccctttcacagctgtttgggagagacacacactatggcacggctgagagtggccccagagagcacactcctgtgaaaatggggacatcccccgccttgcacaaatgggcctttccacagagctgttcctgcacactatccccctccctgccgccaccttttttgcccctttttggcccacacaccatttttttaagaggttttgtttttctatttgtccaca

SEQ ID NO: 631799 - DNA, 306 bp, Homo sapiens
  misc_feature (8)..(8): n is a, c, g, or t
  misc_feature (12)..(12): n is a, c, g, or t
  misc_feature (15)..(15): n is a, c, g, or t
  misc_feature (23)..(23): n is a, c, g, or t
  misc_feature (49)..(49): n is a, c, g, or t
  misc_feature (79)..(80): n is a, c, g, or t
  misc_feature (107)..(107): n is a, c, g, or t
  misc_feature (116)..(116): n is a, c, g, or t
  misc_feature (138)..(138): n is a, c, g, or t
  misc_feature (141)..(141): n is a, c, g, or t
  misc_feature (158)..(158): n is a, c, g, or t
  misc_feature (163)..(164): n is a, c, g, or t
  misc_feature (173)..(173): n is a, c, g, or t
  misc_feature (187)..(187): n is a, c, g, or t
  misc_feature (193)..(194): n is a, c, g, or t
  misc_feature (212)..(212): n is a, c, g, or t
  misc_feature (216)..(216): n is a, c, g, or t
  misc_feature (226)..(226): n is a, c, g, or t
  misc_feature (232)..(232): n is a, c, g, or t
  misc_feature (239)..(239): n is a, c, g, or t
  misc_feature (242)..(242): n is a, c, g, or t
  misc_feature (255)..(255): n is a, c, g, or t
  misc_feature (257)..(257): n is a, c, g, or t
  misc_feature (265)..(265): n is a, c, g, or t
  misc_feature (267)..(267): n is a, c, g, or t
  misc_feature (275)..(275): n is a, c, g, or t
tagccatngctngcngtcctgangtggcagcgacgtccgcgtccgcccnggtcgtggcggcgggcgccagcgcgtgagnngaattcatagcagtgtgcagtgcaagnttcgctatnggaatctcggcatttcctactnccnggataaagcaagcaaangactnncagaacgcngcagagtgataacngtaganngcaatatatgtactccgnaacngcaaacttgnaaaagnaatagcngangaactcggttcangnacttttcngncgcggggnttcattatccagacagtaccaccggggttgg

SEQ ID NO: 631800 - DNA, 148 bp, Homo sapiens
acaaagagaggccaggtgctgtgagcatccccaaacccttgctccgtacccaaggtttttctccccagcctgccatcccgtatgccgttcttaattctaccattgtgcccccgctccgacattctcctcctttgcctcccctgttccc

SEQ ID NO: 631801 - DNA, 256 bp, Homo sapiens
acactttttgattttaacaaatgcaaatcgttctctaaaacttgacacaaaaaaaagaaaccagttctgtgaaacaggtacctcattactggaaaataacttataccagcccctctgtctagggaaataaaagtctagcagttcaaagttaaagttataagagacgtatcagattatgtaaacttaattttgtgcaaggaagttcccggaactccctttcactcgcttaagcctcttctgctgtgtggccctactg

SEQ ID NO: 631802 - DNA, 429 bp, Homo sapiens
gggggcatgggatgctaccagcctgtgcggagcggagcacaccgctaacgggagtgccaggttaaacactataagatgagaagaatagctctctgaatgagctgtgacgggtccgacgcgattatacctacatcaggagatgaagaggaccaacctgaaaggtatcattgatgggagattacgagcgatttggaccaccacaggaatgtttccccaggaaatcattatgtgcctacacaaacatgtaaggattgaaaggcttgtaatccaaagttactctgtacaaaccttgaatatcgaaaaaagcacgtataaagagccagttgattctgagcaatggattgagaaagattaggtacacacagaggggcagttgtgagaagtgacgcacatgggctccgctacttactggagattagatatatgatg

SEQ ID NO: 631803 - DNA, 643 bp, Homo sapiens
  misc_feature (465)..(465): n is a, c, g, or t
  misc_feature (508)..(508): n is a, c, g, or t
  misc_feature (545)..(545): n is a, c, g, or t
gaaatgaggtgacgagcctgtttatggatgtgaacagtgaggatcagatgttttatcagaacacattcttttattctaccaactctccatgagcgtgagtataggagtgccatgagctttttagtcagcagttttgtaaactctgtatataaaatcattaaccacacattgtgggtgatgggaatgacgatattcatgctagacagagtaataattgtgcaaccaataatagtgtaggcctgtacgctagctaagcagccttcacgcgcaggtgtggtgcgccgtggtgactatctcgactggtaggagttgatttgttgtcacttgtcccttcggggcgtgggggagcggaaaatctctcaacgcgttgtcatctctataccgttgttaaagagggggtgggggaaatgttgagtgttcgatgtgatgactgtaggttactcttccctctcccaagtccatgtnccaagtggctatgtaaagcaagatgatacagaaagctgctctnaaatctcactgagtgatttcaccttcgcctactatgnaatgtctcatcagacctgacatgtctgagataaccaaggtgagtcaggatgtgatccatcaacgacattgtaagacagttcgtctccaccgcaacctc

SEQ ID NO: 631804 - DNA, 478 bp, Homo sapiens
  misc_feature (56)..(56): n is a, c, g, or t
  misc_feature (119)..(119): n is a, c, g, or t
  misc_feature (334)..(334): n is a, c, g, or t
  misc_feature (350)..(350): n is a, c, g, or t
  misc_feature (417)..(417): n is a, c, g, or t
aggatttaccaccaaccatctatggcaaatgttctgttgtacatcaaaaatgcctngattattttagtgaaaccatttctgtgttgaagatcatttaccaatttgtctctatggaaaanagaagagttgggaagccctttgttaaccacaatcctgtctgttttaccccatgaaggattgcagactcttaaggaactctcaagggaatcatcaccctaatatagggtcgccacctaacatggttctgaccagagcatctcagctgccaagactcaaccagagggcccggttaacaggcagccttcagctgggtgggtataggtggacctgagancgtgggacagatctcnggtgatggtgatggggagaccggggcctagggaccagcagggacccagctgctgacagacattcagncgtggtactgagattcaactcatccctacacagacacacacacacacatccacccaagagg

SEQ ID NO: 631805 - DNA, 106 bp, Homo sapiens
aggacggcgctcctgatatgtgagctggtcaggagggaagttgtgcagcagctgcctggatattgttcgacgtactgggtagtgccagtaggtggcaggcccaggt

SEQ ID NO: 631806 - DNA, 396 bp, Homo sapiens
  misc_feature (18)..(18): n is a, c, g, or t
  misc_feature (20)..(20): n is a, c, g, or t
  misc_feature (81)..(81): n is a, c, g, or t
  misc_feature (118)..(118): n is a, c, g, or t
  misc_feature (274)..(274): n is a, c, g, or t
  misc_feature (296)..(296): n is a, c, g, or t
  misc_feature (319)..(319): n is a, c, g, or t
  misc_feature (344)..(344): n is a, c, g, or t
  misc_feature (372)..(372): n is a, c, g, or t
  misc_feature (390)..(390): n is a, c, g, or t
ttctggcacgagcataantngcaatggcaattccgtaaatgccttacctgaactgaaaaattcgtaaggctatatacaacntacagcaaaaggccccaacagttgtaggccccgtacngggcatactacaacccttcagctgacgccataaaactcttcaccaaagagcccctaaaacccgccacatctaccatcaccctctacatcaccgacccgaccattagctctcaccatcgatcttctactatgaacccccctccccatacccaacccnctggtcaacctcaacctagggnctactattaattctagccacctntaagcctagccgtttactcaatccnatgatcagggtgagcatcaaactcaaantacggccatgatcggggnactacg

SEQ ID NO: 631807 - DNA, 751 bp, Homo sapiens
taagtgttatgagggggaatgctggaaattgtcaggggtcatggaaactctgtcatataagtaaggctagggtgagtgtgtaggaagtttttccataggagtgtggtatgagtgggtcgtacctgtgaatcgggggtatgctggtccgacatccataaaaaccatgggatgtgttaaaacgtaggtgtctggtgttgaccaacaatacttgtttgttggtaagaagtccaagggtgaaaagatgcgtcatcctgtgggtccctcagtgacatcatttgtacgctggtgacgggtgtctattactaataactgtgtgggtatccggctattgaaagaactatgtggcagaatgtggtgccttgacgggaaggtattcagcttgttcgaacgccttgaagactagtatctgagatctcccctttctgtgcaatgtgtcaaatggtgtgtgttccaggtagtggatctctcgctcagttgttgggaaggatacactcatatttattgtgccaacgggttctatgaattggcatgcgccgtcactcaccaggagtgttgtccctgcggttgtcatgttgaaaacaaggaggtgtggaagacagggtcaagacggaaaggcctcattaatatagcacacttggtccgatagtacaactatatgggccaaagaggtgaactacctatcgaaaacttgtactgggcaaactggtcccaattgcgccgatacagggcacaccgtcagaagtaagagacc

SEQ ID NO: 631808 - DNA, 262 bp, Homo sapiens
ggatcatcggattccacggtcagagtgtgggatgtaaatacaggtgaaatgctaaacacgttgattcaccattgtgaagcagttctgcacttgcgtttcaataatggcatgatggtgacctgctccaaagatcgttccattgctgtatgggatatggcctccccaactgacattaccctccggagggtgctggacggacaccgagctgctgtcaatgttgtatactttgatgacaagtacattgtttctgcatctggggata

SEQ ID NO: 631809 - DNA, 213 bp, Homo sapiens
  misc_feature (84)..(84): n is a, c, g, or t
  misc_feature (171)..(171): n is a, c, g, or t
gcggtctcgacgggcgggcctggcctgtcccgggtgctgagcttcgccgcgtgctggccacgctgggtgcggggctgacagagncgcgtggagaagttgatggctgggcgcgagggctcccgtggctgcgtcgactctggagcgtttgtcgggcacgtcgtgtcgcgctgngcctcgtgcccaggaagccccgggaaggctgtgcaggggcgt

SEQ ID NO: 631810 - DNA, 1526 bp, Homo sapiens
  misc_feature (1384)..(1384): n is a, c, g, or t
  misc_feature (1502)..(1503): n is a, c, g, or t
tccatggtttaaaaaaagtgacatttgcttttatcacttattgggcaagggtggggcctgtgcagtgaagggtggctaaggtggtgcctcagggggagtgggttgggctgtggtggagaattgatgcacagaaagaggctgtgaaaggaaaaggggggtgggattgtagaaggccagggcccagaggggtctccctcaggtctccgctttcgtggaaacgggacacgcctttgaggacaggagctcagtggcaagccaatagtataggccaccaatctcagatttaaaaaattccgtgaaaaactcataggcgtgaaccatcacgtggtggggtgtctccagttttctttacatcagtggcggctcagaggaacccccaggggcccctctctgggtcactctgggtgaaaggccagacaaagatccgtggtattccagtgaagcctttagagaactctctgtgtcgtgtggacagaagacgcgggtaggtataataaccccatctccttttccccaggacatataactttccgtggaaacaaaacaggagaaccccaggggaccctcaaagttgccacgcggatacaagctcctcgtgaaaagaggccgtgagaagaaatatttgggggccatgttgtcggagacctcttggacgcaaacacgcgccccccggaaaccgtcaccttagtgcgcgcttcgtgcaaccccaggcgcagcttaagaaaaatgcctcttctgtagccgacagcaggatactagccgggtatactggggaagccttcttcctcttcaaaacccccccctcggggtggcccaaaacatatccgcgggacaaacgagacagggtattcaaaaaaacccctcatagtcccactagatgcaaccccctctaaaagaaggggtgggcccctctacaagaggcccctccacctaaaaatgagaccctccggtgctcccttaacagcccacattcggtaggagcttcttctccttatacacatcctccataaaaacagggtcgctgcaacaaaaaacaaggagcgctccgatcaaacacccaacaaacatatatacaccaataattcatcccccaatgacttgggggggccgacagtgtcataacacaccgcagaagaaagaacgaccactatacacacggcgccacccccaagccgcaacttcgttgtcaacaacaaaggccgctctcgaaaacggggagaagacgccccttatttagatacccgcaaaaggattttatgtcaggcgagaaatatgtagagcgcctttataacaccacagtgagtcggctaatcctccccctagtatgaggtgtggcgtgctcccaagcgattacgccagtatgctcgcaagaagccgcgttacnaaaggctcgatgcactacggaatacatacatctgcctactagtactataaagcagcacgctagtgctgacgatagtatgcttgctcacacggaaggctagtccatccatggacgtgcnngagacctactctgccggacgacc

SEQ ID NO: 631811 - DNA, 245 bp, Homo sapiens
aggatgtagaaagaaatcgtgaaccctcctatgtagctagatgggaatggaataatggcacactacattcgtggaaaataatttgggagcacctcaaaaagttaaacatgaagcccccatataagccagcaattccactcctaggtatttatccaagagaaagaaaaacggtgctcccacataaaaacgtgtatataaatcttcacagcagcattattttgtaacagccaaaaagggttgaaaca

SEQ ID NO: 631812 - DNA, 333 bp, Homo sapiens
  misc_feature (5)..(5): n is a, c, g, or t
  misc_feature (34)..(34): n is a, c, g, or t
  misc_feature (41)..(41): n is a, c, g, or t
  misc_feature (109)..(109): n is a, c, g, or t
  misc_feature (134)..(134): n is a, c, g, or t
  misc_feature (156)..(156): n is a, c, g, or t
  misc_feature (215)..(215): n is a, c, g, or t
  misc_feature (260)..(260): n is a, c, g, or t
  misc_feature (265)..(265): n is a, c, g, or t
  misc_feature (288)..(288): n is a, c, g, or t
  misc_feature (321)..(321): n is a, c, g, or t
tccantggttcatcatttcctttctggagaaagnaactacnccccagtacttcatcttgaacttggcagggtcctcggtgtactgtgaaggtgcccaccatgtctgggncacacgtcccagttattcaaaaganggactcggcccttggctgtggngctcatctggcccggtctcgtcccacggagaactccgggacgatgttgtcctggcaganagagggcctcggggtccttcttggccatgggcgtaccaggtcccngagangcgaggccttgtcgaagttctcnttgactcggaagctggctgcagctgcggagcangctgccggcgcg

SEQ ID NO: 631813 - DNA, 1483 bp, Homo sapiens
  misc_feature (1219)..(1219): n is a, c, g, or t
cccaagtcaatagaagccggcgtaaagagtgttttagatcaccccccccccccccaataaaggttaaactcccctgggtttggtaaaaactcccggttgacccaaaattaacttccaaaggtgggtttaaccttttttaacccccaattaagcttaataccccaccgggggatttgaattacccccaattatggctttagagcccttaagacctcccaccggttgaaattccaaccaaactggttcgcgcaaaaaccattacggaggcccaaacggcttaaaacttccaagggaccccgggcgggggcttcattattccttcttagaagaggagcctggttcgtggtaatcgcaattaagcccccggaattaatccttcgccaaccttttggcttcaggcctaattatatccggccaatttttcaggccaaaccctgtatgtaagggctaaccaagtataggcgcgcaaggtaccccccgcgttaaggacgcattagggtcacagcggtgtgtatggccccacatgtagaggtgtggccaggaaaagttgggcgctaacactttttctctatactcccaggaaaaaactatacgcgaataaggccccttttatgtaataccttaaacggggctcgcaacgcggtggggacttttagcgcaccggttaaaacctgtgcagacagtatgagagtggctctagagttgggaacccacgggggcccctggtaaaggcgccgcggtaataacccacacgcggccccgggtttaaaccccttctcttcaacagaggtatatatcctttcacaaaggggaaccctttttcaacgtataaaaaccccccttaaggcccaatctttaatatttatggagaggaagcaacccagggtttgctttaacacggggctaaacgcgtggcttacgcgggcgaacagggttgcccccttggtggacggaaacccaaagcaaataaagaaaacacagcaggaggggcggggcccggcgcccctataaaaaaatattcccccctcgagagggggcggccccaacagttttaagcacgagtatacacccccaggggtttctcttgttgtgtaccaaacggggtgtcccgccctaattagtgagggaagcacgcgccatattaaataagcgcagtatgaggcacatgaggtaccgccggtggtgtgtttatacaaaacacacgctcgttgcggacctncgggggcacacacaccgctgctgcacccgctgtgggagacactcttggtggcagcaggagacccaactaccattcgtggggggggagacgccaatacttgtggcacacactcatccctaaccaaagattttagcgcctccaagcgcgaacacaatctaaacgttgtcacggcgtggacatagcggggcgttacaccaacgcgcgaaatagcactgcggcgtagagaaaagttgcggctacccgagcaatcactctacaacactt

SEQ ID NO: 631814 - DNA, 435 bp, Homo sapiens
  misc_feature (62)..(62): n is a, c, g, or t
  misc_feature (67)..(67): n is a, c, g, or t
  misc_feature (76)..(76): n is a, c, g, or t
  misc_feature (84)..(84): n is a, c, g, or t
  misc_feature (90)..(91): n is a, c, g, or t
  misc_feature (95)..(95): n is a, c, g, or t
  misc_feature (296)..(296): n is a, c, g, or t
  misc_feature (342)..(342): n is a, c, g, or t
  misc_feature (352)..(352): n is a, c, g, or t
  misc_feature (385)..(385): n is a, c, g, or t
  misc_feature (395)..(395): n is a, c, g, or t
  misc_feature (412)..(412): n is a, c, g, or t
  misc_feature (433)..(433): n is a, c, g, or t
taattaaaaaaaaagaaactgattttcctctgtaatacaacctgccctagtacacattagancaagnaaaatccgncaagatanaagaanntgtnctacccagctcaagcctggtaccgcccgacctattctgtgaatggacagagaaatggggagagatacctagctacaagcttttatgaagttatgctaggacccagagctactgggattcttgtcaggtgtgtgtgggcccctatttccagggttcctcctgaagggaacctggaagaagctggacctccacagcctcaggnccccgagcattccctcccttacccttaaggcagggcttccgggggnaggggggagncccttgttgctgttcccccaacagcgtttccantcgggatttnccaaacagggcaccttntttttgttttccccattgggntt

SEQ ID NO: 631815 - DNA, 725 bp, Homo sapiens
ggtacctgtagcttgagtgtggccggtataagttcttgtttttcgatgtttgcagcccgacgggggtaaccctctaatgtagggattttaaagatacgcctctcagagtcctgcagaagccaaattggagtacaaagccttgcccgcagacgcagtggtgcgcattcttggacgcggctcctgcaatcggccaccagcggcgaacatactctgagcgctcctccagtccaacaaataccattgttatacccaccccgagagttaccccaaaagcgccctctaatttttcaaagtcgtccacctcgtccacccgcattctcagggttttattagttgttcgcagaactccagaaacatttatgccatattatcagaacaattttcaactgccattccgaagatcaaaaaaatgcatatggaccacacccctagcataaacccacgtctcaaaatgtgcgggtgatataattgtacaccaacaacaattgtagccatagcgcggtacaacataccgctaacaagtaggttcgtgcaaggctttgtggagcgcaggtgggttgagccgaagccggaatacaccccgtactggtttgagaaaacaaccccgcgatgcggtttaaacacacgtgattaaaattttcttggagtctaaaactacgaaacgagcacaatccctctgggcagacaagggaaaacattttttcaaaaaaagggcccccataaca

SEQ ID NO: 631816 - DNA, 177 bp, Homo sapiens
cccgcgcgccgcggccccggtcagcttgcttgtgaatccagcatggtagctggggctgagtgaagacctctgcacacctgggcacaggatagctatttcacttcttctccagtgtctaccttcctcctcacctcccagccatctatataaacacaatcctttgttctcccaaatctg

SEQ ID NO: 631817 - DNA, 809 bp, Homo sapiens
  misc_feature (36)..(36): n is a, c, g, or t
  misc_feature (48)..(48): n is a, c, g, or t
  misc_feature (83)..(83): n is a, c, g, or t
  misc_feature (246)..(246): n is a, c, g, or t
  misc_feature (279)..(279): n is a, c, g, or t
  misc_feature (298)..(299): n is a, c, g, or t
  misc_feature (306)..(307): n is a, c, g, or t
  misc_feature (313)..(313): n is a, c, g, or t
  misc_feature (322)..(322): n is a, c, g, or t
  misc_feature (327)..(327): n is a, c, g, or t
  misc_feature (351)..(351): n is a, c, g, or t
  misc_feature (360)..(361): n is a, c, g, or t
  misc_feature (387)..(387): n is a, c, g, or t
  misc_feature (394)..(394): n is a, c, g, or t
  misc_feature (435)..(435): n is a, c, g, or t
  misc_feature (442)..(442): n is a, c, g, or t
  misc_feature (462)..(462): n is a, c, g, or t
  misc_feature (474)..(474): n is a, c, g, or t
agcgggtgcggccgccgccgaccgctgcgggagggngggggaggagtngggagtttagcgcagtcgccggagtgcgaggacancgaccatccggccctagcctggccgggcgggtgccgggagcttccctttctcagcgcggcgcgaaggtggctcgccgtcagcgcctgcttccctcgacctcgtcctcctccccgctccggaggagctgcgagatgtggcgcctctgactccacttctccccgncccgttcaccgagagggggaacgagctctcgcncactcgccggaggagacgnncctgganncccaancccgccggngaaancatgagctccgtccagcagacagncgccgccgnncgcggagggtcaccaacgtggggtcnctgttgntacacccgcaggagaacgagtccctcttcactttcctcggnaagacantgtgtgactatgtcttcagncagtggtgcagntatatgccgcagatcggaactgtatgtggctcaaagacgtgcaagtggtgttgcttgagctggctaaaggaccaatccacagagatctaattttttcaagacatattggacaattcaaggctgggacacctatcgtgggaaccacagagctatacaacaaacttggtcattataatagtcctagaggactattcacattacctttggcgtggagataacttgtaaacgttgctcctaaattttggccaatgaagcaacacgcagagacaattcgaagaagcggtacagacccttggggccggcgcacaaggaacattgaaaaagaccgagaaccg

SEQ ID NO: 631818 - DNA, 225 bp, Homo sapiens
  misc_feature (133)..(133): n is a, c, g, or t
tcagcagtactgctcagctctgagtagctagatacagcatctgcacatgcctgcctatttgtatttagtaaagatagggttcatcatgtgggcaggctggtctcgaactcctgaactcaggtgatccggccanctcagctccccaagtgctgggattacaggtgtgagccacggcgcccagcctatttttcagtctccctttcttcagtagtcaaaagcactttg

SEQ ID NO: 631819 - DNA, 1044 bp, Homo sapiens
gcatgctccggcccctgcaaacgagcgtggggagagcagcttgaaaacgcgcctggcctgagctgtcaccatcgacactctccaggctccggacacgatgcaggccatcaagtgtgtggtggtggggagatggggccgtgggcaagacctgcctactcatcagttacaccacacaatgcctttccctggagagtactatccccatcgtgttggacaactattccatgcggcaagttgtagcaatcgtgtgggtacaaggtaagtccgaggtgcaacctgggcgtcttgatggcgtgtacagttgctcgtggccgtggagggactactactcgtcaccggctcgctctcctaatctcgcagacggaacgttttcctcatctgcttttccctcgtctgaccccagtctcttatgagtaactgtcctgatgtccaagatggcttgcccacgaagtggcggaacctactgccccagcagcaaccatcatcctggtgggcacctatatgctggaccctgttttggacgatcaacggatcactcattcggagaaagcgtgaaggtacgaatgagaggctggctcccatgaactacccggaggtcctggcatctgtgccatggcgattgacatcgggtgaaatacctggagtgcatcaaattctcacccagaggatgctgaaataccgtggttcgactgagtcatccgggccgtgttgtgaccctcatggccaagcggccaggaagaagggcgtcctgggcctcgcttctggggtttgggccgaggctccaaccttgagtggttttggtctcagggttcgatccttaggttgtagggccccggtggcaccgttggcccccgttgggtccatccgaggcgggagctgggcggggactcgctggaggcccagcgcgagacccggcttgttggtgtgtcaccccttcttgtttagggaggggcgcggattacacgcgtggagtgcgtgtgatccgcagtgaccgcatctgggtgtggtcactaggctccccgtagaggccgtcgacgtgtctcg

SEQ ID NO: 631820 - DNA, 1002 bp, Homo sapiens
tctcgcccccattgagacagcagtcttcggtgtgtggaatgtggatattctacccgcgtggaggtttgcttgctcacaacggggtgtgttttcccatgtgcagggtgaggtttttttttgccaccctggacacatgttggccccctcaaagaattctgtggggatttgtaccccagaatcctgttcccccaatcagcatgttctcccacctcctctgcctctccctccccctggagaccctggaagtggctgtgtgtcacatacagtgacccttggtcaccagaccacagaggatggagcctgggaagcagcgaggaatctcacaggggcgtgagaaatgaaaaagtgagaaaaacaggcagaaaagaacagaacaagcagcagcgtaagccgcccaagctactaggcgggaggataaccaaacaccgcaacacaacagggcgcccaaagaacaaagaagagacaaaaagaaacaaaggagactaaaagagaaacaaaggagaacaagaacaaggaagaagaaacagaatacagcgcagacagaagaaaatagaacagaggaaggaaagcggcaaaacgaacacaagcaaaacaaagaacataccccacaacgaaaaaagaaagaaagaaagaaacacaacacaccgcagaagccccaaagacaaacggaagcgggagaagccaaaagcaaggaagaatagcaccaaaaggggacagcggagcggcagcacaacaagccccaagccacccacagagagcaagggcacacgaacaccaacaaacgagacaagcaagagaaagaaaacacccagaggccagggtgccacacaatccgccgcaaggacgataactacaccaacaaccaaccacgaaccacggggagacgacgacaaagacacaaacacagagaggcacgcacaccgccaagggcccgaccgatccagaagcagaatcgagagaaggaaaaagagacaagacccctcgacaagacaacaggaacgc

SEQ ID NO: 631821 - DNA, 701 bp, Homo sapiens
gtggaagttaacacagcgattcatgtgtgtgtacctgatgcctggcagacagaatcattcatacgtgttcaactgatcaaggggttgcatcttgctcttgcggggatggaggtatcattctggggaggaagcatgtagttgctagtgacgttgttcggatatgtccaagtgtcgttcactaatgtacccctgactgtgtgcttttggtaatgtgatgtctgaatgtctcgtccccctacccacaagcatgacctcgttgcagtgggtagaccgtggacagccaggcgatacctgaaggagcatgtgctgcgggaactcgcggaggcggctgggtggaggtgagccaatggtggctaggctggacctgggatcttgcaaatgagtcgcggagtgacaaggtcacgaagagcatgaattgatgctggcatgaaggattccacgaggatcgtggagacctgcctggtagatgctaacaggatatggctggagtccgaagggaacatcagctgtgtctctgttgaagtggtgacttgtgcttttggatggactggttgtggaaccagctctgaggagcgcacttccacctgatgtactgctcaccatgtgggtcatgatgtactctctgatcacatgaggcagagtgctagacatgtgttgtccatcttggagagcatggctagataagatcgagtgccaacctt

SEQ ID NO: 631822 - DNA, 100 bp, Homo sapiens
  misc_feature (61)..(61): n is a, c, g, or t
aattcaaagcttctaacgaatgtacggggacatggcttgtggttaatctggtgttattttntgttcccacaaagttaaataaatcataaaacttgaaaga

SEQ ID NO: 631823 - DNA, 124 bp, Homo sapiens
gctatgcaaccccttctgacaggaaggcttagattgagtgccacctccattgtgatggggagctcagaattgtgtccagtggagaatttgggtagggagaggtgctagggagtgctgtagcaga

SEQ ID NO: 631824 - DNA, 787 bp, Homo sapiens
tcatgacagggcttgacgtgtgttgatagcttagtggtcttcgggtcttacgctataaatcttgctactgctcactctttgggtccacgctgcgttgatgagctgtaacactcaccgcgaagatctgcagcttcactcctgagcccagcaagaccatgagcccactgggaggaacgaacaactccagacgtgctgccttaagagctgtaacactcaccacgaaggtctgcagcttcacgtcctgagccagcgagaccacgaacccaccagaaggaagaaactccgaacacatcagaacatcagaagggacagactccagatgcgccaccttaagagctgtaacactcaccacgaaggtctgcagcttcactcctgagccagcaagaccacgaacccaccagaaggaagaaactccaaacacatctgaacatcagaagggacagactccagatgcgccaccttaagagctgtaacactcaccacgagggtttgcggcttcatccttgaagtcagtgagaccaagaacccaccaattccggacacatttggcgaccacgaagggactttcgcatatcgccaagcggtgagacaaatagccgagcggtgagacctttcccaatcgccaagcaaatcgaggcatcaagctacagatggtcttacaaaatggaaccccaaaagaagttcaataacaatttctacggaggaacctgggatcaaccaactggacttcccgggctaaagagtccctctgaaggaccgactggggccctttttgcctcagaggatg

SEQ ID NO: 631825 - DNA, 342 bp, Homo sapiens
cagtgccttgtacccagtcgtggcctgtacccgacttcacgaggatcttgcgcgtctgcagcgtggtcatgtccaggacgccacgtagttagagctctcggccaccgaatggtcgcgggaatacagcaggttgaccttagtgctctgcaccgccacggggctcttgctggaaatctacggccgccagcgctaaggcagcatccagcatagacgggtttgtctgggaacacccagctgaccagcccactgcccagggcctcgtcagccatcatcttgcgagcggtgaaagccagctcgttgaccaggctctggttcccgataaccttaggcaggcgctgcagt

SEQ ID NO: 631826 - DNA, 155 bp, Homo sapiens
cgttgaattgcgagcgttcatggcacagaggatagcattgaagatcctgcaagctgctctcatctctgaaagcaagcgttctgtccgctggccattctagcgcatcgtcctgcgccagagccaggtcctggcgccgcgggcattcaacgcctccg

SEQ ID NO: 631827 - DNA, 234 bp, Homo sapiens
tcccgggctgtacgaattttgcacgagggaaatgtttgtggaaaaaagtgcgagatatgatagtccacacatttaagacacatagagaatagggtgttaaatatggtgaaattttcaacctttatctagagcatttgcaaacttgtgaacacaattaacgttaaaattattttattgttaatcagggataacttttgatataattagattaactcctgcttttggttctctttt

SEQ ID NO: 631828 - DNA, 578 bp, Homo sapiens
  misc_feature (23)..(23): n is a, c, g, or t
cacattatgaggcggcgctcgantgatgaaggccagggcgattctggtgccgatggcgcggttggatgctggcgtcccgaacaaacccatgtcgattataacaacgcgcttttctcggaggtcaagcaagcgctggaaggctacctggctgggcgagaaggtttgccggtcaaatcactctctgagctgattgcttttatcaaccgcacccagaaacctggtgtgcctgaccagaaactgctggaaatgatcaatggggtgcagaccaaccaggaagatcgcgatgcgctgtggaaagccattcttcctatatttcagaacaccattgatgaccccatgaaggagcacaagctcgacgccatggtgtcgaacttccagtcccacaattattttttcagcgctgcggccgggtacccaggcatatccgttccgtcaggcatggatgaagacggcatgcccacggcactttacgtgtatggctccgccaacagtgaagctaccttgctgtcagtcgcctatggttatgaacaagcctcacaggccattcacaaaccggcttttctcccaggtgctccctt

SEQ ID NO: 631829 - DNA, 1053 bp, Homo sapiens
gaccgagccaaattagctaagtgaggctgggggtgatcggacgaggcaggtccgcgttcaggcgcgcggccggagctgccggaagttcggttcgcgccggcgctcgccagggaagcccggggccgccgggactcggccgtcctccggaccgagaggccgccgcacgggctgcgctccagatgctgctgctgccgccgggcaccccaccctcggtctcctctccggaggccatggacccactgaccccaaggctccccctttccacaaggcggaggccctccatccactcctacctcggcggcggggccctgacccccgcggatgggccgcccaccttcctcaatcgaccgccgaagtggtagtcccctaaacattaaaacgggcagcagcctgcgacggagagagccctgggaccagacacaaaggcagaagggagacaccgccaagggataacgctcctgtgaccttacgagaaacgcggcctaacacgcattagccccagcgaggtttggacgcccgcgttgtacttatagagcaagtagccccttcatagagcgtgccttgatagaccaccaactcgggcagtatatacacaccacacgcgagacctctacagggcggccatcatacactgttcgacgaaggcgcctggaacggcaacacacgggtctcttacaagagccggcctccgaagcccacccgggaacggcgcgaacaactcggcgcgcccaagcgtccagccgcgggagacccccacgacgcacccgaggacccgcgaacgcagaacacaaaccagtgcaccaggtatacggaccccacggcacgagcacttacaaaggaaacgaccggcgcggacacagcctggcgccaccgaactgagtagacgacaacccaataaacggccccgaagatccggacccgcgagactacaacaggcacccgccaccacacggccctacaagcagcttacagaccccacaagacgagcgtcacgacgacttacccacgcaaacccagcccccagggcgaaccaagacgacggagcgaacacgg

SEQ ID NO: 631830 - DNA, 141 bp, Homo sapiens
cgaccacagagaccttgatgggcattccacagtgtggagctacatactgaggcactactgtcctctattggagaaccactgacttctcagtatggaccacagtacccaagcctgtgctggtgaggggtaccgagctcgcat

SEQ ID NO: 631831 - DNA, 702 bp, Homo sapiens
  misc_feature (633)..(633): n is a, c, g, or t
  misc_feature (702)..(702): n is a, c, g, or t
ccgggctgcaggaattcggaccaagcctaagcgaactgtgcactgacagccgagccacatgcttcagacactatgatgctggtgaaggtctaagcacacggaacacctcacactggctgcctgaacgccagggctgattctaactactgtaacttgcatactggtgccatctacgactctgtcattgacctgaactacctgcataacatatgccaatgtgatgctactcctggtacattcgatgacacctgcctggctcacaacgctaagctaggcatcaaagtgaatgccatcaccatagtccaagactgagactcatacacaatccaggtgagcgatgctaacgctaagtacgtcaactaggccactgtcatcctcaccaccatcgataaagctgctgctcatgtgatttgagcccaacggctgatcatctctgccccctctgctgatgcccccatgttcgtcatgacttcgaaccatgacacgtatgacaacagcctcatgatcatcagcaatgccttctgctgcaccaactgctaagcacccctgaccgaggacatccatgacaactctggtataatggaatgactcatgatcacagtccatgccatgactgacatccagaagactgcngatggaccgtccttacactgtgtcgtcatgctcactgggctatgcagcatcatgcgtgactatctggcn

SEQ ID NO: 631832 - DNA, 1101 bp, Homo sapiens
gagcacagagcctcgcctttgccgatccgcgcgcgccgtcgcacaccgcgccgcgcgagctcagccatggactgatgagtatcgccggcgctctgtctggtcgtacacatctggctccgtgcactgtgtcaacggtccgtgctttctgcggtgcgagcgatgccccgccgggccgctcttcccctgccatcgatggaggcgcccgcaggtcacctagtggcgatgaatggatgggcatggtgtcacgaaggtattccgtatgatggagcgacggatggtcccatgagtcataggagagtgcatcctcactcctggaagctaccccaatcgagcacaggcgatcgtacaaccaatcgtgggaacgacaatgagatacaatatgctgtgaaatctcaacacaccttctaacagatgacgtctagctgtgttgcgctcccgatggaggcaccccgtgcgtgcgtgaccgatggactcccctgaacacgccaagtgactatcgcgagaagatgatccagatcatgtctgagagcattcaagatcccagccatgtacggtaagactatccaggactgtgctatccctgtacgcgctctggcacgtcaccaatggcatcgtgatggactaccggtgacagggggtcaccagacttgtggccaatctacgaggggtatgccctccgcaatgccatcctgcgtctggaccttggtggcgggactgactgactacctcatgaagatctcacagagcgcggcatacagttcaccacacggccgagcgggaaatcgtgcgttaattaacggaaaagctgtgctacgtcggcctgacatcgaacagagatggcaagatgctacacatctccttgagaagagtacactgctgacgacagggacatacaatgtgcaaataagagcattacggtaccgtagtgacctttcacgcatacattagggacatgagtcattggataccaaagtacctcaatccaccataattagactgcaatcccaaacctttaccaccacgtgtatcgaccacacaccgaacacacgacaagaaatcccgccaacaaaaaacttcatcgaacacccgagaacccagagc

SEQ ID NO: 631833 - DNA, 196 bp, Homo sapiens
tggtaccctgctcgccctctctgccattatttatacatgcatagtttggaaaaaataaaaactttttttaaaaaaagaaaaaaatgattaccgggtgggagtgagcatgttttaccctttgtcaacgagcccagctggcatggcttttctggagtgcgaggggccagtgtcctctccccagagaggggcggagcag

SEQ ID NO: 631834 - DNA, 745 bp, Homo sapiens
cgggtcttcggagaaggcgcgcggatgtcctgtgttggccatggccgactacctgattagctgtggggcacgtcctacgtgccggacgacggagtcacagcacagtagctcttcaactgcggagacggcctcaccatacaagtgcgtggcctatggggctcacctgggcgaagagaggggcggcaccctggtgaacaaggccagatgggggcttcctgagagccgcctggggcgtgggcgtgggggacaggtctcgggaattgtacacccacgctccggggtctcactttgagacatctggagcggtgctatggggtacggagaagcatctctagtacgtgcttggaatctcaggccggagattccatgtctccagacacatggaattgtcagggtgccaggagcactgatgacagctcggtgggcatgaaagaggtcccctgtaacccatttccaccttgtgctgtgcctgtgagcacacatgactctgtcagtagaccactctctagctcacatgcgttacgtggttgattggtacatggggatggagtctcatgtctgccctaagctgagagctttagctcccgaattcactccctttccctcgcagtgactttctcattctcccgtgggtacatcgacttcacatgcagaccaggtggtgagtatgatcaggaagttgggtcctgaacatcaaggtgagctaaagtgcgtactatcacctggtctctgggctaatcaccaa

SEQ ID NO: 631835 - DNA, 110 bp, Homo sapiens
ctgcttgtctggctggagtgatccactttatactgcttgtctggctggctgctccactttaatactccaaggctgcaccagatgtgtgcaggcatacctcttccagccag

SEQ ID NO: 631836 - DNA, 448 bp, Homo sapiens
  misc_feature (39)..(39): n is a, c, g, or t
  misc_feature (82)..(82): n is a, c, g, or t
  misc_feature (182)..(182): n is a, c, g, or t
  misc_feature (307)..(307): n is a, c, g, or t
ggcccaaaaaatggtggtttttaaaaaaagttggaattnaaaatggccccaaaaacttaaaaaaaatttaaaaaaatccggnaagatgcaacaacaaaaaactctgaagtatccctcctttcctttccccttcctttcctcctctcctcctcttttccttttccttttcctttcctttccanagggtcctcactgtgttgcaatcatggctcactgcagccttgacccacctgagctcaagctatcctcccatctcaacctcctgagtagctgagactacaggtgcgtgccaccatgcctggttaanttttgtatttttagcagagatggaatttcaccctgttgcccaggctggtcttgaactcttgggctcaagcgatctgcctgctttggtctctcaaagtgctgagattcaggcatgagattactgtaatcgctctggcctgag

SEQ ID NO: 631837 - DNA, 352 bp, Homo sapiens
aactggccactgacaaaatgaccccatttgttgacttcattgaacacattacttaatgagcaggtgaagccatcaaagattgggtgtccacgtgccaacgtgcgcaagatgggagcggccgaatctggcttggcggaatatctctttgacaagcgcaccctgggagacagtgataatgaaaggtaagcctcgggctaatttccccatagccgtggggtgacttccctggtcaccaaggcagtgcatgcatgttggggtttcctttaccttttctatgagttgtaccaaaacatccacttaagttctttgatttgggccattccttcaaataaaccaatttggtacccgaaaa

SEQ ID NO: 631838 - DNA, 200 bp, Homo sapiens
gtagctgtaaaggttatgtgtacacacgctggcacagcaagcagataaaatgccctcatcatttcacaaactattttctactggaaaagaagatgagatttttttcccgtgttgcctccgtgttgcagactgtcaactgttaatagagttcagacgtacccatatagtacatttatgatagagtgcataacacagtttct

SEQ ID NO: 631839 - DNA, 485 bp, Homo sapiens
ttatgactatgacgttgccctgatcaagctcaaataagctgaaatatggccagactatcaggcccatttgtctcccctgggagccgagggaacaactcgagcttgcaggcttcctccaactacctacttgccagcaacaaaaggaagagctgctccctgcacaggatatccaaagctctgtttgtgtctgaggaggagcaaaacagctgactcggacggaggtctcacatcaaatgaatggggatacgaaaggcagctgtgagacgagatgctcaatatgaacccaggctatgcacaacagtcaagggacatctcagaggtggtcacccctacggttcctgtaggtacttggacggagtgagtcccatcatgctggagcccaaatactttgcgacaggtgatcctaggacggcccccttgactcgttcaccaagagaacgtcgttcatatcaaagttgggtgtactccggtggggaatagcgata

SEQ ID NO: 631840 - DNA, 912 bp, Homo sapiens
gcgtcaagcaatcgagtatggtggagcttgaaccaaagcctcttcaaaaagcagagtggactgcatttaatactttgatttcgcactcttaatgttcactcagatataatcagaagtctcgattacaggaatttgtcttgttaggcttgcaatgtcgtttcattgtctctgtgttttattcttatggggcttaacaggtttatcactaatgcctagagatatagaataattaatcggggaagaggttcgcccagagatgttggcctagtaaattggttgtgtcggggccccattgggaggtagttagtagggtgaagaatcaatccgataaataaatataacaaatgtgttgagctctgatgcgacacatatgttgtggagtaaaagagaattggcgcattctgtatattatctttgagaacaggtgaaaagaacatgttctttgtgggtgacgcaaattatcatggcgagagagcttgtattgaggcgggtctagataaagattttggagtgcattaacttgttaacctaagagacttttactagggtacttgttattaacaggaatggtttatggctggcacatcatggcaggagggggagggagatcttgcaattatgaggtagcccctgctggtccattatagggaatgcgcgatatacaagaatgcgaattgggtgcggctgcggggaattaaccgtcatggtgactggtggtgaagggctccgggatgtttgagcgaagggtgggctaactgtacttgggtcccagatagaacaagaagttactgtgaaacacaagtgttggggggggctgaggatgataaaaagttttgagacaacatgggggggggggcccgggttaaaaggtcaattgggacaaagttttccagaaaacggcgagacaggctg

SEQ ID NO: 631841 - DNA, 508 bp, Homo sapiens
gacccagagtctagatttaacgcacccctagactttctgcctgtatacctatatcattcagagacagagttacgctcttgtcgcccaagctagcatgcaatggtgcgatcttggctcaccgcaaactccacctcccgggttcaagcgattctcctgcctcagactcccgagtagctgggattataggcacgcgccaacacacccagactatactcataatatattactatttttagtacagatggggttttgccatgtcggccagcctggtctcaaactcctgatctcaggtgatccacctgccttggcttcccagggtgctgggattacaggcgtgagccactgtgcccggtcttaatgcatgtagacttgataactcatgatgtagagctactatccatgtccttatttgtcatccatgtatcttctctgatgacgcttggctgcacattaaaagctcatttgaaaaattgcactgtatactttttattgaattgtaagagctgta

SEQ ID NO: 631842 - DNA, 108 bp, Homo sapiens
cgtttgataatcgcatttgcaatatcaacgtccaccttgggtccggagacatcgatgtcggccttgggcaggctcacatccagatgtggaccttagcctttgaagcca

SEQ ID NO: 631843 - DNA, 1202 bp, Homo sapiens
ggtagcacgaccccgcgacggcgtgacgtggctggacacagcaggtggtgctggccatgccctacgacagcccagtgcccggcatacaagaacaaccaccgtcaacatccatgcggctgtggtccgccaaggactcccaacgagttcacagctgcaggacttcaactgtgggagactacatcgaggcggtcctggacccggaacttggcgtgagaacagtctccagggtcctgtaatccctaatgagtaagccttctttgacggggaacggaagctgcgtggtgaagcgaggagtactttcggtagtggcgaggccgccatcagcatccaggggatagttattcctgactggtatcaactgtcgtccgaaggtcctggcgtgcctggggagcccctgatgagaacccatagtatgcggatgaccgattccccagaacaagggtgggcccatcccatgactgaaagcggacgatcaaacgcctcggtcccgtctctctattccccatggagcctacgattgcgcgaatcccgttgtgtttgggcaccgtgcgacgacaacggttgcgaacacttggggaatgaggatgggcctttgacgcgaaacactcgaaagggaatatgacattgagcttgatggcacttgccaacgctaaagcgagcaaaacggatagtattgactggaggctcatctgcaaagagggggccaaatagtgcagcgatgtgcccgccgttgtgagaccaaccttggttgagtcacacaacactggacctcgctgcacggaacaaaggaaaggtggggctgatccaccagagggagtagacaaagcaccatttggcgagatcgtacagtaacacgatgcctactgtagtgtacccaagtgacacaatacaccagggacgcgggggacaccattacccgagtgcgccaaaaaccacacggactgaggaagacacaggcacaaccagagagagatgtcaccccctcatcgagccgacaaacagaatgatgcacatcgactgaggccgctagcatggcaagagacgaaaggtgtgcacacaggccgagagacataaccgacagacgcacaaacgcggggcaagaaacctggtggcacaagaccccaggacggagtcaaacacacagagcgtgcggaccaccgcacaaacccccgatgaagcatgtgttgtacgctcatgggggt

SEQ ID NO: 631844 - DNA, 989 bp, Homo sapiens
  misc_feature (1)..(1): n is a, c, g, or t
ncccccaggaacgtcgttagtccattcgcaacgagtttgttttttagggacgcggccacatatgtctgtcattcagtatgaactatggcgcaaagatctgggtgtcgtgtagaattcggggaagacaccccgggtaccaccgggggttggtgtccttgagacggaggcaccccccagtgggggtacaatccaggggaggcagccggtggtcgctcaggttgtgtgtccgaccgaaacagcataggtggcccgtcccttcttagccgacactttctctgtggtggtcacgctgtgcccaccaggggaagaccacgcctgttggttgtgtgtacgccctcatggcaggatgttctctccgcattatagtatatagtatgggccgacagaccccacccttagtgccctcttcttgaagcaacaccgtgtcccctctaaaatttatgtcactctcctgcaaatatatctccgtctaacaattacaccgagaaatgttttcttctcctaaggctcaccacactagtcctcactcgacttatttccccccagatgtcaccccgcggtagtcccccccccccgcagatagattcgaattcgtatgtttaacgcccacaacttctgactcgctatcattctttacaataacatgtgccaccataggactcttcatgtatcagatgcacatcaaccgccccattcccactggattgtagatgttattcgtgtatcacctgttagccctatgtttttatatatcaccacatacacacaaatttttttttagatgcaaaaactttcttttacatataaactatcaatttcctgcagtgactctgagtatacataacaagagtgagcatgatcaccaacacccccacgggaattggcccattctcataagtaatacataaagcataatttatcctttcggagacaacatttcctttggtaacaacaacacccaaaaacaaaacatttttacaccacataca

SEQ ID NO: 631845 - DNA, 356 bp, Homo sapiens
actctcactactattatattatccgtgctagcttatgcacctttcctgcccatctatcaacacagatggcattagctagcgttcttcaagtccggaataattgactaagtgtgtgacacatccaggccttgtaggaatgagtcactggggcaggtgggcagcccgggtgcaatctcaccaggagccccaaagcctgttctgtaagaaacactgtcacatccaataccggaaggatttggactgacagccttatggagatacatctgttcttatcgaaactcgaatttcttttttaattaaaaagaaaccgctgctttcttattaacatggggtgcaaaaaaggcaggccaaggagg

SEQ ID NO: 631846 - DNA, 1104 bp, Homo sapiens
ggggactcaccgctccagtcgcccgcgaggccagcgcaccggtcccccatcggcagccgagcccgcccgctcgccgttcgtgccctcgctgaggctgggcatgcaggattggctggatcgaggcctcgggtcacaatgccgccattggagggaagttccatacaacctctgccacatcccgtggggccttgtgcattccctccctgacccacaagaggcgtcccaacacgcttgtcgttctttcgcttgcatcgctggcggacttccaggactcgagaacgaagataggccagaggacgatgttctaaggcctgagtgtgtacaaggacctgcctgctctgtctggatcagtgagagattaggtggctctgaagcataggttgtcagagtctcttgaggatgagtgagaacgctcacaccggcgacggcacgtgatctgttcggtcaacgggacgcattcgtgccctccttgaaagacagacgtgtagaaccgaaccacaagaatatcaatctagtgtagtttggactcgtttactcgaagacaagcgagctgaatcattgtgctggagttggcttgactgcaggggacctctcgcagatgatcaagtactttaagaagcagaagcggctcatcccggagaggacacgtatggaagtactttgtgcagctgtgcagcgccgtggagcacatgcattcacgccgggttgatgcaccgagacatcaagcctgccaacgtgttcatcacagccacgggcgtcgtgaagctcggtgaaccttgggtctggggcggtttcttcaagtcttgagaccaccgcagcccactccctagtgggggaacgccctactacattgtcacccgcagaggatccatgagaacggtacaacttcaaagttctgacattcttggtcctttgaggctggcttgctgtacgaagatgggcaggccctccagaaggtccttctatggacataagaatggaatctccttctcccttgttgccaaaaaatcgagcctgtagttacccccgttccccgggagacattatccgaaaaagttcgagaactggtccagcattgtcatttgcctgacccacagaagactg

SEQ ID NO: 631847 - DNA, 304 bp, Homo sapiens
gatacaaaccattaatgcagtggtgcaggcacctcatatcccaacacgactccatgacgctgaggcaattgaattgcttaaagctgggaggcggggcgttgcgtgcgccgcgatcgcaccagtgtactccagcctgggcggcagagcaagactccgtctcacacaaaaacaaaaacaaaacaaacaaaaacaaatctcagtagctataagatgaacagtattttcctgcaccgggagccttgtggtggtggcttcctggagggcatcgtcgataatctacatgcagtcattcactattctacca

SEQ ID NO: 631848 - DNA, 138 bp, Homo sapiens
agcaggatccctcctagttactaagactccagttacaacagctttttatggaaactgaaaaagagagcagaggaagtataagagctacccacttaagaaataactttaactagttaaaaaactttcgtagaaatctta

SEQ ID NO: 631849 - DNA, 482 bp, Homo sapiens
agacacagccaacatttcaccgcttaccaagaaattgcattccaatgtgaggtttcgcaggtcggaactggtacacggaaaaattacctgcagaaaacaggataaacagtgcacgctgcagtcacagcactcactacggttggcatgagtgggtgagggttgacatcaactacacccttcctgcagaaaaaggtctattccgagaaataagtggaagctgtaaagcaagaaaaattttcgatgtcagggacgcagccgattaaattaacaagacaggaatgggccgggcacggtggcttatatctataatccccagcactgtgggaggccaaggcaggcagatcacttgaggtcaggagttgagaccagccccgcaaacatggtgaaaccccgtctgtgccaaaagtacaacaactggcaggtcatagtggtgagcatttgtaatcccagctactagtgacacggaggtgggagaatttctg

SEQ ID NO: 631850 - DNA, 263 bp, Homo sapiens
cggttatgttatctatagattacagacattgtatagaaaagcactgtgaaaatccctgtcccgttttgttctgatctaattaccggtgcatgcagcccccagtcacgtaccctctgcttcctcaatccatcacgaccctctcacgcggaccccgttagagttgtaagcccttaagagggacaggaattgctttctcagagagctaggtttttggagacgtgagtctgccgatgctccctgttgaataaatcccctccttctac

SEQ ID NO: 631851 - DNA, 1222 bp, Homo sapiens
ttggaacactatacctattattcggcgcatgagctggagatcctaggcacagctactaagacctaccttattcgagccgagctaggccagccaggcaaccttctaggtaacgaccacatctacaacgtataatacgtcacagcccatgcatttgtaataatacttctatacatagtaatacccatcataatcggaggcttaaggaaactgactagtatccacctaataatacggtagcccaacgcatatggcagttaacccgcataaacaaacataagactactgactacttaactaccctactctcctaactcctagctcgcatctgctatagtggaggccggagcaggaacaggtaagaacagtactaccctaccacttagaagggaactactcccacacataggagcctccagtacgaaacctaaccatactactccttaacacctaggacagagtgtctccatcaatcttagagggacacaaaaaaaatcaaacaacaacaaattactcacatatcaacaaacccacccatgaacaactaaacaccaaaataaacaaaaagagaccacccatccactcggtactgcagtcccgaatacataactacaaaagcaagaaccattaccatatctaccattaatgaatgcatccacaaaatcaccataagcacatgacaagagacatcacgtcataccctaacataaatagaagccggaaaaaactatcaaaaaagacaaacgtttcattagatacccgaaatcggtagggaagagaagaaaatcgagagttaaacatacaaacaaagacaaaattgctggaagatagaagaggattaacacctgaaagaatataataatatcaatacaattcattacacgaaggaagataagcgaataaattcgtcgtaccagaattggaaaactactacaaactcacaggcaaaacaaacgcatccacactgtggactacatagggataagaaaagtagaatacaaataaagaggagatacaaaagatataaaatgtagagtacgagagtaaaataaatagacggaaggaattgagataaacagcgagacattataaaaaggataagaaataagtagattgcaaagaagcaggaaattactgaataaagaagacagatattaaaagatggagattaacaagaacatagtaacatgtgagcggaaagcgcaaatacaagaaaaaaatgaag

SEQ ID NO: 631852 - DNA, 890 bp, Homo sapiens
ggcccggttgcagcgtgacgccggatgagtgcttttaggcttgctggcccgcgggctgtccaggcacgcgaggccctcagatttaccttctatgatggtcctcctttgtgcaatggactgcctcactatggacatatactgtgcgggacaaggacacacctcagcattcactacctcatgctgccccgtgtccgagaagactggctgtgcccaagaaaacagagagtgcagtatctcagatgcagtctgtgattgactgtggaagagtgatcagagaccgaaaaattattcccataaatggaagggcatctgaactggcaaattacattcaccagaggatcttcccttcctggttcctgtttgtgccttatgtcaatcttaccattgtgtgcaatctggcacgctgaacaaggtgacgtatgtgtcctgaaaaatccaacaggtgaccactagggtttgccccttttaaagctgacagagtgttgtcactagcattttggggtgtgaacaatacagagctggtgtcttccattgattgaaaccaggaattacaaaaccaaattgatttaactgaggtcttaggtggaaaaaacacttgtgtgtgactgcaaggattcgggctccctctctgatcacagttctaagtctcttcttgtgcaggatattcaacctaagcttcctgaatgcaaggcccaaggattgtgtgtactggggccggtgggcctctcctgttgaaaacccttggggagtggtccccaccaggtctcgtgttaggcgccagtttgggctcggcacgagatacggtgtctaagggcccacgcgggaatcgaaaccccggaaattgtatacacggtgtttttctcgcacaccgccaccttcatataaggtgg

SEQ ID NO: 631853 - DNA, 461 bp, Homo sapiens
  misc_feature (24)..(24): n is a, c, g, or t
  misc_feature (36)..(36): n is a, c, g, or t
  misc_feature (353)..(353): n is a, c, g, or t
  misc_feature (362)..(362): n is a, c, g, or t
  misc_feature (395)..(395): n is a, c, g, or t
  misc_feature (407)..(407): n is a, c, g, or t
aaaaaaaaagacccctaaaaagcntgaaagtttaantgtctccaattcttaaattatcatcgtctagatgtacatttatttgtcagcaaccttgtctgatttgaaatagatgatatgataaaacatgccattaacatgagtagtttatttttgttgggctccagagtgtaagaatattttattttttgtttgacatagtgaagttgacttgcgtgaataacaatccagcatgctttcattcttctgaataacacagaataactgtggctacagctctggattagttgtctattccagttagaggatgtgtgacattatggtttgggaatagcatatttctaaagcataatatnataccaggnaatagtgaggctctgttttccactttatctttnccatccacccanccatccatttaacagataattaatggagtggcctatcttagggtggtaatgttt

SEQ ID NO: 631854 - DNA, 162 bp, Homo sapiens
gtctccccttctcggaaggcatcactggcatgcgccacagtgtaggcctgcgggtcccgggacgactgtacgggtcctgccgctctgcccgaactcctcctccaccagcgagctgacaccaaactcttggtccatctcctccaggagaacgcgtcaaaatcg

SEQ ID NO: 631855 - DNA, 148 bp, Homo sapiens
tagaggatccccataggaagtctgaggctctgaaattttgaaatcgaccgatgttggacagagttcagatgttctatgactttggtttcctctagactttgagttccacataagctggggaggcctcacaatcatggtagaagacaag

SEQ ID NO: 631856 - DNA, 254 bp, Homo sapiens
  misc_feature (86)..(86): n is a, c, g, or t
  misc_feature (179)..(179): n is a, c, g, or t
aggacaagccctccaaaaaccccatactaagacacatcacaattaaactcctggaaactaaagacagaaggaggaaaagtactaantgacagagagaaataatgccttgcctagagaggaacaccagtttgaatgaaggcagatttcttaaccaaaaccacaaaaggccagaaagaagngacctgccattgttcaactgtaaaggggaaagagctgttgactgtgagtcctctacccagcaaaactatccttca

SEQ ID NO: 631857 - DNA, 194 bp, Homo sapiens
accgcggtgcgctcatgcatgagagctcctttttttaaataaaatatcaagcttagagaagtctagagaacatcattgcaatgccctatgcacccgtaattcagctttgttaattcctatcactttgccatgttcgcttcagatctttttgcttgatttaataaataaatcattgccgaacacaccacggcggc

SEQ ID NO: 631858 - DNA, 277 bp, Homo sapiens
  misc_feature (165)..(165): n is a, c, g, or t
  misc_feature (194)..(194): n is a, c, g, or t
ctagggttgatgaataccctttactgagtcaactattgctttaaagaatttttttgtaggtttatgtactcattttagttagcatctacctctctgggaaaatgaaaggagggttgacttagggatgagtatagatgttgaaagacaactatcaaaccatgtggnttgaatttttaaaattgtaaaacattggngtccaaacctcccaccccacttgtatgtaaaggacagtgagttttgtataaatagtaaactataagaagcatgaattttcatc

SEQ ID NO: 631859 - DNA, 155 bp, Homo sapiens
  misc_feature (71)..(71): n is a, c, g, or t
  misc_feature (78)..(78): n is a, c, g, or t
  misc_feature (105)..(105): n is a, c, g, or t
  misc_feature (115)..(115): n is a, c, g, or t
actactgcaaggctacaggctcccggacgtccctgctcctggcttttggcctgcctctgcctggccctggncttcaangaggggcagtgccttcccaaccattcnccttatccanggctttttgaccgctatgctccgcgcccatcgtctgcacc

SEQ ID NO: 631860 - DNA, 673 bp, Homo sapiens
  misc_feature (21)..(21): n is a, c, g, or t
  misc_feature (90)..(90): n is a, c, g, or t
  misc_feature (102)..(102): n is a, c, g, or t
  misc_feature (104)..(104): n is a, c, g, or t
  misc_feature (115)..(115): n is a, c, g, or t
  misc_feature (128)..(128): n is a, c, g, or t
  misc_feature (153)..(153): n is a, c, g, or t
  misc_feature (160)..(160): n is a, c, g, or t
  misc_feature (164)..(164): n is a, c, g, or t
  misc_feature (189)..(189): n is a, c, g, or t
  misc_feature (197)..(197): n is a, c, g, or t
  misc_feature (200)..(200): n is a, c, g, or t
  misc_feature (202)..(202): n is a, c, g, or t
  misc_feature (212)..(212): n is a, c, g, or t
  misc_feature (218)..(218): n is a, c, g, or t
  misc_feature (220)..(220): n is a, c, g, or t
  misc_feature (225)..(225): n is a, c, g, or t
  misc_feature (231)..(231): n is a, c, g, or t
  misc_feature (236)..(236): n is a, c, g, or t
  misc_feature (249)..(249): n is a, c, g, or t
  misc_feature (263)..(263): n is a, c, g, or t
  misc_feature (315)..(315): n is a, c, g, or t
  misc_feature (344)..(344): n is a, c, g, or t
  misc_feature (377)..(377): n is a, c, g, or t
  misc_feature (533)..(533): n is a, c, g, or t
  misc_feature (560)..(560): n is a, c, g, or t
  misc_feature (651)..(651): n is a, c, g, or t
ggacccgcgccgaagaccagngggcccaggaagcctcttcccgaagcctccccctctccagcccctccactcctgggagggcatctgctncggccagcggancnccctgccccanaaccccggcaaangcatatccaacccacccgtgtcttnttccctntgancctccgggtccggcggggtcctcangggaacangtnangcccccccanctcctnantccanccctangtctnggcggctccttanggggcggcatcgcnggctctttccctggggcctaggtccccccgctggccgtcccactggaatgtngcagctgatgtgggcaaggaaggcgctcntcccctggccgcattgtcctctccttctgcccntcggcggcccgctacacaaccgctctcctggtcctcccgctggatcatctggtagtgctgccggttctccaggtaggcggccagctcggtgtcctgagccttctcagcccgctgccggggagtgtcgccctgctggtctgtcttcatgagcgaggncccggcctccacgatgtagtggcaganggtgcgctggcccagggccgctgcttggtgcaaacaggtctccccgttttcctccaccgcatcaaggatctctggggggggcgtggtccancaggtagcggaccacatccttt

SEQ ID NO: 631861 - DNA, 1005 bp, Homo sapiens
cttctgggtttccaccaattggcaagaagggatcagcctgtcctagagatcactcctctgccaaagatcccaacaagacaacatggctcccaagaagcctgagcctaagaaggaggcagccaagccaatgaatgtcaagatgctggactttgagacgttcttgcccatcctggctccagctccagctccagcccctgcaccagcccctgccccagctcagcacatttcccgcaacaaggagcagggcacctatgaggacttccctgaggctcccaaggaacctgcctttgaccccaagagtgtaaaggtggagggcctgcgtgtctttgacaaggagagcaatggcactgtcatagacttcactgccgaccagattgaagagttcaaagaggcctttatgggtgctgagcttcggcacgtccttgccaccctgggagagaagtcattgtttgaccggaccccgactggagagatgaagatcacctacatgactgaggctgaagtggagcagctgttagctgggcaagaggatggccagtgcggggatgtactgcgggccctgggccagaaccctaccgccaatggctgcatcaattatgaagcctttgtcaagcacatcatgaatgccgaggtgctgcgtgtgctgggcaagcccaagcctgaagagtcagggtgaagcagagtcttccaggtgcctgcccttggctttagccataccagggtgagttaaagagaggcccggctgggtgagctgagatggagtcctcgacttatcaccacaccactgccccaaggacttacaggccctccctgttaataaacagctctaacacggccaggctgggctctgtgaagcagagtcttccaggaccgcaagaccaacccttcctcctcctcagcctactcaacctgaagacaaggaagatgaaggccttgaagattatccacttccacttactagtaaatatattttcttttccttatgattttcttaatttttttcgg

SEQ ID NO: 631862 - DNA, 747 bp, Homo sapiens
agccaaattttaaaatcttttgtagagacagtgtctcactattttgcccaggctgggaatttatttcaccaatgttttatagttttcactgtagatatctttcacttctttggttaagtttattcctagtcattttattttgtttgtagctattgtaaatgcgattcctttttaaattttttttcagattgttcactgttggcatatagaaatgctactgatttttgtatgtttgattttgtatcctgcaactttactgaatttatcaattctaataatttttgatggagtcattaggtttttccaaatatatgactatatcactcgcaaacaaaaaaaaaaaaaaaaaaaaaaaaaaaaaacaaaaaaacaaaaaaaaaaaaagaggggggcggggcgcgctccacaaagatatataccccccgcggggggggcacccagatttggcgcgcgctcccccccgagttttttgtgtggcacaaaggtgggccccccctaaagaggggaggcccgttattataaacagcctgagcgacaggtgggcgcgcgtgtttatacaaacagtctcgaggtatggggggaaaacatttgcccagttgcgggaacatctcttgtgggagcagagacacccttcaaccttcgcggggggggggcacacaatatggtggcaccaaacgccctccacgaacaatttttcgacggctcataagggacagatcataaacgtttaaaggtggttcaacagtg

SEQ ID NO: 631863 - DNA, 253 bp, Homo sapiens
tacttttccacggaatagtgtagttgcactagaagtggagagatcttgaatgcaagacatttctaagttagaattattaggatttgaacaatttttctgttggttttttttttttgtggtattgcgaaaaagggtataagaataaaaaataggaatattccatgtttgtgacctttgtgtgtatttccctaaggccctaagggcctataacaggccaggtttcctctctctaccaaacagtactccattacta

SEQ ID NO: 631864 - DNA, 406 bp, Homo sapiens
attgaaaatgccagttgttgtttttttggggtaatatccccaaataaaatataggtaggggtccatgaatttaaccggtttttttttgttccccatttggctttacttaaataatctttcatatttttaaagggtttggcccaggggctggggaacccttgaagtccccagaataattaggactcaaattcagcccaacccaggattagctttttgtcccatgagtaacccagggtccgggccccagcaaaaagaatgtttatgagggtcagagtaagatgaccaattgcaccataatattttttaatatggtatccggtaaatttattcagcggccctggtttactcccagttggtttatttgcccccataaaaaagggtccaataaaaattcaggtaatcccca

SEQ ID NO: 631865 - DNA, 330 bp, Homo sapiens
gagtctcgctctgtcgcccaggctggactgcagtggtatgatctcagctcactgcaacctccgcctcccgggttcaagtgattctcctgcctcggcctcctgagtagctgggattatagatgcccgccaccatgcccggctaatttttgtatttttagtagagatgggatttcaccatgttggccgggctggtcttgaactcctgacctcaggtgatccccccacctcagcctcccaaggtgctgggattacaggcatgagccactgtgcctgggcttaagttttttatagatgggaaaaccgagggtccaaacgtgagcaaagggctct

SEQ ID NO: 631866 - DNA, 247 bp, Homo sapiens
cgctatccggaccaggtcacagccaccaccaagagcggagctaacctgagcccacagccagcctgtgcctgtggccggtggccgtgaccagcggcgaagacaggtgctcacccgtgtgaatcggctgaagctctgaagaatctcccagccccagtcctggtatttgcgtgtcccctgtgacgcggtacaaggtagaacaggctctccacggtctctggccgcagcaggttgtgcctgtctgctggct

SEQ ID NO: 631867 - DNA, 207 bp, Homo sapiens
caatctgtgctgacaacgagtaggaggacatggacatagtcgtctatatggtttcatactgtcagacagcagctgggagggtgagccctgtacctcgccgctgcccccctaccaccaccaccatggctctacctgtggggcttgtacctgaggtgatagtgtataccgcctgctttgtgcttggaggtactcctagcagcttgtggg

SEQ ID NO: 631868 - DNA, 495 bp, Homo sapiens
ccagcctcaccaataaaaaaataaaaaaaatatgcaggatgtggtggcacatgcctgtaatcccagctactcggaggctgaggcaggagaatcgcttgaacctgggaagcagaggttgcagtgagccaagatcgcgccactgcactccagcctgatgacagtgtgagatgctgttctccaaaaaataataataatataattaaaaggaatgttttattccttttagttccctgtttgagatctcacttgatcggtaagaagaaagttaaggattctcttttgattttttttgatatagatttttaaattctattactttatagtagggtgggggtcaatattcttggcttaataatagaagagcattgattattctcttggctttataatagaataccatttaaataggagttccctgagtgtgttacaatcatttgatctggctaaactatttcaatgttaatgaatttttaaaatttgggaggggtaccgagc

SEQ ID NO: 631869 - DNA, 400 bp, Homo sapiens
gcggaatcaccatggcggctgggaccctgttttcgtatcctgaaaactggaggagcttcaaggctgcgatcgctgctcagcacagcggggctcacctccgcgtgctctccgcaccaccccacttccattttggccaaaccaaccgcacccctgaatttctccgcaaatttcctgccggcaaggtcccagcatttgagggtgatgatggattctgtgtgtttgagagcaacgccattgcctactatgtgagcaatgaggagctgcggggaagtactccagaggcagcagcccaggtggtgcagtgggtgagctttgctgattccgatatagtgcccccagccagtacctgggtgttccccaccttgggcatcatgcaccacaacaaacaggccactgagaa

SEQ ID NO: 631870 - DNA, 751 bp, Homo sapiens
agcgggagtggaagtgtctggctccccgtagaggcccttctgtacgccccgccgccatgaactcgtgctcacgcgaacagggccgtcgttaggctggctctgtagcctcggcttaccccgggacaggcccacgctcgccaggtagtggggcagaccgtctgaggactgcctccctaggtcagcgtcggcgtcgcgctgggacctggaagcgggagccgtcgtgagctgaaaggaggagctccagatggacggtggcggcggtggcagcgcaggcagcgggcagtagctccagcatcgccagcaggctgggatcgaggcgtcaacatggcgagccgcgtcgtagcagatgtccaacttctgctggaagaaaactgactatccagcgaacaacgacttagcgtgttatggcgtacaaatgatttgatgacggaacttgcagaaggattcgcatcaagtgtggatgatgatagtgagaaggaaagtagtgacaatgatgtgggaagttatgggaagatcaagcctggcgaggtacacgaattgagctgtgcgaatgtctatggtccttttaggtgagtaacagtgacaaagaataccaatgtaggagacaattggtagataccctctgggataaggatgcttttctgataaggaccaatgcgagaatttcaagtattgggtcttaagaaggtaatgggagaacttccgccgagcctcccagtgggctctgcatttaggtggttaattgtttgta

SEQ ID NO: 631871 - DNA, 445 bp, Homo sapiens
  misc_feature (30)..(30): n is a, c, g, or t
  misc_feature (38)..(38): n is a, c, g, or t
  misc_feature (198)..(198): n is a, c, g, or t
aatcacggagggcctcctccccactttaangggttaanccctttttggccccccctggtaggttaaaataaagtatccttggtagaagaggatcatcccaactttcacctcacctagttttaagcatcccattgaaagatgttcaccctgaatcaatcaagtacccacaatgattgcccaaatacagattttcctaantccatcattccttttacatttgttggttggcattaccctaaaaggtagagctttcccttctctccaatttattcattgatttatatcatgtggacttgtggcttattttatttgagaagttgtaatttgttcgtttgccagtggcgaccccttcaagctggcttctgtgtcctttggtatgtccccatcattcttggagcatgttcttactttctaatacaaaaagacattccatggtcaaaaaaaa

SEQ ID NO: 631872 - DNA, 119 bp, Homo sapiens
  misc_feature (11)..(11): n is a, c, g, or t
  misc_feature (26)..(26): n is a, c, g, or t
cccaccctggnctcccaaagtgccgngattataggcatgggccactgcacccagcattgaaaaaatttcttttgtagaaatgaagtttcactgccttgcccaggctagtcttgaactcc

SEQ ID NO: 631873 - DNA, 188 bp, Homo sapiens
ggggggggggggcctttttttttttcccttttttttggggggggggcccccggggggggtttttttttttgggggggggggtttttagggttccccttttttcccccccccggtttttgggggggggagggggggagggattttttttttattttttttaatttttttttaattttttttcccccgga

SEQ ID NO: 631874 - DNA, 356 bp, Homo sapiens
caccagatgctcccaccatgtcttaggagggaggatctggtgcacttataaggatctgggtctgtcagtgtcagagaaggtaggatctggccctggtatgaggatctggatctgtcagtatctgaggaggtagggtctggccctggaggatctgggtctgttcatgtctgaggaggtaggatctcgtaccagtatgaggagctggttctgtcaatatctgaggacgtaggaatctggtacaggtttgaggatttgggtctgtctgtatccaggaggtatgacctcgtacaggcatgagtatttggtattgcagtgtctgaggaggtaggatctggtgtaggtgggagcatctggtg

SEQ ID NO: 631875 - DNA, 338 bp, Homo sapiens
ggtcgtcagaggatcccgtctacatagtgttagcaagtataaagcacgttctggataccatgggtagacacagaagagacatagcctattacctttgttttccttagttttctttttttttcttttcggagacaggtactcactcggtcacccaggtgggagtgctgcgccttgaccacagctcagagtagcctaaacctcttgtggttcaggcattctacccccatttcagcctccaaaattagcggggacacacgagctggggccaccatcccgggctattttttttttttatattttttgtgggcaagaaggggggtctccttggtgtcccgggg

SEQ ID NO: 631876 - DNA, 1005 bp, Homo sapiens
gaagcttggtgtgcacgctatgtgacggcttatggccattaggccccttcacgtggatccatagaacgcgtttgtcccagtcacccaggcttgttaccggaccggcattgcctagatttaatacgcctcgctatcgggacactttgtactagtaggctaggctggcgtaacacttgggcccctcaaggattacttctagagcggccgcgtctaaaggcgctatcaggaccgcgacaagccagcccagatccgacttcagcaacattattcggcgccaataggcgtgttgcctgatggctaataagaacaccgccttggaccacaagaggaagatcggttaaactgattcacgattgtgaaaagggtgatgtaaccagtcagcaaactgagtgcagaataccaattctgaagaacaggtgcagagtataacatccggacagcaaagaatgctggttggagctggactaaggctcagcgatataagcaagcaggaagatggacccacatcagtagtcatcattgctgggctcccttctaagattctgtaccaagctatcttcagaaagggatcaacccaaccatcattctgagtcattcgcagaaggccctggaaacggcattgaaatcttgattgacatgtctcgacctgtggcactgggtgcagacgaaccttggtaaatagtgcaccacttaacagtgcactcaacggggttccagtatcaaggtctgttgccccatgagtgaacttcagtgattaaagttgttgccccgcacaagcagcagggaccttaggtcatacaatcgcacacggggcgagacctaagccgggtaagaaatagtagacagaccagtataatagaagcagacatacatcacgccaacatagccaaacaaaccacacacaggaagaaaaacagacatagagataaacatagaaaaagaaatctgagctaaaagaatatacacaacatgacgtagtatttagtagtagacacgaatagacta

SEQ ID NO: 631877 - DNA, 558 bp, Homo sapiens
tcccctgccaggtatctctaccttctctcatggtgactcgggatcaactggccctggctcctaagtaagggcttccagaagggggccagtaattagatctgatctcattcttcccactcagatgtcctcaaagacacggctccagaaattcctaccctctccggtgtcatcggttcttctctctactaaattcaatcccatcagaatcaggcagtgccactagcaactctccaactttacacacacaggcagtgcagacacatacacaaatgaagcccacaagccctccagtgacggcaccatttctcaacaccccttcagggtacaactataagagtggtctccataccttatctcgcgaggtggcgggtctccttccattctctcaggctcataccaatccgtccagggcaactggcctttctcaaagtaccattcacctctaggggtcactcatcagtccttatctaacccaaattcttggttggacagagttgatctctcttcccttgaagctttcttcagtgggttaaacggcacagcattctggtttgcctc

SEQ ID NO: 631878 - DNA, 940 bp, Homo sapiens
tcgctcctcaccgtgggcgttgtgggcggtggatatgactgtgcgtgtagccgctggttacacggtgtttcttacaccggtgtgtgcaatcttgtggtggccactgctaatattgcgggccctgttttggcctcccggtaacgtgtttgcgatggctatttcctcgcttttctgtgggtgagtaagccggtctcgcctcttaggagggatgtaacatcgacccgcctgtgtttgtgcgcctcgaccagggccctgttgcctgcatatcaacgagaacattgtgctgcgagcaaactaatgcgcgcgaactgccccagcaggggcgccacccacgtcgggggtcctcgcaatatctttttggcagcctctgacaaacagacaccgtcggcgtcccctgggtgcttccgcagttctccggtgtcccctggaaggttgtcttccgacgatttcttcaagtgcgagttcatcccacgggaggatgtgttcccgcgcactgtactacggtgatgcgggcctaaggtctcctccccccggccggccacccggttttgggggagacccccccggatgtgacggtcccacctcttgtgtgagatctgtggctccatcataaggtacgcccaaagggctcgccgccttctcgcagaagcccacgaatcgcggcggtgcagcgctcgaaatggactaaacaccgggggccggcacggaatcctgtcgggagccaaggaacgccccacggcctggtttttggaacaaaaaatgtgtactccgggatggggcccacacgcaacgacggggcccagaacccccccatatcaccggcgacaagacgatgaagaggcaacacgaatggtccggccacacaccaacacggagagcgcactcaaccagcctcccaggagacagggggacttcaaaaaaaaacaccccaacaattaac

SEQ ID NO: 631879 - DNA, 289 bp, Homo sapiens
gggggggaaaaaaaaaaagggccccccctttttccccgggggcccctttaggggcccccccccccccatttgggggggggggttcccggggggggggtttccccttttttttttcaccaagggggggcccccccccttaagggggggggggttaattttcccccccgggggggcccccccgcgggtttttttttttttttttggggggggtttttttttaaaaaaaaaaacctttttggggggcccttttggggggttttacccccccccccccccttttttccgggga

SEQ ID NO: 631880 - DNA, 948 bp, Homo sapiens
tatcagaagcgctgatggtcatatccaatctcaatatctgggtcaatccacaccctcttagaactgaggggggcctctggtgtctcgcgtgattgggagaatatggtgtactagtaaatcggtgtgatgtaccttcttcaacagtatgagcacagttatagacattcagagtagaaccacttgtggatgggaataacccaacaagtgccgatttcaggggcgggtgcatgtagttattattttacagatagaaactacccctaccgactcatctttccttctctaagacacaaagtgattggttatttgggtaccgtgagtaacgtaacagaagttcaaaaggcagttgctgtggaatacgagtgggtatattgggggttctgttggctttcgaaattttcttcttgggatgtgtaaatgtagtcaatgatgaggtaagtgcgcaaatgctgtagctgtttgctcacgtgactgccaggcccatcggagtgtaagccggggttgccctctatttggtttatttttgccacgttatgagcacgaaatggtagaatcctccacggtgcttcctgcgtttccgtgacaagccgctcggcgcatggcctggcgtgaaaatctggggcttagaacgcggtcttgcggtaacagccttcctctgatcgcactcgcccctcggcggagcaggtatcaatcgttatactggtaacaacaaaggcgtaactatatgaataattgatgcgccaacacggactaatgacgatgtggcgattttactagactgcacgtcaaacaaaaacggggcgcaaagatcacgaggggccaagtacacaacaatgttgaaaaggccacaaaggaggataaaacagaccatacaaagcggacagcacagaacgaaacaaggggaagacacaagacagaaaaagagacaatgccatgctaacaacgaag

SEQ ID NO: 631881 - DNA, 115 bp, Homo sapiens
gtggacgcactcgggaattgtaggaggacgaggctcaactcttgccaagccaaattgagacaagtcttacacaagccagagtgtgggcaaggctaactctgctttcaagcttaag

SEQ ID NO: 631882 - DNA, 415 bp, Homo sapiens
tgttttgaagaaaaaaagaactattttgaagaccgttttggagagggtcctcttgtaaaggggattcccgaagaccagaacccccttaaaaaaaaaggccgctgggtttttttattaataacttggggggaactgcctcctaagtggaagaactagtttgttttagttttccccgataaaacccccctgctttttaaggaaggaagaatggaatttaaagggggctttttttagccccctatagataggggtttggataaaagcatatggggtactcctctttgccccctatgccgtttttttttaaaaagccaagaggttccgatggtccattttgggaataagaacctttcttgggcctggcccttttttccggattttgcttgatgcttccaaaaaagttttgttttgggga

SEQ ID NO: 631883 - DNA, 379 bp, Homo sapiens
aaatatgtaagatagcctaagccataagaggttcccaagaggagaaaatatctatcctgcttcaattggaagagtaaaaaacactgaagatcaagaggtggggaaaagactttctaggaagtggagaattatgtgtactccaagcacttgcattcacgaatttgcatgcccaatgaataagtccaaaaatacacaatgtgtttatccaaataaagagaaagatgcttcagctgcgacagtagaaaaagaattcatggcggcagtgaggctttcccgcgaacaccaaaatggtccgatctgaggggcaaggtactcccggacggcagaacctgcacaaacagatgcatggcactggatcttatacgcctcatgcatcact

SEQ ID NO: 631884 - DNA, 385 bp, Homo sapiens
  misc_feature (170)..(170): n is a, c, g, or t
  misc_feature (183)..(183): n is a, c, g, or t
tgcatgagagtgcccggtattgaggtgcacacgagatatttgatacaggtacacaatgtataataatcacatgagggtaaatggggtatccatcacctcaagcatttatcatttctttgtgttacaaacagatccaattatactattttagttacttttataaatgtacnagtaagttattgnttgaactgtagtcaccctgttgtgctatcaaaaactagatcttggctgggctctctggctcatgcctgtaatcccagctctttgggaggctgagatgggaagattgcttgaggccaggagttcgagcccagcctggttaacatagcgaggccccatctcagtcaatcaatcaataaaaatatatgtatattcttagatagca

SEQ ID NO: 631885 - DNA, 143 bp, Homo sapiens
ggtatagaaactgtattcaagagtcaggtcagagtcttcttttcttttctttttgcgatggagtcttgctctgttgccagactggagtgcagtggtgcgatctgggctcactgcaatctccacctcccggcttcaagctgcta

SEQ ID NO: 631886 - DNA, 332 bp, Homo sapiens
  misc_feature (321)..(321): n is a, c, g, or t
acagtagactgtagtgtgaggctcgcgggggcagtcgccatccgcccccgccctgaacgagctggtgtcctttgaggacctcctgtttgaaaagaaatttcagtcttagaaggcagcaggctcggtgtccaagagcacgcagtttgagtacgcctcgtgcctcgtgcggaaaagagacaatgatgacatccgtaaaggcatcgtgctgctcgaggagctgctgcccaaagggagcaaggagggacagcgggattacgtcttctacctcggccgtggggactaccggctcaaggaatacgagaaggccttaaagtacgtccncgggttgaaaa

SEQ ID NO: 631887 - DNA, 340 bp, Homo sapiens
cttactctgctaagttcacagtctgctgtgttttgctttggtactgccttcgttcttcgggtttccacaagtacagtcttgttttgtgtttttggtttacttgccgtgttgcatatctgtagaaagttgcttattcactggccttggttccattgaagtctgcgtctcgagtagtccgttatcctcctacagaaccatctagcattttcaataactctacgtcctccagaccttctagaaggaacgaaagaggtctcgtttcctagcctgagcttgctcttgagtgcgttcacctcgcggcccatggcctcgttgctctccgtggcctcatcctaccaaa

SEQ ID NO: 631888 - DNA, 1867 bp, Homo sapiens
agacagcaggaagaggggatgtgtgaggcagcccattcacctggggaacatgactgggttgtcgatggacggtggcggcagccccacaggtgggactgtggcacccgttctactatgactatgagaccgttcgcaatgggggcctgatcatacgctggactggccttcatcgaggggctcctcatccatcctcagacagaagataccgcaagatgcggggcaataagaagcgcaggcaaactcaactgaacgatgagccgtaacagcagcactcaggcaggaagacacccaatgaacctggggccagctgggaacgacaagcatggcccatgactacctggaagcacaccccaacaacccagggccaaagcacctttgtaccacgacactgacagagccagggcatgacaggaagctccagactcaatgtgaccaccaaggtggcattagcacaacgaactgcctcgtgcaacctcacgcccactacatacagccggcgacacagacagcagactcactcacggaccacaacacacaccacgcaccccccaacccacgtcccgccaccacggacctagacaacgactagcaccaccagaaagcagccgacccaaattaacacacatgaacacagtccccagagacaggcaccgaacgacgcatcaaacaagaaccggggaacgaaagcaaacacagccaagaatgacaaccaaacacacaccaaaacacacggcaaaacaacaacaagacacacacacaacgaacccaaacaagaccatatcaacggagcacaatgcagacgcaacataaacgatagaaaaaaaacaacaacccaacacaccacacaccagcccaaaccggcgacaccgacaaacacccgaacacaaaccaacaaaaacgacaacaagaccacccagacacagcacagcccaccaaccacacgacaaacagcacacaaacgcccggcgcggcacgaggacaagaaccaacgcagaggcggccgcgcggggcgcaagggacgagcagcggagagccactcacgcaggacacacgagaagcagaagtgaagggagaagagcgaggtgaataggcaggagccctgcgcagacgcgagagacggcgaggagcgacaatcgcagaacgcgatcagacgaggagcgccagcgcgaggcgagacgagaggggacagagacgacggaagggacagaggacagcgtgatgaatccccggcgctcgagacgaagtaggacgagacatgcgccgaacccacgggcgactagaacgcacagacacccggccctcacgccacgaagcgaggcggcagagacacggcgccaacatcatacccgaccgtactcgggagccgcaacgcacagaccgcgaacgccgcaccagcgaagcgcacgccgagccagcataacggcgaacaccagcagcaacgcgaccgagaccgcacggcatcagacggaggagggagacgacagagcgcaagcaacgaggagaagaagacgaagagcgctagagcgacaacgacacaacgagctgcagagtcgcagcaacagacgcccgggtagtcagcatagagggcgacgcctagaagccgcaagagtcgcgagcggagggaagccgaagcggaaagcgctaactgcggaacgcagagtaggatcggagtagggacgcccgaggtcaaaacgaagaagcgagcaacagcacctcgtcagcgccacgaacagccagggctcctgacgagagccgaaagacgagcggcaggaaagcacagcgggacgagcgagcgacgagacgcgtggagagcagacaagactcgcagaggaggcaccacgccagcagccagaccgagcagaagcgg

SEQ ID NO: 631889 - DNA, 628 bp, Homo sapiens
ttccagatatgaaggaggaaatggctcggtcaccgtcgtggatacccagacctgctcaatgttaagatggccccctggacattgagattgcccacctaccggaagctgctggaaggcgaggagacaggatttctctgcctcttcccaacttttcgctgccctgaacctgagggaactaatctggattcactccctctggttgataccccactccaaaaggacacttctgatttaagacggttgaaactagagatggacaaggttatccacggaactttctcagcatcacgatggaccctggataaaaattgcacacactcagggcagccatatatgtacccgccagagattaaaaagagaatccatatcttaaagaaaccagctttcaagtgcccttctgccagtttttcaggagcgccagatagatttggaataggaataagctctagttcttaaccaaccggacactcctaccagatttagaaaaaagtttaccacataatttagtttaccagaaaatcttgtgctagaatacttttttaaaggtattttgaatacccttaaaactgctttttttttcccagcaagtatcccacccacttggttctgcttccataaatctttggga

SEQ ID NO: 631890 - DNA, 126 bp, Homo sapiens
aattctgcaccacagcccaagcagaggtcttggctggatcagaacaagctgctgagttgccatcaccaacttcagccgggactggcagagctggccgggccctgggcgccctggttggacagctat

SEQ ID NO: 631891 - DNA, 1338 bp, Homo sapiens
acataagataatatcataccacgagagaaactccaatgaatataaggcaatgtggcaaagcttacaaccagtcctcacaccttaccagcacataagataattcatcactggagagaaaccctacaaatgtgaagaatgtggccaaagccttataaccagataccacacaccattaccagaccataagatacattcaatactggcagagaagcccgtacacaactgatgaagaatgtggcaaagcctataggcagtcctcacaacatatactaaagaataagcataaagtctcatacttggagagcaacaccatacaagatgtgacagcatgtggaaaacagacttgaaaccaagatgctcaacaacttacgtagaccataagagcatgcaatacctggcagacacacacgcccgaagccaaggaggttgcaacaaaaaaaggtgagcaaccgcatgacataaaagacgaaacaccatcaacaaacataaacgtggcacacactcaccgaagcacatgcaactacctggacagcagaaccacccagaacccaaacatcgatgaccacgccatggtcggggacaaagccacgagaaaaacacaggagactcaaacaccataaccaaaacacaaatacaaggaaagaacaatacgtgggaaaggacaaacccgacacaaaagagactgcagccaacgggagccaaacagccagaaaaacagccaggaccgcacgcaacacacagcaacccatcaagacagacccaaccaacaccgggaacgaacaacaaaaccgtaccacaaaaggcagacagcacaaaggcggcccacgacccaaacatgaacgaaaagccagccccagtacaacagacaaccagcccacaacacacaaccgagaagaaaacacacccacccaccacgggcaaccacacgcgccccacaccccagacaacaacacaacacccacacaggacaccgaacacaggataacacacacacggaaacagcaacaccacaaccaaggtgacgaaaccgccggcacacggcagataccactacaactcacacccactgtacgtacagtacagagaagcacaagatggaaagaaaacacacgacaacagaaagacagacgctagaatcagagtaaacaccaagtacaaaaaaaagaagagcaaagatagaagcggagaaagaacacaaagcagaaagaaagcagagaaagacgccacagaaagtaacaagaaccatggacagacagacaggaagaaaacaagcgaaggaaagaagagcacaccaagagtgatagaccgtgctaacatcacaccattaagagggaagag

SEQ ID NO: 631892 - DNA, 911 bp, Homo sapiens
tccacctccaccaccacctgcctacaactatgggagttacggcggttacaacccggcccctataccccaccgcagccccgcaccgtaagacctaccctcagcccagctataaccagtatcagacagtatgcccaggcagtggaaccagtactatcatgaaccagaggtacagtggtccgccatactacgtggaactacgactacgtggagctactccgtggaacacatcagaggtggtacacgtacacagtagccagtgtgacccagagggctcacacggacgaggacaccatagccgggcctatccgtcacaacacgagcgaccatgacctacagagaacccaatccatacgtggccaccccagacagacatacaccgaagggatgactgacggaatggaggatacaacacacaagaggaactgacccaaccacatacaaagacaaacagctggacccctccgccgcgcgtccatgaagggagacgccttccccatttagccccccagtcacacgtaagagaggacaccaagggaacactttcatacacagcacgtggggactgagcacaggaccaagaggctagcaccacaagtgggacagcgataatagacaccataccacactagagcacagggacaccaacacagacgacgagacaacgcacagaagacaggtatacccaaacgcaatccaacaatgggaagaccacactgcagcaaaacacgcactgcaacgcaaacaccctagaacacacgggaccactagccaggtgacaacgtcacaacaaccaaaagaaggaccacacaaaaagcaaaatcacagcaacacagcgagaagacgacctcaccaaagccagaaccgcaaaaaacgacacaacaacagccaacagatcaaacacaaccacacga

SEQ ID NO: 631893 - DNA, 499 bp, Homo sapiens
  misc_feature (1)..(1): n is a, c, g, or t
  misc_feature (107)..(107): n is a, c, g, or t
  misc_feature (196)..(196): n is a, c, g, or t
  misc_feature (234)..(234): n is a, c, g, or t
  misc_feature (249)..(250): n is a, c, g, or t
  misc_feature (284)..(284): n is a, c, g, or t
  misc_feature (286)..(286): n is a, c, g, or t
  misc_feature (288)..(288): n is a, c, g, or t
  misc_feature (292)..(293): n is a, c, g, or t
  misc_feature (302)..(303): n is a, c, g, or t
  misc_feature (322)..(322): n is a, c, g, or t
  misc_feature (334)..(334): n is a, c, g, or t
  misc_feature (339)..(339): n is a, c, g, or t
  misc_feature (369)..(369): n is a, c, g, or t
  misc_feature (401)..(401): n is a, c, g, or t
  misc_feature (403)..(403): n is a, c, g, or t
  misc_feature (414)..(414): n is a, c, g, or t
  misc_feature (445)..(445): n is a, c, g, or t
  misc_feature (449)..(449): n is a, c, g, or t
  misc_feature (462)..(462): n is a, c, g, or t
  misc_feature (464)..(464): n is a, c, g, or t
  misc_feature (474)..(474): n is a, c, g, or t
  misc_feature (491)..(491): n is a, c, g, or t
ntggttttataaatcctcctcttgaaattattgttcttggcccagcatggtagcttatgcctgcaatcccagcacttcgggaggccaaggcagaaggatcgcttgancccaggagttcgacaccagcctgggcaacatagtaagaccccatctctgtttttttttaaaaaaaagaaattctgttcaaaagtatttnagaccaaaaggaggtcataaaaactgttcatataattnctctatgagaaaaanntccctgtatgggaaggggcactgaagatctggcncngngaannggggggggnnagggcagtgataagatccngccctatttttntagcntgcattttcgaccttgtggatatgtctgtnctgggtgttaatagccccctccttgttttttngngggaattaagnaattaaagtgaatctgtgtgctaatgaagtntgcngttacagaatctntnaagccaagcntgtaaagtctgtaaggnaagatctt

SEQ ID NO: 631894 - DNA, 300 bp, Homo sapiens
cgttcattttccaaatgaaagatggtttacatatgaatcatattggcagatatttaagcctattatctcaaaggtgatggatattatcaacctagttgctgtggtattacagtgtcgtgactactcaaactctggcgatagactgggttgtctcaatctaacagtcaaaggtcatgcttaatgtgtacaagtcgtaaaaacttttaacttaccattactgatgcttggaggaggtggctacacaatccgtaatgttgctcgatgttggacatatgagactgcagttgcccttgattgtga

SEQ ID NO: 631895 - DNA, 347 bp, Homo sapiens
aaggatcccgacacatagaatgcatactagcatataacgattcttctgctcatgttctgaagccacagcagaaccttgattataagtgaccgacattgaggcagaagagttaaactctggctagatttcggtggtgccccggcaataatagtttttgaggtttggaatttactgttattttatgattaccatgtccccgggtggaaaaagggaagccagccatccaaataaccacttgcttgcccagagacctttccctcaaacagattgctttcaggaagctgcgagagaagtaggggcatcccttgtggtggtacctctatgtttaaagaaagaagaaaaaaacc

SEQ ID NO: 631896 - DNA, 622 bp, Homo sapiens
tggaaaaatgtctcgctcttgtcgcccaggctggagtgcaacgatctcagcttactgcaacctccacctcccaggttcaagcgattctctggcctcagcctccaaaagctgggattacgggcacattgccatcagttccgtggcataattttggtattttatagtagacaacggggttttcgccagtgtttggccaggcgtggtctcgactcctcctgtaacctcagcgtgatcgtgcccaccttcggcctcccaaaggtgctgcgaattatagacaggagccaccgctccccgaaccctcttctcactttctcgaaatcttcttctcctttttcccacctttcctagggtgttcaaagaacaggtggagtggctcctctgaggtttcaaacaccaagcctgacccgggataagctattttaccagcaaaggcattccaagtgggcttgctagcggggaatgcacttgtaaggacaaccagcgcttccctcgctacgggaacgctgtttgtccctaattgccaaagaaaccgccgcttgacgccatcccccagggagaacacctgctcctggtccaggccccattccccctcgtcctggtcctcgggttccgcctttgcccc

SEQ ID NO: 631897 - DNA, 324 bp, Homo sapiens
atccagggtcgcctatctgtattcccgcgacattcggtggcctgagagcctcaactacgtggcgtctggaacatgagcattctgcagaccctagacctcgtgaagtcatgtccaggccacgactgagaacaacggaactgaaaaccgtcacctactccaagctctgagagccctcgcgtcccaggccccagccaggtggccggccttgttccgccgtcatccacagaaagggaggatgggcgatgacagtggtctctatgccttctgacccattttcccaggttcataactttatgacgatcagtttctctagccctaccccgt

SEQ ID NO: 631898 - DNA, 139 bp, Homo sapiens
ggggtacatggacccaaaggacgtctggctctcatacttggcgtagcagcgctccatgtggcgcaaggcaacacgtgggttgatggagaggaaggaggagcgatacaagcggcatcggcagaagcagaagcacaaggat

SEQ ID NO: 631899 - DNA, 121 bp, Homo sapiens
  misc_feature (3)..(3): n is a, c, g, or t
cantcttttctaacagaaagcagctgaaaaatccaaagctgcacatagattagcaagctaaaagcttgcatagtgttaatgctgacagactgtgccaactagaaaagggagtgcctgcaag

SEQ ID NO: 631900 - DNA, 248 bp, Homo sapiens
  misc_feature (2)..(2): n is a, c, g, or t
  misc_feature (11)..(11): n is a, c, g, or t
  misc_feature (112)..(112): n is a, c, g, or t
  misc_feature (207)..(207): n is a, c, g, or t
anttcggcacnaggggggcgttgggaacggttgtaggacgtggctctttattcgtgagtttcccatttaccatccgctgaacctagagcttcagacgccctatgctcagccntcgaaccaaccggcggccttgagcgctgacaagcaaaggtggtctcgcggaggtgatccaggcgttctccgccccggagaatgcagtgcgcatgnacgaggctcgggataacgcctgccaacgacatgggtaagat

SEQ ID NO: 631901 - DNA, 263 bp, Homo sapiens
cctggtccatgtttagtacaggcgctgtcgccccggcgctgtgtcaaagacctgctgctgtcgatcgccggcggccgcagccaggaaaaacgcgcactggcactggtgcgttgaggaaaaaacggcccgccgcagcgggcctgagcaccgttaccggaacggcggttcgttgaaggtgcgcagcttgcgcgagtgcagacgatcgccctcggcgcgcagcagatcgatggcgcagatgccaatctgcaggtgctcggagatcg

SEQ ID NO: 631902 - DNA, 1168 bp, Homo sapiens
  misc_feature (567)..(567): n is a, c, g, or t
  misc_feature (633)..(633): n is a, c, g, or t
  misc_feature (998)..(998): n is a, c, g, or t
gcccttgccttcaatgtgtcctgatcagagagatcgacaaggcggacggcatgttctggagctcagtggaaccgggagaccaccagctgttcttcctccatgttccactttaacgatgtgatgaacgctcactcgtgacatcacatcacaagaccgtctacatcggcattgagtcccatgtgtgactggtcgacggctgtacatctctcgacgagatgcagtagttgacctagagttgaccaacatcccctgcctgatgctgagatagaggtctttcggatacctgggatcagtcctatttgattacccttgccaggataggattatcgctagtgcatatgccgtcagggggagttcttgtcgttgacggcacttattcaatcccaccatacgctaggtctccttatgtcgcctcgtgaaccgcggcccacacctatgagttgatgtgcgaccgccgtcgggcagttgaccattaccagggagcgatccaccacccacggatgcgacagtactactagggagagctcacacaccaatcgcgttagaatccagaatgcgccgttgggnatcacactcgggcgcactcttagccgagatggtcaatctagattgctagctccggtgggaaagcantgcaagcgccagtcacgatctgtcaaacttcaaggatagcacaaccaacaggccagacgattgcgatccaatcataggttcccaaagtacggatcggtagcggttctcatgtgtagcggaaggtttcctcaacgtgagggagattcgctcaagtaaagtcattagaagcttcgctttgcgcggatatagcgaatagggcaccgcttctaaagggaatggttaaccctttgtctgggaaaggtttcattcgccgccttttagaagccccaacttttgtcgccggtaacagcggtcgatttctgtaacgggtgtgcggttcaacacacaaggttatcacactattgataatggcccacaaccgaggnggtggtgttcctcgaacagggaaaacatttccaaccgcgtcgaatttaacttgggggctgtcgaaagacttgttttccccctttcaacgtgaattccgttaggcgtttccaattccccgggcgctaaaaccttaaaattagtttttccaaccgtttgtaaccatttcccg

SEQ ID NO: 631903 - DNA, 255 bp, Homo sapiens
  misc_feature (82)..(82): n is a, c, g, or t
  misc_feature (202)..(202): n is a, c, g, or t
  misc_feature (208)..(208): n is a, c, g, or t
cagggccctgggctcggttcagcgatctgctgtcgccatctggaaacgctttgttaggttgaataacggtccccccattttnattgtgcaccaggtcctgggatcgtggagcgggtcctgcctggcctggctgtctttccgggcgcagactctgtaagtgcagcccgatcgatagtccaggccgaccgggatgagtcctctnactctntggaggggcagccttcggaggtggcaggagttcctgaccgggcgtct

SEQ ID NO: 631904 - DNA, 651 bp, Homo sapiens
  misc_feature (18)..(18): n is a, c, g, or t
tgatgtatatgtaccacnttttctttttccaatcatccattcaggggcacttaggttgattccacgactttacaatagcaaatggtgctatgataaatgtacaagtgcaagtgtcttttttatgaaattatttattttcctttgggtagatactcaccagtggaattttagtttttgagaaatcttcatactgtttcccataaaggctacaagaatctacatccccaccaaaagtgcacaagcacgcaacagataattttaatgtgttttactcttccactagacactatgcatcttgagggcaagtttcatgccttattaatcttagtattatttccagtatctaggacagagaatgatataaagtcaagagtaataaatgattgctgaaataaattgaaattttaaattgcttggttccctaagcagccactttcctttactatgtcaaaaacagtgagtccttttcctttgccaatggcatatttcatatgcccaagagatgtgaaagcatacagcacaaagctgaaatgaaagactcattacagtattgcattagagctacgaagtcatattttgcaaccattctgtgccaccaatataattagaagatattgaactttcattagtttgggaagtcagctggccctt

SEQ ID NO: 631905 - DNA, 227 bp, Homo sapiens
ggtatctaaggatccccgtcccaggcacagtggtgaggaaaaatacgtctggacggcaggtgtcatcatcttaagtatggtaagcggctaggtatggattaaaccgtaatcatatctttttcctatctatctggaggcacggggggaataaaaaaccggtatattttacttggtggcagatagtctggccgcatctgggcaagtggcggcgcgagggggcgctcgac

SEQ ID NO: 631906 - DNA, 787 bp, Homo sapiens
  misc_feature (118)..(118): n is a, c, g, or t
  misc_feature (120)..(120): n is a, c, g, or t
  misc_feature (137)..(137): n is a, c, g, or t
  misc_feature (171)..(171): n is a, c, g, or t
  misc_feature (769)..(770): n is a, c, g, or t
ggccagacgtacgggcatgcaggccctcccctccagcccctcagcatccagccacatctgtggacacagccagcgcggcggagcagggctctgctaaggacagacggcatcaaggcangncctgggccgggccaggnctccctccccacagcagccctcttggcaggcagncagacgcccgtgagggtggacctgccatgagggcctgcacgccggaggccgcccactcagcactgcgggccctccagacagcctgaccaggcatccccgtaccagccccaaggtcttcccgctgagcctctgcagcacccagccagatgggaacgtggtcatcgcctgcctggtccagggcttcttcccccaggagccactcagtgtgacctggagcgaaagcggacagggcgtgaccgccagaaacttcccacccagccaggatgcctccggggacctgtacaccacgagcagccagctgaccctgccggccacacagtgcctagccggcaagtccgtgacatgccacgtgaagcactacacgaatcccagccaggatgtgactgtgccctgcccagttccctcaactccacctaccccatctccctcaactccacctaccccatctccctcatgctgccacccccgactgtcactgcaccgaccggccctcgaggacctgctcttaggttcagaagcgaacctcacgtgcacactgaccggcctgagagatgcctcaggtgtcaccttcacctggacgcccatcgtgcggggatcnntagagtcaccgtgggaa

SEQ ID NO: 631907 - DNA, 498 bp, Homo sapiens
  misc_feature (443)..(443): n is a, c, g, or t
cactgactcatccacgaacacaggctacatagaacttcgggtcctgagttccgacgacacggccgtctattattgtgcgagagatgtcaggggtgacacgtctatgatagttgtggactttcccccgcttgatcactggggccagggaaccctggtccaggtcaccgtctcctcagcatccccgaccagccccaaggtcttcccgctgagcctctgcagcacccagccagatgggaacgtggtcatcgcctgcctggtccagggcttcttcccccaggagccactcagtgtgacctggagcgaaagcggacagggcgtgaccgccagaaacttcccacccagccaggatgcctccggggacctgtacaccacgagcagccagctgaccctgccggccacacagtgcctagccggcaagtccgtgacatgccacgtgagagcancacacgtatcgctgacagtattgtgcctgtgtctaagcccaggcctacgaaatcg

SEQ ID NO: 631908 - DNA, 247 bp, Homo sapiens
tcccccgcagtctggggcttggatgtgttagccctgctccacctgttccaacacttcccgtgtattcatgcctcggtagggtattcggcccttgatgatgagctcagtgagcaggatcccatcggaccacacgtctgacttgatggtgaatctgccacagagggcagcttctggggctgtccactttatggggaacttggaaccttggcagggtttgtactcgtcgtccttgatgagacgcgccaag

SEQ ID NO: 631909 - DNA, 455 bp, Homo sapiens
tgagagggagagacgcggcgtatagtagctcctggtccttgtactactgggtcccgggaacccgggtcaccgtctcctcagcatccccgaccagccccaaggtcttcccgctgagcgcagcaccccccagatgggaacgtggtcatcgcctgcctggtccagggcttcttcccccaggagccactcagtgtgacctggagcgaaagcggacagggcgtgaccgccagaaacttcccacccagccaggatgcctccggggacctgtacaccacgagcagccagctgaccctgccggccacacagtgcctagccggcaagtccgtgacatgccacgtgaagcactacacgaatcccagccaggatgtatatgattgttcactcccagttccgatcaactctacctaccccatggtcctttcgattccgtactcataacccggggccgagctgattct

SEQ ID NO: 631910 - DNA, 1200 bp, Homo sapiens
ggcgatctttaggacctggcctgaccggtgcaaacccgcaatgcatgctttagcccgtcgaggacgtgtgtcccacaggccaggattgcgctgttacccaggctgtgagttcgcagtgagggtcgagtcatacttcacctagcagtccttgatcttcctgcgtgtgtcaagccgattggtcccatcctcaagcctcccaataagtaaagcctaggttagcacagggcgacattggccaagcgtggtcgatcccatatcagtatcatcgttgctgtatgagaattgttatgcatgaataagcgaagttgtccatgataacatctccgatagatagccacacgtagaggactagatcataaggggttaggtggctgtggataactagtttcctcgtgtgccagctgtaaacgctggcaccatggtacttctttcttgtatgagcgcctgctggtagttgaactagtcacgatatactgacgatcgaagtcgggcgcattgcacacctgttgcacagactacagtaaacgcacattctggtccgcttggaagacacctacagtgtggaaatcactagcgggggagcatgggtcatgccattacgtgcatcgtgctatacttatgtgagcgcataatggatagtcgtgaccagtgtgacaacatcgcaagatccatgtgcgtgcattgatcggggaacacattaaagacacattatgtgatcctgggctgtgggcattgacttccgtcaatgctgattacagtttgcctcaatgttcgaggtccaaaccccagttgctttgccactaaagggcgcgtatgacaaaaagttgctctaattgggccacagggggccgaaggaggtactctggcgcagttgcaatacgcgttgtagaggttgagttgttctaggaaatttgtggaatatggtgtaatgtagaggaagcacattttgaagttcctcgttcgatatggcgtggaattttgttaacaaaagcttggagggatggttgggaagatgggcatagaaaatgtctgattggtggttaccagtcgttgggggaaaaatgagggggttttgaaaatgtgaaattttctgccaaaggaattattggctgtggggctttttaggtaaactttgctattgggagttaatggttaattgatagagattaacaagattatccagtctcaaggaaattattc

SEQ ID NO: 631911 - DNA, 303 bp, Homo sapiens
gtgttttattgtgcgagactcataagttggggatgtctaggaccgtgcgctattgacttctggggccaggggacaaggtcaccgtctcctcagcatccccgaccagccccaaggtcttcccgctgagcgcagcaccccccagatgggaacgtggtcatcgcctgcctggtccagggcttcttcccccaggagccactcagtgtgacctggagcgaaagcggacagggcgtgaccgccagaaacttcccacccagccagatgcctacacggggacccatgtacgagaaggggatacctcaagga

SEQ ID NO: 631912 - DNA, 742 bp, Homo sapiens
  misc_feature (565)..(565): n is a, c, g, or t
ggtgaggaacagcaaagaaggaaatatggggaaatggggtgaatatcaggtggatcagagagatacagtcatgggggtcaggtgtggtatcaggaataatgtgggaggccagattgaagtccgggccaggaaccatggtaattgtgggacttaaagagtgagtacagctgaaggagccggggagcagaaagtatatgtgtcaggtatgaggaagaaaatagattttggaagttatgagaaatgtagagagtgagttgagcatagtttgtgatttttagggcctctaacggtattaaagcagcggcagccgctgcatgcagacatgagggctaggctaaaacagtaaggtcaagttgtttggacagaaaggctacacggtgtggtcctggctcttgtgtaagaattctgaccgcactaaccatgcctaggaaggaaaggagttgttcttttgtaagggattgccctgacgctgtaaactgccctgacgctgtaaactgccctgacgctgtaaactgccctgacgctgtaaactgccctgacgctgtaaactgccctgacgctgtantctagctcggtaccctaaactgccctgacgctgtaaactgccctgacgctgtaaactgccctgacgctgtaaactgccctgacgctgtaaactgccctgacgctgtaaactgccctgacgctgtaaactgccctgacgctgtaaactgccctgacgctgtaaactgaggtgaacagc

SEQ ID NO: 631913 - DNA, 127 bp, Homo sapiens
cgctgccaatggagtacacagcatcatccttggtcagaatctactaccttccacagcggccaggctccactgaaacaacactcttacgctgacacaccacagctcaggctccttgaagatctacagc

SEQ ID NO: 631914 - DNA, 412 bp, Homo sapiens
agggtgccttatttggcctcaattacttaaaggagttttgggtttttccccaaaccggtttttaaaaccgccaaattaaagcccttttaggtttaattttactgggtttaacttcaccgaattatttttttaatgcttgggggccttttggattaactgtagtcttaaatcatgtgatctgccatcggttgcttttggttaaaacctaattactggaacccttggtattggttgtatttggagttaactatttgggttggtaccccctgcttgtgggtttcatagttattgtaatgcagggaaggaatttgggaatttttttttcctcaacctggctaattaacactgaaaagtccgtcaaggttttaggtttattttccccgaaataaatttaaagcaattggattaccca

SEQ ID NO: 631915 - DNA, 490 bp, Homo sapiens
ctgggcattggcaggaaggtgaacatcaaggaggtatacaccttcgccagtgagccaaacgacgtcttcttcaaattagtggacaagtccaccgagctcaacgaggagcctttgatgcgcttcggaaggctgttgccatccttcgtcagcagtgaaaatgctttttacttgtccccagatatcaggaaacagtgtgattggttccaaggggaccaacccacaaagaaccttgtgaagtttggtcacaaacaagtgtaagtgattataattattgtcttaaaaattgtagcgctgcagggaatgcacaggtcctccaaccaccccctgacgctgtaccctgacgctgtaaactgccctgacgctgtaaactgccctgacgctgtaaactgccctgacgctgtaaactgccctgacgctgtaaactgccctgacgctgtaaactgccctgacgctgtaaactgccctgacgctgtaaactgaggtgaacagc

SEQ ID NO: 631916 - DNA, 1449 bp, Homo sapiens
  misc_feature (89)..(89): n is a, c, g, or t
gccgtgtattacttgtgcgcgagggggctacgattttcggaggcctaaattctactactatagcatggacgtctggggccaagggaccncggtcaccgtctcctcagcatccccgaccagccccaaggtcttcccgctgagcctctgcagcacccagccagatgggaacgtggtcatcgcctgcctggtccagggcttcttcccccaggagccactcagtgtgacctggagcgaaagcggacagggcgtgaccgccagaaacttcccacccagccaggatgcctccggggacctgtacaccacgagcagccagctgaccctgccggccacacagtgcctagccggcaagtccgtgacatgccacgtgaagcactacacgaatcccagccaggatgtgactgtgccctgcccagttccctcaactccacctaccccatctccctcaactccacctaccccatctccctcatgctgccacccccgactgtcactgcaccgaccggccctcgaggacctgctcttaggttcagaagcgaacctcacgtgcacactgaccggcctgagagatgcctcaggtgtcaccttcacctggacgccctcaagtgggaagagcgctgttcaaggaccacctgagcgtgacctctgtggctgctacagcgtgtccagtgtcctgccgggctgtgccgagccatggaaccatgggaagaccttcacttgcactgctgcctaccccgagtccaagaccccgctaaccgccaccctctcaaaatccggaaacacattccggcccgaggtccacctgctgccgccgccgtcggaggagctggccctgaacgagctggtgacgctgacgtgcctggcacgcggcttcagccccaaggacgtgctggttcgctggctgcaggggtcacaggagctgccccgcgagaagtacctgacttgggcatcccggcaggagcccagccagggcaccaccaccttcgctgtgaccagcatactgcgcgtggcagccgaggactggaagaagggggacaccttctcctgcatggtgggccacgaggccctgccgctggccttcacacagaagaccatcgaccgcttggcgggtaaacccacccatgtcaatgtgtctgttgtcatggcggaggtggacggcacctgctactgagccgcccgcctgtccccacccctgaataaactccatgctcccccaaaaaaaaaaaaaaaaaaataaaaaaaatctcggagggcgatcatattgtcgggggcgcgggagaaaaggggggtatgtagaatgggggacactgggggcaatagggcgtggtttccttggacccaagttttttttgtaacaaggtgggggtaagattcgtggcgggagtcctcccaatatatgggaggccggatataaaatatcggataaggccagtgttaccctgggtttattgg

SEQ ID NO: 631917 - DNA, 1441 bp, Homo sapiens
  misc_feature (81)..(81): n is a, c, g, or t
cgagagatcgagtcggcgagagggattcttctggctggtccccggcccacaacggtatggacgtctggggccaagggaccncggtcaccgtctcctcagcatccccgaccagccccaaggtcttcccgctgagcctctgcagcacccagccagatgggaacgtggtcatcgcctgcctggtccagggcttcttcccccaggagccactcagtgtgacctggagcgaaagcggacagggcgtgaccgccagaaacttcccacccagccaggatgcctccggggacctgtacaccacgagcagccagctgaccctgccggccacacagtgcctagccggcaagtccgtgacatgccacgtgaagcactacacgaatcccagccaggatgtgactgtgccctgcccagttccctcaactccacctaccccatctccctcaactccacctaccccatctccctcatgctgccacccccgactgtcactgcaccgaccggccctcgaggacctgctcttaggttcagaagcgaacctcacgtgcacactgaccggcctgagagatgcctcaggtgtcaccttcacctggacgccctcaagtgggaagagcgctgttcaaggaccacctgagcgtgacctctgtggctgctacagcgtgtccagtgtcctgccgggctgtgccgagccatggaaccatgggaagaccttcacttgcactgctgcctaccccgagtccaagaccccgctaaccgccaccctctcaaaatccggaaacacattccggcccgaggtccacctgctgccgccgccgtcggaggagctggccctgaacgagctggtgacgctgacgtgcctggcacgcggcttcagccccaaggacgtgctggttcgctggctgcaggggtcacaggagctgccccgcgagaagtacctgacttgggcatcccggcaggagcccagccagggcaccaccaccttcgctgtgaccagcatactgcgcgtggcagccgaggactggaagaagggggacaccttctcctgcatggtgggccacgaggccctgccgctggccttcacacagaagaccatcgaccgcttggcgggtaaacccacccatgtcaatgtgtctgttgtcatggcggaggtggacggcacctgctactgagccgcccgcctgtccccacccctgaataaactccatgctcccccaaaaaaaaaaaaaaaaaaataaaaaaaatctcggagggcgatcatattgtcgggggcgcgggagaaaaggggggtatgtagaatgggggacactgggggcaatagggcgtggtttccttggacccaagttttttttgtaacaaggtgggggtaagattcgtggcgggagtcctcccaatatatgggaggccggatataaaatatcggataaggccagtgttaccctgggtttattgg

SEQ ID NO: 631918 - DNA, 206 bp, Homo sapiens
tgactcctctcagtccactttccatttctattctattatcagatggctacttggaatcaggaatatcactatcagatataagtaatttatcaagttgatagtaaaatcattaaagacaaggagtatcaggggtagctgctcacattgtgaggcaggatgataggatttgagagctgacaaaaaaaaccactgaagagaatcacact

SEQ ID NO: 631919 - DNA, 1458 bp, Homo sapiens
tggtgctgtgagacttgagaacggctgtctattcatgtgtgaaagactttagaggcggtatagtggaaggtccctttgatcactggggccagggaccctggtcaccgtctcctcagcatccccgaccagccccaaggtcttcccgctgagcctctgcagcacccagccagatgggaacgtggtcatcgcctgcctggtccagggcttcttcccccaggagccactcagtgtgacctggagcgaaagcggacagggcgtgaccgccagaaacttcccacccagccaggatgcctccggggacctgtacaccacgagcagccagctgaccctgccggccacacagtgcctagccggcaagtccgtgacatgccacgtgaagcactacacgaatcccagccaggatgtgactgtgccctgcccagttccctcaactccacctaccccatctccctcaactccacctaccccatctccctcatgctgccacccccgactgtcactgcaccgaccggccctcgaggacctgctcttaggttcagaagcgaacctcacgtgcacactgaccggcctgagagatgcctcaggtgtcaccttcacctggacgccctcaagtgggaagagcgctgttcaaggaccacctgagcgtgacctctgtggctgctacagcgtgtccagtgtcctgccgggctgtgccgagccatggaaccatgggaagaccttcacttgcactgctgcctaccccgagtccaagaccccgctaaccgccaccctctcaaaatccggaaacacattccggcccgaggtccacctgctgccgccgccgtcggaggagctggccctgaacgagctggtgacgctgacgtgcctggcacgcggcttcagccccaaggacgtgctggttcgctggctgcaggggtcacaggagctgccccgcgagaagtacctgacttgggcatcccggcaggagcccagccagggcaccaccaccttcgctgtgaccagcatactgcgcgtggcagccgaggactggaagaagggggacaccttctcctgcatggtgggccacgaggccctgccgctggccttcacacagaagaccatcgaccgcttggcgggtaaacccacccatgtcaatgtgtctgttgtcatggcggaggtggacggcacctgctactgagccgcccgcctgtccccacccctgaataaactccatgctcccccaaaaaaaaaaaaaaaaaaataaaaaaaatctcggagggcgatcatattgtcgggggcgcgggagaaaaggggggtatgtagaatgggggacactgggggcaatagggcgtggtttccttggacccaagttttttttgtaacaaggtgggggtaagattcgtggcgggagtcctcccaatatatgggaggccggatataaaatatcggataaggccagtgttaccctgggtttattgg

SEQ ID NO: 631920 - DNA, 294 bp, Homo sapiens
  misc_feature (75)..(75): n is a, c, g, or t
  misc_feature (93)..(93): n is a, c, g, or t
  misc_feature (229)..(229): n is a, c, g, or t
gcacgagaggtgtgcaggcggtgctgaggcacagggtctgctgcaggagcacgggcccgaacccgctccagcgcnccgccgcgccagcgtacnccgcgtacgctgtgtacccccgcgcactgaaggaggtccaccagccctcaccagcccccgcggaccgtgcaatggcccagcgtaagaatgccaagagcagcggcaacagcagcagcagcgctccggcagcggatanagcgagtgcgggcagcagcagccccggggcccggaagagagacaaagcatggaggacacaagaat

SEQ ID NO: 631921 - DNA, 279 bp, Homo sapiens
atcagctgtttgacttctgatgtattgtttcaggcttgatgagagatgtcctccaaagacagtagatcagtgtacactatggtctgataagtagccagcatatctgcaatgccacaggtagttggacaataacccggacatcattcatctaaaatgcacagctgtctctggtagcagcctatgccacacatgttgaagatagaaataagagtgcatagtagtcgagggttaaactcccatagttccaggtgcagctcctgatgtcgcagaggcctgagc

SEQ ID NO: 631922 - DNA, 1466 bp, Homo sapiens
gaacagcctgagaaccgaggacacaggcatttattatgtattagagactcgcgagggggatatagttctggttaccccaggtttgacccctggggccagggaaccctggtcaccgtctcctcagcatccccgaccagccccaaggtcttcccgctgagcctctgcagcacccagccagatgggaacgtggtcatcgcctgcctggtccagggcttcttcccccaggagccactcagtgtgacctggagcgaaagcggacagggcgtgaccgccagaaacttcccacccagccaggatgcctccggggacctgtacaccacgagcagccagctgaccctgccggccacacagtgcctagccggcaagtccgtgacatgccacgtgaagcactacacgaatcccagccaggatgtgactgtgccctgcccagttccctcaactccacctaccccatctccctcaactccacctaccccatctccctcatgctgccacccccgactgtcactgcaccgaccggccctcgaggacctgctcttaggttcagaagcgaacctcacgtgcacactgaccggcctgagagatgcctcaggtgtcaccttcacctggacgccctcaagtgggaagagcgctgttcaaggaccacctgagcgtgacctctgtggctgctacagcgtgtccagtgtcctgccgggctgtgccgagccatggaaccatgggaagaccttcacttgcactgctgcctaccccgagtccaagaccccgctaaccgccaccctctcaaaatccggaaacacattccggcccgaggtccacctgctgccgccgccgtcggaggagctggccctgaacgagctggtgacgctgacgtgcctggcacgcggcttcagccccaaggacgtgctggttcgctggctgcaggggtcacaggagctgccccgcgagaagtacctgacttgggcatcccggcaggagcccagccagggcaccaccaccttcgctgtgaccagcatactgcgcgtggcagccgaggactggaagaagggggacaccttctcctgcatggtgggccacgaggccctgccgctggccttcacacagaagaccatcgaccgcttggcgggtaaacccacccatgtcaatgtgtctgttgtcatggcggaggtggacggcacctgctactgagccgcccgcctgtccccacccctgaataaactccatgctcccccaaaaaaaaaaaaaaaaaaataaaaaaaatctcggagggcgatcatattgtcgggggcgcgggagaaaaggggggtatgtagaatgggggacactgggggcaatagggcgtggtttccttggacccaagttttttttgtaacaaggtgggggtaagattcgtggcgggagtcctcccaatatatgggaggccggatataaaatatcggataaggccagtgttaccctgggtttattgg

SEQ ID NO: 631923 - DNA, 242 bp, Homo sapiens
gtgcgacaggcttgtcttttggtacaatcgcacaagcacacatacacaatgggcacacagacacagacacacacacacaatgtacaaaacatgcccagtcgcactcctgtgtacaaaataaagtgtgttgaagaccctgggacagttttgatgacagtgtgagaaaaaaacaaccattttgatggtgtaaatgccccattctattgtgtgcaagcatctgtatgtgtatgtgtatgtgtgtg

SEQ ID NO: 631924 - DNA, 1820 bp, Homo sapiens
  misc_feature (287)..(287): n is a, c, g, or t
  misc_feature (1036)..(1036): n is a, c, g, or t
gagtgataaatactaacccatatcgtctgaacgtctgataagaagctctgtcacctaagagagtcccttaataatctcgtccaacaattcatagccaatcaatccttcttacaatcacctgaccaagaatctgttaggccttctacaagcgatgtcggcctctatttcatatcttattggatacacctcatattatgctctaatatactctctaaagcctctctcgatgtgttcaatatccttcttacaaacacactgtaggtggcttatacgcataacttcacagnttacctaaagtccccaacacattgtgtattgccttacacgtcctgagtgtaactatcattctactcatacattgaagtaccatgcgtttggacaagtcgttacgagaattcttcctagagattataaactgtctcaaggtgacaaattctggatcggcccagcttgtgggacaacgtaaaggagaagaccacaattttaccaaagtgcatcgtgtactagatatagatacaaaggcgcccttggagcgtgcctggtctcaactctttctataaggggaaaatatgcgaacttaaatgctcaaccatgtttatttaacgatctggccaaatccatgtatgagaaagcctttaccattcgtgaacacaccatgtgtaactttcaaaccaagctctcaaacataagtaaggagaaacccccttcctgggagtgtataacttgccgaatagggcatagactcatatgttgggactgccctttggtgaggtccaacaataatttaggttttggaactctgggagttacaataccacaagttaacatcttcacgggacacagaaaggaaacaccaacttctccacgagaacctcggcacccctgttattaatcggcaccaccataatagttacccttgagggatggcgggcgcgtccaaaagcgatcccatagtaagaatagagtaaaagagctccaatgagacagagggtctttttggagacacacacgcgcccgttagagaatgtatagcganacccgagacaggaggggagcacggcattttggcgagagcgacacaaaggtgcacggtttccatatggagggacacgcgcaaagatctacatgtggggcgcaaacaccacctgattaagtgtcactaagggaactccacccatgggaagctttcgttcaaacgacaaaacatagtcgtgtcattacattaccacaccatataacggcaaaaaggcaccatggttcaatttataggggaggagacatattgtgtcgcccgtggataaggttcccccaccagcaacacacatctaaggtattatgggttggggccaagacgcaacagcacgggtacacattcatttaaggcggtcccccaggtgagggtttcaagtgggactttgtcggaaacacgagacagtggtcccccagggccaacttgtgtttatcgaaaccccactctagctttgtaccgcatccgtagagtgatgagagagcactttctaaaaatcaaatatagtacctatagttaataagaggttaaattggaaaaggtgtaatctcaaaagcccagtgggaaaacatgtgaggaaatatcaaccagattaatgtattattaatatgataacgagaatctagaagaaatagtgttatgtagactgcgcgtggtggaaaaatatataacaatagcaatagtagacgagcaaagatgaaagaagtagaggatggatagtatcgaagaaaatgaattatatgtgtggtgggttacaaaaaaaggcgaacgatgtaataaaatatgtgagtac

SEQ ID NO: 631925 - DNA, 202 bp, Homo sapiens
  misc_feature (23)..(23): n is a, c, g, or t
  misc_feature (82)..(82): n is a, c, g, or t
  misc_feature (109)..(109): n is a, c, g, or t
  misc_feature (133)..(133): n is a, c, g, or t
ccagactgttaagaaaaggtaantgggttgtttaatgaattgatattgtccactgatcgtatttctacttgttaaataattnaaaatcatcttaaaattcatactttgnctttaatttagacacaaggagatntaatcgctgtgtaacatcagagaaagctatatggattatcgttcagaagtaaatgtttctaacattgac

SEQ ID NO: 631926 - DNA, 511 bp, Homo sapiens
  misc_feature (334)..(334): n is a, c, g, or t
  misc_feature (416)..(416): n is a, c, g, or t
  misc_feature (460)..(460): n is a, c, g, or t
tctgttgcccaggctggagtacagtggcatgatctcggctcactacaacctctgtctcctgggttcaagcaattctcctgtctcagcctcccaagtagctgggactacagacaggcatgcaccaccatgcccggctaatttttgtatttttagtagagacgggatttcattatattggccaggctagtctcgaactcccgaccctgtgatcctcccgcctcggcctcccaaagtgttgggattacagcatgagccaccgtgcccagcaggctcattttttaactttgcaatattttaacttgacagaccatcgtttgatgtccattttaccacngtctacattagttgaggtcctcaatatatcttctttatgaacctaagtctctttgatgtcaaagtattaaatatcattggtnatgcctgccagctacttggaaggctgaggtgggaggatcacttnccccaggatttgaagccagactgggcaatgtagcaagtccccatgtcttaa

SEQ ID NO: 631927 - DNA, 190 bp, Homo sapiens
ttaggcgcgttctgcgtgtgtcaccaacctgattcgaccagttatttgacagacgaatcggaccccattcgaggtgctgaaggcagcagagaacaatgaaaaaagaagccggcgggggcggtgttgggggccctggggccaagagcgcagttcaggccgcggcccagaccaactccaacgcggcagacaa

SEQ ID NO: 631928 - DNA, 353 bp, Homo sapiens
ccgagaggctaccaagacatgcgagactccagggtcaccttcgcatcagatttcagagacgctgaagatttctcagggccagagtacctggtcttcatgctcaagaagtaacacatctctagccagggctattaataccacgaggttagtggccgcacaaggctggccgacgagagccgctggtgccataatacatcgtccaagtccttcattgcacgtgcagaaacttgtggtccagcatttatgcaactcatggacgctccagccagtttcataggcgtcactgtggtgcaaggtggatgcgggacttagctcgaccatattttacacgtgcactaggagcctttccggcg

SEQ ID NO: 631929 - DNA, 3653 bp, Homo sapiens
gcgggaagcaccatgcagtttgtatcctgggccacactgctaacgctcctggtgcgggacctggccgagatggggagcccagacgccgcggcggccgtacgcaaggacaggctgcacccgaggcaagtgaaattattagagaccctgggcgaatacgaaatcgtgtctcccatccgagtgaacgctctcggagaaccctttcccacgaacgtccacttcaaaagaacgcgacggagcattaactctgccactgacccctggcctgccttcgcctcctcctcttcctcctctacctcctcccaggcgcattaccgcctctctgccttcggccagcagtttctatttaatctcaccgccaatgccggatttatcgctccactgttcactgtcaccctcctcgggacgcccggggtgaatcagaccaagttttattccgaagaggaagcggaactcaagcactgtttctacaaaggctatgtcaataccaactccgagcacacggccgtcatcagcctctgctcaggaatgctgggcacattccggtctcatgatggggattattttattgaaccactacagtctatggatgaacaagaagatgaagaggaacaaaacaaaccccacatcatttataggcgcagcgccccccagagagagccctcaacaggaaggcatgcatgtgacacctcagaacacaaaaataggcacagtaaagacaagaagaaaaccagagcaagaaaatggggagaaaggattaacctggctggtgacgtagcagcattaaacagcggcttagcaacagaggcattttctgcttatggtaataagacggacaacacaagagaaaagaggacccacagaaggacaaaacgttttttatcctatccacggtttgtagaagtcttggtggtggcagacaacagaatggtttcataccatggagaaaaccttcaacactatattttaactttaatgtcaattgtagcctctatctataaagacccaagtattggaaatttaattaatattgttattgtgaacttaattgtgattcataatgaacaggatgggccttccatatcttttaatgctcagacaacattaaaaaacctttgccagtggcagcattcgaagaacagtccaggtggaatccatcatgatactgctgttctcttaacaagacaggatatctgcagagctcacgacaaatgtgataccttaggcctggctgaactgggaaccatttgtgatccctatagaagctgttctattagtgaagatagtggattgagtacagcttttacgatcgcccatgagctgggccatgtgtttaacatgcctcatgatgacaacaacaaatgtaaagaagaaggagttaagagtccccagcatgtcatggctccaacactgaacttctacaccaacccctggatgtggtcaaagtgtagtcgaaaatatatcactgagtttttagacactggttatggcgagtgtttgcttaacgaacctgaatccagaccctaccctttgcctgtccaactgccaggcatcctttacaacgtgaataaacaatgtgaattgatttttggaccaggttctcaggtgtgcccatatatgatgcagtgcagacggctctggtgcaataacgtcaatggagtacacaaaggctgccggactcagcacacaccctgggccgatgggacggagtgcgagcctggaaagcactgcaagtatggattttgtgttcccaaagaaatggatgtccccgtgacagatggatcctggggaagttggagtccctttggaacctgctccagaacatgtggagggggcatcaaaacagccattcgagagtgcaacagaccagaaccaaaaaatggtggaaaatactgtgtaggacgtagaatgaaatttaagtcctgcaacacggagccatgtctcaagcagaagcgagacttccgagatgaacagtgtgctcactttgacgggaagcattttaacatcaacggtctgcttcccaatgtgcgctgggtccctaaatacagtggaattctgatgaaggaccggtgcaagttgttctgcagagtggcagggaacacagcctactatcagcttcgagacagagtgatagatggaactccttgtggccaggacacaaatgatatctgtgtccagggcctttgccggcaagctggatgcgatcatgttttaaactcaaaagcccggagagataaatgtggggtttgtggtggcgataattcttcatgcaaaacagtggcaggaacatttaatacagtacattatggttacaatactgtggtccgaattccagctggtgctaccaatattgatgtgcggcagcacagtttctcaggggaaacagacgatgacaactacttagctttatcaagcagtaaaggtgaattcttgctaaatggaaactttgttgtcacaatggccaaaagggaaattcgcattgggaatgctgtggtagagtacagtgggtccgagactgccgtagaaagaattaactcaacagatcgcattgagcaagaacttttgcttcaggttttgtcggtgggaaagttgtacaaccccgatgtacgctattctttcaatattccaattgaagataaacctcagcagttttactggaacagtcatgggccatggcaagcatgcagtaaaccctgccaaggggaacggaaacgaaaacttgtttgcaccagggaatctgatcagcttactgtttctgatcaaagatgcgatcggctgccccagcctggacacattactgaaccctgtggtacagactgtgacctgaggtggcatgttgccagcaggagtgaatgtagtgcccagtgtggcttgggttaccgcacattggacatctactgtgccaaatatagcaggctggatgggaagactgagaaggttgatgatggtttttgcagcagccatcccaaaccaagcaaccgtgaaaaatgctcaggggaatgtaacacgggtggctggcgctattctgcctggactgaatgttcaaaaagctgtgacggtgggacccagaggagaagggctatttgtgtcaatacccgaaatgatgtactggatgacagcaaatgcacacatcaagagaaagttaccattcagaggtgcagtgagttcccttgtccacagtggaaatctggagactggtcagaggtaagatgggagggctgttatttcccctaggtcatctcttacattctagttctggtgctctctatctgtttaagacaaacccttgtgcacctttctcccacctctccctttctcccttgtctcccttgagaaaacaactccagttctctgcctgcaccatgactgtcgtactggatgtaactagtctaccagtgacctcagggcactttgggcttggctagatcactcactgttgtagcttctgttgtgattttgaagttgcagtccatcaccttccctcctctttgagccctagctaagtcactgaaaggaaatcatggatttattaatcataaagctatactagctcacatctgaagtcaacatgaagtttcctacttccttgtctttgaaataagagaattagaccccagggagtgacctctctgacttacccatccaactgcaaaaaa

SEQ ID NO: 631930 - DNA, 496 bp, Homo sapiens
aaagtatttacttgtattgacatttactctttgatgtcatcaaggcctaagtctgctttgctttcagacaggatatctgcagagctcacgacaaatgtgataccttaggcctggctgaactgggaaccatttgtgatccctatagaagctgttctattagtgaagatagtggattgagtacagcttttacgatcgcccatgagctgggccatgtgtttaacatgcctcatgatgacaacaacaaatgtaaagaagaaggagttaagagtccccagcatgtcatggctccaacactgaacttctacaccaacccctggatgtggtcaaagtgtagtcgaaaatatatcactgagtttttagagtaagacttgaacattcttttagcacaaacttctagtgcctggcctacatgtagtgaactaattgtgggaaagacaatatgaagtcaaacattccttttgagttatttttgttgacattccttggagaaggcaaa

SEQ ID NO: 631931 - DNA, 172 bp, Homo sapiens
atgtctgactttatctgacacttctgctggctcggagccagccttgtatctactaagaagatacagataaatcagccagtcatggtagtacacaccaagtaatcccagactactcagtgtgtatgagtgcacgagcacttgcgttgaagcccgcagagtgcagagagtttca

SEQ ID NO: 631932 - DNA, 3267 bp, Homo sapiens
gcgggaagcaccatgcagtttgtatcctgggccacactgctaacgctcctggtgcgggacctggccgagatggggagcccagacgccgcggcggccgtacgcaaggacaggctgcacccgaggcaagtgaaattattagagaccctgggcgaatacgaaatcgtgtctcccatccgagtgaacgctctcggagaaccctttcccacgaacgtccacttcaaaagaacgcgacggagcattaactctgccactgacccctggcctgccttcgcctcctcctcttcctcctctacctcctcccaggcgcattaccgcctctctgccttcggccagcagtttctatttaatctcaccgccaatgccggatttatcgctccactgttcactgtcaccctcctcgggacgcccggggtgaatcagaccaagttttattccgaagaggaagcggaactcaagcactgtttctacaaaggctatgtcaataccaactccgagcacacggccgtcatcagcctctgctcaggaatgctgggcacattccggtctcatgatggggattattttattgaaccactacagtctatggatgaacaagaagatgaagaggaacaaaacaaaccccacatcatttataggcgcagcgccccccagagagagccctcaacaggaaggcatgcatgtgacacctcagaacacaaaaataggcacagtaaagacaagaagaaaaccagagcaagaaaatggggagaaaggattaacctggctggtgacgtagcagcattaaacagcggcttagcaacagaggcattttctgcttatggtaataagacggacaacacaagagaaaagaggacccacagaaggacaaaacgttttttatcctatccacggtttgtagaagtcttggtggtggcagacaacagaatggtttcataccatggagaaaaccttcaacactatattttaactttaatgtcaattgtagcctctatctataaagacccaagtattggaaatttaattaatattgttattgtgaacttaattgtgattcataatgaacaggatgggccttccatatcttttaatgctcagacaacattaaaaaacctttgccagtggcagcattcgaagaacagtccaggtggaatccatcatgatactgctgttctcttaacaagacaggatatctgcagagctcacgacaaatgtgataccttaggcctggctgaactgggaaccatttgtgatccctatagaagctgttctattagtgaagatagtggattgagtacagcttttacgatcgcccatgagctgggccatgtgtttaacatgcctcatgatgacaacaacaaatgtaaagaagaaggagttaagagtccccagcatgtcatggctccaacactgaacttctacaccaacccctggatgtggtcaaagtgtagtcgaaaatatatcactgagtttttagacactggttatggcgagtgtttgcttaacgaacctgaatccagaccctaccctttgcctgtccaactgccaggcatcctttacaacgtgaataaacaatgtgaattgatttttggaccaggttctcaggtgtgcccatatatgatgcagtgcagacggctctggtgcaataacgtcaatggagtacacaaaggctgccggactcagcacacaccctgggccgatgggacggagtgcgagcctggaaagcactgcaagtatggattttgtgttcccaaagaaatggatgtccccgtgacagatggatcctggggaagttggagtccctttggaacctgctccagaacatgtggagggggcatcaaaacagccattcgagagtgcaacagaccagaaccaaaaaatggtggaaaatactgtgtaggacgtagaatgaaatttaagtcctgcaacacggagccatgtctcaagcagaagcgagacttccgagatgaacagtgtgctcactttgacgggaagcattttaacatcaacggtctgcttcccaatgtgcgctgggtccctaaatacagtggaattctgatgaaggaccggtgcaagttgttctgcagagtggcagggaacacagcctactatcagcttcgagacagagtgatagatggaactccttgtggccaggacacaaatgatatctgtgtccagggcctttgccggcaagctggatgcgatcatgttttaaactcaaaagcccggagagataaatgtggggtttgtggtggcgataattcttcatgcaaaacagtggcaggaacatttaatacagtacattatggttacaatactgtggtccgaattccagctggtgctaccaatattgatgtgcggcagcacagtttctcaggggaaacagacgatgacaactacttagctttatcaagcagtaaaggtgaattcttgctaaatggaaactttgttgtcacaatggccaaaagggaaattcgcattgggaatgctgtggtagagtacagtgggtccgagactgccgtagaaagaattaactcaacagatcgcattgagcaagaacttttgcttcaggttttgtcggtgggaaagttgtacaaccccgatgtacgctattctttcaatattccaattgaagataaacctcagcagttttactggaacagtcatgggccatggcaagcatgcagtaaaccctgccaaggggaacggaaacgaaaacttgtttgcaccagggaatctgatcagcttactgtttctgatcaaagatgcgatcggctgccccagcctggacacattactgaaccctgtggtacagactgtgacctgaggtggcatgttgccagcaggagtgaatgtagtgcccagtgtggcttgggttaccgcacattggacatctactgtgccaaatatagcaggctggatgggaagactgagaaggttgatgatggtttttgcagcagccatcccaaaccaagcaaccgtgaaaaatgctcaggggaatgtaacacgggtggctggcgctattctgcctggactgaatgttcaaaaagctgtgacggtgggacccagaggagaagggctatttgtgtcaatacccgaaatgatgtactggatgacagcaaatgcacacatcaagagaaagttaccattcagaggtgcagtgagttcccttgtccacagtggaaatctggagactggtcagagtgcttggtcacctgtggaaaagggcataagcaccgccagccctggtgtcagcctggcgaagatcga

SEQ ID NO: 631933 - DNA, 107 bp, Homo sapiens
atatttaatcttgtgcatgataccccatgtaaaatccaacttgttcaaaatttcttgtacagatgtgtgtatacactacatttgtttattaccaggaaatttcaagg

SEQ ID NO: 631934 - DNA, 1534 bp, Homo sapiens
cggcacattaaccacgaatacattgctaaaataaagagtgagaaaggctaaggaagtctgtcgcagagagtgctggtcaagaattgagcacgtttgctattgtatagtaatgtatctctcaggtttgtggtggcgataattcttcatgcaaaacagtggcaggaacatttaatacagtacattatggttacaatactgtggtccgaattccagctggtgctaccaatattgatgtgcggcagcacagtttctcaggggaaacagacgatgacaactacttagctttatcaagcagtaaaggtgaattcttgctaaatggaaactttgttgtcacaatggccaaaagggaaattcgcattgggaatgctgtggtagagtacagtgggtccgagactgccgtagaaagaattaactcaacagatcgcattgagcaagaacttttgcttcaggttttgtcggtgggaaagttgtacaaccccgatgtacgctattctttcaatattccaattgaagataaacctcagcagttttactggaacagtcatgggccatggcaagcatgcagtaaaccctgccaaggggaacggaaacgaaaacttgtttgcaccagggaatctgatcagcttactgtttctgatcaaagatgcgatcggctgccccagcctggacacattactgaaccctgtggtacagactgtgacctgaggtggcatgttgccagcaggagtgaatgtagtgcccagtgtggcttgggttaccgcacattggacatctactgtgccaaatatagcaggctggatgggaagactgagaaggttgatgatggtttttgcagcagccatcccaaaccaagcaaccgtgaaaaatgctcaggggaatgtaacacgggtggctggcgctattctgcctggactgaatgttcaaaaagctgtgacggtgggacccagaggagaagggctatttgtgtcaatacccgaaatgatgtactggatgacagcaaatgcacacatcaagagaaagttaccattcagaggtgcagtgagttcccttgtccacagtggaaatctggagactggtcagaggtaagatgggagggctgttatttcccctaggtcatctcttacattctagttctggtgctctctatctgtttaagacaaacccttgtgcacctttctcccacctctccctttctcccttgtctcccttgagaaaacaactccagttctctgcctgcaccatgactgtcgtactggatgtaactagtctaccagtgacctcagggcactttgggcttggctagatcactcactgttgtagcttctgttgtgattttgaagttgcagtccatcaccttccctcctctttgagccctagctaagtcactgaaaggaaatcatggatttattaatcataaagctatactagctcacatctgaagtcaacatgaagtttcctacttccttgtctttgaaataagagaattagaccccagggagtgacctctctgacttacccatccaactgcaaaaaa

SEQ ID NO: 631935 - DNA, 102 bp, Homo sapiens
tgcagaccccacttacggagccatgtttgatactgctttctctgacgataaaacagtaattactgcttatttctctttatccttttataaccatgaaccggg

SEQ ID NO: 631936 - DNA, 554 bp, Homo sapiens
tggagctcggtaccggctgttttgcctgggctgtggtgcgcaaaggcccacaactgcagcaggatcagcaaggcgctggcggcgatgaaccaggcgctgatctgggcgctgcacgaacaccgccaggtcaccgcgcgacaacagcaaggcgcggtggaagttctcttcgaccatggggcccagcacaaagccgagcaggatgggcgcgaccgagaattccatgcgtcatgaggatggcgccgagtcacaccgaatgtgccagcacttcccagatctggaagaggctgttctgggtactgaacacgcccaccgcgatgaagaacagggccgacgggaacaggtagcggtacggcacctgcatgcagcttgacccagacgccgatcagcggcacgttgagcaccatcagcagcacgttgccgacccagaagctggcgatcaggccccagaagatgtccggatgctcggtgatcagttgcgggccgggctggatgccctggatcagcagcgcgcccaggatcagcgccatcaccgcgtcgccgggaatgcccaggct

SEQ ID NO: 631937 - DNA, 1610 bp, Homo sapiens
gcgggaagcaccatgcagtttgtatcctgggccacactgctaacgctcctggtgcgggacctggccgagatggggagcccagacgccgcggcggccgtacgcaaggacaggctgcacccgaggcaagtgaaattattagagaccctgggcgaatacgaaatcgtgtctcccatccgagtgaacgctctcggagaaccctttcccacgaacgtccacttcaaaagaacgcgacggagcattaactctgccactgacccctggcctgccttcgcctcctcctcttcctcctctacctcctcccaggcgcattaccgcctctctgccttcggccagcagtttctatttaatctcaccgccaatgccggatttatcgctccactgttcactgtcaccctcctcgggacgcccggggtgaatcagaccaagttttattccgaagaggaagcggaactcaagcactgtttctacaaaggctatgtcaataccaactccgagcacacggccgtcatcagcctctgctcaggaatgctgggcacattccggtctcatgatggggattattttattgaaccactacagtctatggatgaacaagaagatgaagaggaacaaaacaaaccccacatcatttataggcgcagcgccccccagagagagccctcaacaggaaggcatgcatgtgacacctcagaacacaaaaataggcacagtaaagacaagaagaaaaccagagcaagaaaatggggagaaaggattaacctggctggtgacgtagcagcattaaacagcggcttagcaacagaggcattttctgcttatggtaataagacggacaacacaagagaaaagaggacccacagaaggacaaaacgttttttatcctatccacggtttgtagaagtcttggtggtggcagacaacagaatggtttcataccatggagaaaaccttcaacactatattttaactttaatgtcaattgtagcctctatctataaagacccaagtattggaaatttaattaatattgttattgtgaacttaattgtgattcataatgaacaggatgggccttccatatcttttaatgctcagacaacattaaaaaacctttgccagtggcagcattcgaagaacagtccaggtggaatccatcatgatactgctgttctcttaacaagacaggatatctgcagagctcacgacaaatgtgataccttaggcctggctgaactgggaaccatttgtgatccctatagaagctgttctattagtgaagatagtggattgagtacagcttttacgatcgcccatgagctgggccatgtgtttaacatgcctcatgatgacaacaacaaatgtaaagaagaaggagttaagagtccccagcatgtcatggctccaacactgaacttctacaccaacccctggatgtggtcaaagtgtagtcgaaaatatatcactgagtttttagagtaagacttgaacattcttttagcacaaacttctagtgcctggcctacatgtagtgaactaattgtgggaaagacaatatgaagtcaaacattccttttgagttatttttgttgacattccttggagaaggcaaa

SEQ ID NO: 631938 - DNA, 839 bp, Homo sapiens
tggcacactgataatggctttgtgaaaatttatagatgttttgtagcgaactgtaatgcagaaatggcctaatttgatggttaattgttgctggcttcaaaaattaaggtataaagattaatatgtaaggaagcccattctttcaaggtaaatacttggggtgggaggggagaaagggaaccttttcttaaaatgagaaataattactgctaattttaaaatttcttgatcattgaatgtgagacccttctaacatgatttgagaagctgtacaagtataggcagagttatgtgttcctgtttacattgtttttgtttgttttggggaaaataattggtaggtgtctaattactgtgttacgttcagttgttatattgcagtaaaagcttttaaaacaactcattgcatgtttgcttgttgatgtatcccgtttgtgaaatctagcacttcttggggccaagtggagaaatgtctgcagttcagctctgccctgtctttgtccccattccgctcagcaggaaagcgtgtgttagtcaggcaagtacgtgagtgcaaagctgctgcctgtttaaaaaagcccagcaaaagtgctgatgtcagtgtcaaagattaagtgcaaagtgttgtcaaaagctgggtattctgagtaggttgtaaagtgtgtttcgtttagttagataagacgtgtagttagccattaaagtcattagtataatattgctttcaaaaagaaatggtagacaaaactataatccagcatcttttattgcattggaaagactggcaaagtcttttggatgggttgggagatgtggtaaacgacatgtgcgtttggaaa

SEQ ID NO: 631939 - DNA, 1771 bp, Homo sapiens
  misc_feature (120)..(121): n is a, c, g, or t
ccatcatgccttgacagtgttcaccatcttataggagtggtgatgggggtgagcaggcgaagcagagcggagaagagacaagaaaagaaagaagaggcacacgggagcgcgcgtttggtnnttacaagcgtatgggtactcttgactacgtgtatgctcgcttagctcagtgtgatgcgtaacgtgtctgtctcggaccgagtctgtgtagtcattgttagatgaactcttcgctgcatgctgagagagtagtatgatatctcggtgggctgtggcgtgtctgttgtttgtgtgtgaaggcagtggttggtagttctgttcttctgttgtgtggacgacgaagcgcaggcgttgtgttgctcgtgctgtgctggtgaggtctggcttcgctctcttgctatctctccttccggtgggggtgctctccccccccttgtgtggggggctcgcctgcccctgtgattgttctccgccccgcgggggtgtgagcagttttgttgtgtgtcgagccacgcgcccttgcctcgcgccgtgcgtgtgtgtgtgtagatgtatgttcgggtcactctgtccaccaactgctcgttcgccacgtctgtgggtctttctcttttatttctgtcgcggcggaggagaaaattgtggtgttgaatggtcctgttgtgtgcacccagcagtgggttcttcgtatttctccgggtgtttcttgtcgctgctgatatgactccgcgcgcgggttggtgttggtcacttttgggcaccaagagggccgggcgacagctcgtttttagtttggtatgctcgtgcgcgaggcgctcccttttgtgtggagggggggtgagtcccgctccctctctggccggtgtgtgatatgctcgcggcgctgttttcataaagaggcgcagaggggcgcttgtttgttgggggggtgttggggtgatatattcaaacaaaaaaggtggggcgggctctgctgggaaatacggggtctgtctgcgttgctgttttctagtagcgaaagctttgttcattttgtcgtctctagtaggtggtctctcccctatcaaccaacattgttgctcctgttggaccataaagatacagatgtctcctctcctttttcgcccgcccgtggtttgacagagatagtaaaactctttcgtgtggttgttttctctcacacgaagatattatataataaagagtctccgcgcgttgccaaaggaaaaattatactccgcctcccccccctctacttgtagtatatccgtgttattaactactacgcccacactactcctctctcggccccttctctctgagtgctgtctcttgtcttcgcacactacagttcccttcggcagttgtcagataaacgagccgccctttgctgaaaactatttgttcttttgtgagaatagaccccccttctgtggaaagaccaccactctcttgttctggcgtatttcttgtatttccaatatcccacagcaaaattggcgagggttctcatagtatagagcctgggtgtagtaagggtggttgggatggcctgtgtgccccctcgtgttgtgtcgatgaggtcgcgcgccccctccctcgcgcgcacactctcgccgcgtgtgggagggtgtgtttacatctcgccccagctcagtgacacattgtctccacacatgtgtgcacacccagtttctttaacaaagacttcttaaaagttttacacaaacaatccaagataatctccccctccacacaataacacacaaaa

SEQ ID NO: 631940 - DNA, 130 bp, Homo sapiens
ggctgaagtaatcttcttatcctaccaggcgtcggaataatctcccatatagtaaattactacgccggaaaagaagaaccagtaggatacataggtatgggctgagctatgatatcagtgggcttcctag

SEQ ID NO: 631941 - DNA, 682 bp, Homo sapiens
  misc_feature (225)..(225): n is a, c, g, or t
  misc_feature (233)..(233): n is a, c, g, or t
  misc_feature (283)..(283): n is a, c, g, or t
  misc_feature (433)..(433): n is a, c, g, or t
gaagtgtgacgtggacatccgcaaagacctgtacgccaacacagtgctgtctggcggaccaccatgtccctgcattgcgcaggatgcagaggagatcactgcctgcacccacacatgaagataaatcattgtctctggccagtctccggtgatcgcggctcctcctgtctcgtgtcacttcacagatgtgatcacaagccgagttgacgagtcggccctcatcgncaccgcanatgcttctaggcggactatgacttatttgcgttacacactctcttgacanaacctatcttgcgcagataacacgatgagattggcatggctgtatatgttgtttttgttgtgtgttgggtttttttttttttttggctcgactcacgatttaaaaactggaacggggaaagtgacagcagtcggttggagcgagcatccnccatagttcacactgtggccgaggactctgattgcacattggtggtgtttttaatagtcattccaaatatgagatgcgttgttacaggaagtcccttgccatcctgccaccccacttctctctaaggagaatggcccagtcctctcccaagtgcacacaggaggaggtgatagcattgcttctcgcgtttatgtaatgcatgagccttcgtgcccccccttcccccttttttgttcccccttgagatgt

SEQ ID NO: 631942 - DNA, 336 bp, Homo sapiens
aaatctagccatctattcctcgacatttacagctagacaggtctggagaaagcacagagccatgctaactagtctcatttaatttctggacactcacatcaagtaaatccttagtactacctgacaattgtactttatttccattatattcacccttagtgccctctagagcgccctcatactctctgctctttagcagacatctttgctatctctactctcagctgataaccttggttttggtttcactcagaaaatagaggcagtggaggaggattttcacaggtttcaccactgcattgaccacctacctgcattgtgcctataaactaggcc

SEQ ID NO: 631943 - DNA, 457 bp, Homo sapiens
ctcggtacctagactattacggtgatctaaacattttaaaattaaaattaatcccctccctccagcacacaaaaaaaaaaaacacacaacatttagaggatttgccaaaaatattctctattacaacttttttaaatttctttaattaagggcttgggccccaacggttgcacatagattcaggggatttggctcccttctgaaactaaatcattggtaagaggcttcagaaaaagaaatttagcttgaaatctagtctggggaaatggggggcagggaatgaaaaatgtgggtctcttgtttctcccacgggacttccttctgattattttacgggtgtacgtccggcacattacaggtctccacgggagggcagctgtgtcgggctttctccttctgtggcttcagcctctgccggcggcacacaggcttctcccgtttcttcgaagccgtcaga

SEQ ID NO: 631944 - DNA, 209 bp, Homo sapiens
aacaccggcccatgattacttaatactgcttgtctggctggtatgatacactttaatactgcttgtctggctggatgatccactttataatggttggctgggtggattaaccaatttaatactggttggctggctggatgagtccactttaatactgcttgtctggcatggatgatccacttgaatactcgcttgtcctggctggatga

SEQ ID NO: 631945 - DNA, 209 bp, Homo sapiens
agacagcttcgaacagatgcatgagattacagagagcaaacatcggcagaactaaagtcgagaatatcttcatgtttgcaacctttaatctgacttgcctttactatcctttccccatttcttctaatctcttttgccttacactatattaccttctaggtatcacctcatcctatagaatcccttctagtttaatgtcctgccccaaa

SEQ ID NO: 631946 - DNA, 680 bp, Homo sapiens
  misc_feature (526)..(526): n is a, c, g, or t
  misc_feature (632)..(632): n is a, c, g, or t
  misc_feature (636)..(636): n is a, c, g, or t
  misc_feature (642)..(642): n is a, c, g, or t
  misc_feature (663)..(663): n is a, c, g, or t
tatacccgttagttccgaggaacctgtatccgagataagcactgcggtttagggtgaattggcaccatcatgtgattgctggggtggtggacgatgtgattgcagggcggcggaaggatgtggtgattaacgtgcctcctgggtcgtcgaaaacggagcttgtggcgattaatgtgatggcgcgagggttggcgctgaatccgtatgcgcggtttttgcatattagttattcggatgatttggcgctgctgaattcggagacggcgcgggagattgtgcagtccgatgaatatcgtgcgttgtggccgttggagattgctgacgatgccaagtcaaagaagcgttggaatgtggtggtggatggcaagaaagccggtggggtgtacgcggtgagtctgggcggacaggtgacggggtttcgggccggacacatggccccgggatggcagggggcgatcattattgatgacccgctgaaggtagaagatgcctacagcaagaccggacgcagtaaggccaaccgtangctggtgtccacggtgaagagtcgtaaagccagtccggacacacccatcattgtgatcatgcacggttgtcgcaggacgatccgacggggttcatcagtctggggnttcnggcgcntggatgttgagatccgcttgntgatatgctacgtccct

SEQ ID NO: 631947 - DNA, 858 bp, Homo sapiens
cggcgccggtcgcggttcactggttccccgtcgggcgttggggcggattgtgcacttcagtttcggcgccaattcccggttggcttccggggcaacggcagcagtgtcaagcgtcttcccttcatagcgttccgctgcttggaggccctgataccgttccctagtggtcttggccggtagcctgtgttccagcctccggcgcgaggtcgtgttgtccttgtgccgcttccgggattagtaccgcgtgtgtgtgtttgtgcccccgcctattgtgatggtcctccgttgcccctcgctatcccgtggcgtccttttttcaaacccagccggggtttccggccgctcgctgtccgcacccaactcgttgggcgccccccactggggtcgtgtaccccgtgggagggtacccccgcgttccgcgcgggcttatttttctacctccctccatgactgtgtcgccccctgatgtcgcttttgacccggcgggcactgggtaactcccttggcggtcgcaccacatctgggtgtgaacctccccgtttgtgtgccccccctgccgttaaatattaccactccaccaaacggtcttgcacactcaatgagacgtgccccaccacttatgggttaaaccacaatgccatttcccggagccgtcgtaaacccaagccacgttgtcgcccgcggcaccacacccgcggggtattaacttcggtcacaattcttttaaattctgtggacgcccaaccaccaccgtttcacatgtctcctcctcctacaaaattaattcccccaaattttttaataggggcccttttttcccctttcccccccctttcccccttttagacccaaaaaaaa

SEQ ID NO: 631948 - DNA, 894 bp, Homo sapiens
  misc_feature (38)..(38): n is a, c, g, or t
  misc_feature (51)..(52): n is a, c, g, or t
  misc_feature (55)..(55): n is a, c, g, or t
  misc_feature (57)..(57): n is a, c, g, or t
  misc_feature (67)..(67): n is a, c, g, or t
  misc_feature (110)..(110): n is a, c, g, or t
  misc_feature (166)..(166): n is a, c, g, or t
  misc_feature (308)..(308): n is a, c, g, or t
  misc_feature (311)..(311): n is a, c, g, or t
ccacctgtgccctgtgggacattaaaacaggccagcanacagtgggttttnntgnanacagtggggntgtgatgtccctgtccctggcccccgatggccgcacgtttgtntcaggcgcctgtgatgcctctatcaagctgtgggacgtgcgggattccatgtgccnacagaccttcatcggccatgaatccgacataaatgcagtggctttcttccccaaaggtacgccttcaccaccggctctgacgacgccacgtgccgcctcttcgacctgcgggccgatcaggagctcctcatgtactcccatnacnacatcatctgtggcatcacctctgttgccttctcgcgcagcggacggctgctgctcgctggctacgacgacttcaactgcaacatctgggatgccattaagggcgaccgtgcaggagtcctcgctggccacgacaaccgcgtgagctgcctcggggtcaccgacgatggcatggctgtggccacgggctcctgggactccttcctcaagatctggaactaatggccccacccccactgggcccaggccaggaggggccctgcccatgcccacactacaggccagggctgcggggctggcgcaatcccagcccccttccccgggccacggggccttgggtccctgccctcccacccaggtttggttcctcccggggcccccactgtggagataagaaggggatggaatgggggaagaggaggagcaggaggccctcatccttctgctgccctggggttggggcctcacccctctggagggccggaggcaggaggtggaaaccccaggggctggcttttttaaaactggttttattttaatttttattatattttcagtttttccataaaggagccaattccaac

SEQ ID NO: 631949 - DNA, 362 bp, Homo sapiens
  misc_feature (324)..(324): n is a, c, g, or t
ggcatgtaccctttctgtgggttacctatcattttgtagatcagtgtttcaaaacatgttaagtttagaaatagattcttttggcccaggcacggtggctcacacttgtaatccctggtactttgggaggctgaggtgggtgaatcaccttaggtcaggagttcaagaccagcctggccaacgtggcgaaaccccatctctaccaaaaatacaaaaaaattagctgggtgtggtggtgggcacctgtaatcccagctacttgagaggctgagacaggagaatcgcttgaacccaggaggcggatgttgcagtcagccaagattngccattgcactccagcctgggtgacagagcaagctctg

SEQ ID NO: 631950 - DNA, 1158 bp, Homo sapiens
  misc_feature (642)..(642): n is a, c, g, or t
ttctccgctcccagacatgtagtccctcggcttcctgcctcgagaacggcgcatcagcaggcatcgtgggaaggtgaacagcttccctaaggatgacccgtccaagccggtccacctcacacgtccttcctgggatacaaggactggcagtgactcacatcgtgcgcggaagtctgacaggccgggatccatagggtgaacaaggaagtgagagtggtgagacgcgtcggtggtgaccaattagatatgacgacactcactccataggctgagtgtagtaggggccgcaaggttttgtggcgtgctagcaggttgtgagagaacccaccttaccagaaggcccctcctgagagcacttatcagagaacattggtgcttgtggcctgtaagcaaaacatactagcttgatcgagagtagtcattgcacggacagtctatcttatataagtacatttggactatacaattgctatagaacgaacggcactgtaaaccaagtagctgacaatgatgagtggctaggatgacggactggcacagaagactgactggaaccaaagggagcttcgacgtcaagctatgatagaaatgtcacgttggagcaaaggatcacttcgcagtgatacaattcgccgcgcgatncacacccatggattagtctgcgcatgactttgcgctctgacgggcaccagaaggaaaggaccacagctggaatgggatgaatccaaaggttggaatggggatgggcaactagttggggtcggatgaaagcctggggaacttgagtgcgcccgggacgaagtagggttgtggattgcacgacaagggatagcatgtaggaaccaagtgtaaaggcgcagcgattgaagatatgagcggacgctcactcggggtgaccaggggcaaaagggacaacgggcgtcaccagaacgtgtggggagcaaccaaaagaaagctggccccgaaaggacccaccgagggctgcggccaagggggccggtatttggggcactgggcctccggctcggtggaggcctactctgggggccaggcgcctggggccgaaagggtgcattcaccggaagagagaccacccgggacgtccgcggactcggccggggcaccccaacacgggagcacccggccccagacagccgc

SEQ ID NO: 631951 - DNA, 958 bp, Homo sapiens
cattaatggctagtcgaggccggtgcttattcggcgaggtggatgcatgattggcgaccgtgcaggagtcctcgctggccacgacaaccgcgtgagctgcctcggggtcaccgacgatggcatggctgtggccacgggctcctgggactccttcctcaagatctggaactaatggccccacccccactgggcccaggccaggaggggccctgcccatgcccacactacaggccagggctgcggggctggcgcaatcccagcccccttccccgggccacggggccttgggtccctgccctcccacccaggtttggttcctcccggggcccccactgtggagataagaaggggatggaatgggggaagaggaggagcaggaggccctcatccttctgctgccctggggttggggcctcacccctctggagggccggaggcaggaggtggaaaccccaggggctggcttttttaaaactggttttattttaatttttattatattttcagtttttccataaaggagccaattccaactctgcggttaaaaaaaaaacaaacaaaacacaaacaaaaacaaaaaaaacacacaacactattatcatcaaacaaaaaaaaaaaacaaaaaaaaaaaggggtgggggcgcggcgccgcgccccgccagcaagaaagaaagttataaaacacccctagtggggggcgggcgcggcccgccccaaagagtagagtacgaacccagtcagcaacacgggtgtcccaaaaaggaagacccggcgcacgcaccaagggggtggtgggcttctcccccaaaaaaaacgacacgcccgggggcaacgcaggcggtgtgtgacaacacaccccaagaggtggctagcggggagcaacaggaggcagctacacaaaaagagggagcacgacaggacgcagaagtataaaatcgccgccccccggcgaggggat

SEQ ID NO: 631952 - DNA, 1318 bp, Homo sapiens
  misc_feature (38)..(38): n is a, c, g, or t
  misc_feature (51)..(52): n is a, c, g, or t
  misc_feature (55)..(55): n is a, c, g, or t
  misc_feature (57)..(57): n is a, c, g, or t
  misc_feature (67)..(67): n is a, c, g, or t
  misc_feature (110)..(110): n is a, c, g, or t
  misc_feature (166)..(166): n is a, c, g, or t
  misc_feature (308)..(308): n is a, c, g, or t
  misc_feature (311)..(311): n is a, c, g, or t
ccacctgtgccctgtgggacattaaaacaggccagcanacagtgggttttnntgnanacagtggggntgtgatgtccctgtccctggcccccgatggccgcacgtttgtntcaggcgcctgtgatgcctctatcaagctgtgggacgtgcgggattccatgtgccnacagaccttcatcggccatgaatccgacataaatgcagtggctttcttccccaaaggtacgccttcaccaccggctctgacgacgccacgtgccgcctcttcgacctgcgggccgatcaggagctcctcatgtactcccatnacnacatcatctgtggcatcacctctgttgccttctcgcgcagcggacggctgctgctcgctggctacgacgacttcaactgcaacatctgggatgccattaagggcgaccgtgcaggagtcctcgctggccacgacaaccgcgtgagctgcctcggggtcaccgacgatggcatggctgtggccacgggctcctgggactccttcctcaagatctggaactaatggccccacccccactgggcccaggccaggaggggccctgcccatgcccacactacaggccagggctgcggggctggcgcaatcccagcccccttccccgggccacggggccttgggtccctgccctcccacccaggtttggttcctcccggggcccccactgtggagataagaaggggatggaatgggggaagaggaggagcaggaggccctcatccttctgctgccctggggttggggcctcacccctctggagggccggaggcaggaggtggaaaccccaggggctggcttttttaaaactggttttattttaatttttattatattttcagtttttccataaaggagccaattccaactctgcggttaaaaaaaaaacaaacaaaacacaaacaaaaacaaaaaaaacacacaacactattatcatcaaacaaaaaaaaaaaacaaaaaaaaaaaggggtgggggcgcggcgccgcgccccgccagcaagaaagaaagttataaaacacccctagtggggggcgggcgcggcccgccccaaagagtagagtacgaacccagtcagcaacacgggtgtcccaaaaaggaagacccggcgcacgcaccaagggggtggtgggcttctcccccaaaaaaaacgacacgcccgggggcaacgcaggcggtgtgtgacaacacaccccaagaggtggctagcggggagcaacaggaggcagctacacaaaaagagggagcacgacaggacgcagaagtataaaatcgccgccccccggcgaggggat

SEQ ID NO: 631953 - DNA, 1345 bp, Homo sapiens
  misc_feature (38)..(38): n is a, c, g, or t
  misc_feature (51)..(52): n is a, c, g, or t
  misc_feature (55)..(55): n is a, c, g, or t
  misc_feature (57)..(57): n is a, c, g, or t
  misc_feature (67)..(67): n is a, c, g, or t
  misc_feature (110)..(110): n is a, c, g, or t
  misc_feature (166)..(166): n is a, c, g, or t
  misc_feature (308)..(308): n is a, c, g, or t
  misc_feature (311)..(311): n is a, c, g, or t
  misc_feature (550)..(550): n is a, c, g, or t
  misc_feature (556)..(556): n is a, c, g, or t
  misc_feature (559)..(559): n is a, c, g, or t
  misc_feature (569)..(569): n is a, c, g, or t
ccacctgtgccctgtgggacattaaaacaggccagcanacagtgggttttnntgnanacagtggggntgtgatgtccctgtccctggcccccgatggccgcacgtttgtntcaggcgcctgtgatgcctctatcaagctgtgggacgtgcgggattccatgtgccnacagaccttcatcggccatgaatccgacataaatgcagtggctttcttccccaaaggtacgccttcaccaccggctctgacgacgccacgtgccgcctcttcgacctgcgggccgatcaggagctcctcatgtactcccatnacnacatcatctgtggcatcacctctgttgccttctcgcgcagcggacggctgctgctcgctggctacgacgacttcaactgcaacatctgggatgccattaagggcgaccgtgcaggagtcctcgctggccacgacaaccgcgtgagctgcctcggggtcaccgacgatggcatggctgtggccacgggctcctgggactccttcctcaagatctggaactaatggccccacccccaaaancccccnccnccccccaaancctgctgggcccaggccaggaggggccctgcccatgcccacactacaggccagggctgcggggctggcgcaatcccagcccccttccccgggccacggggccttgggtccctgccctcccacccaggtttggttcctcccggggcccccactgtggagataagaaggggatggaatgggggaagaggaggagcaggaggccctcatccttctgctgccctggggttggggcctcacccctctggagggccggaggcaggaggtggaaaccccaggggctggcttttttaaaactggttttattttaatttttattatattttcagtttttccataaaggagccaattccaactctgcggttaaaaaaaaaacaaacaaaacacaaacaaaaacaaaaaaaacacacaacactattatcatcaaacaaaaaaaaaaaacaaaaaaaaaaaggggtgggggcgcggcgccgcgccccgccagcaagaaagaaagttataaaacacccctagtggggggcgggcgcggcccgccccaaagagtagagtacgaacccagtcagcaacacgggtgtcccaaaaaggaagacccggcgcacgcaccaagggggtggtgggcttctcccccaaaaaaaacgacacgcccgggggcaacgcaggcggtgtgtgacaacacaccccaagaggtggctagcggggagcaacaggaggcagctacacaaaaagagggagcacgacaggacgcagaagtataaaatcgccgccccccggcgaggggat

SEQ ID NO: 631954 - DNA, 767 bp, Homo sapiens
ggacggtgcaccggacggagggatcgagcaaatgggtctggtccatggagcactggagggtcctacgctcgggcggggggcagctctcggggctgctggtattacctgcgctagttcttcctcttggtctccctcatgcaagtacctcatcatcctggaggctcgtgctcttcatggtctagtggcaagcgtgcacgtgaggcacagagtcgcaaccgtgcaggccaccgagcgccgagccgagggcctatacagtcagctcctagggctcacggcctcccagtccaatcttgatccaaggacgctcaacattcatcagcgcgcgccaaggatgccatcatgcagatgtggctgagatgctcgccgggatctggactcgcatcaattgtcaggcttccgggcaagtgccagggtgaccggggtcatctatacgatactaatcagaggtcacatggctgccatcatcttgagtgagaagcaattgccgagatcaattcacaggcacgatgaacaagagctgcgatgcctgggtcttcatgctgaatcagaaggtgaagacgctggagtgtggagatagccaaggagaagaccattggcactacggataacggcacagcgtgctgctgaacgaaacgcgtggcggaggaacaggtggttgaatgcgtgaaaacccgggagctgcagcagcaagagcgccagctggccaaggagcactgcggcaggtgcaagccctctgctggccctggacaaggacaagtttgagatgg

SEQ ID NO: 631955 - DNA, 602 bp, Homo sapiens
tcgggtgccacccgtccatgatcagaggcaaaaattaagcagcatttaagacctcctatggcaggatttaatcaagatctcaatcagagttaagtggcaatatggagaactgatcctgggcctcttcatgctcctacgtattacgatgcctggagcttacggaaagcaatgcagggagcaggaactcaggaacgtgtattgattgagattttgtgcaccagaacaaatcaggaaatccgagaaattgtcagatgttatcagtcagaatttggacgagaccttgaaaaggacattaggtcagatacatcaggacattttgaacgtttacttgtgtccatgggccagggaaatcgtgatgagaaccagagtataaaccaccaaatggctcaggaagatgctcagcgtctctatcaagctggtgaggggagactagggaccgatgaatcttgctttaacatgatccttgccacaagaagctttcctcagctgagagctaccatggaggcttattctaggatggctaatcgagacttgttaaggcgtgtgagccgtgagtttccggatatgtagaaagtgggttgaagaccacttggcaggtgcct

SEQ ID NO: 631956 - DNA, 639 bp, Homo sapiens
ctctggtggatgatacgtcaagtcacagcatacagcatacatcttgctgaagtgctaggatacttatcttattagagttggagtaagtagcataactgctaatctaaagctagctcttaagttgaaagattatgtatggactgtcagttaacggagcactagagcttgatatgaatacagtgacttatgacatgggatacaggattatagcaggcccttggacttctaccatacagacggtctagcattgtcagacctctgccattgctaataccatgtggaaatctgagtccattagacgcgatatctgattttagacgatggcagataactcagaggttgtcaacggcattcatacatagtcgtcatagacatattgttgtacttagaccgctgctagtgacctaagagataccatgcaggtcttagcagagactggacctagcgtcgcgccacaggtgaatttgacagtgatatgttccatgctgaggttggctgcttcagacatgcaagtgatcatcacccgctagtggaacgattggacaaccgctgatagcacttaacaggctaccaatttcccttatccgttgagttaccattgccttgtagatgacatttaacgtcccctgcattccagcc

SEQ ID NO: 631957 - DNA, 753 bp, Homo sapiens
atcatcccagcactctgggaggttgaggcgggtggatcacctaaggtcaggagttcgagaccagcctgcccaacatggagaaaccccatctctactaaaaacacaaaattagccaggtgtggtggcgcatgccttaatcccagctactcgggaggctgaggcacggagaatcgcttgaacctgggaggcagaagttgtggtgagccgagatcacgccattgcactccagcctgggcaacagagtgaaactccatctcaaaaaacaacgacaacaacaacaacacaacaacaaacgcagcaattccattcctaggtgtacacccaaaaaaattgaaaacaggtattcaaacaaatatttgtacacaaatgttcactgaagcattattcacaatggccaaaagaaggaaacaaccaaatcatcaacagataccggataaacaaaatatgatatccatacaatggaatattatttagccataaaaaaggaataaagtactgatacatgctataatgtggttaaactctgaaaatatgatgatgtcccggtgtggtaagctcacaacctataatcccagcaagttgggaagaatcttcttatggttcaaaaaaaacaacgtaggcctggtgttgctggctcaggccggtatggtggtccatgcctgtattcatccacgatcggaggtgaggggtggacaccgcactcggattgaacggccgccattggaaacctgttctaagacacgcacacaaaaa

SEQ ID NO: 631958 - DNA, 365 bp, Homo sapiens
cgatgggcgcggatgtgatctcaggcatggtcctctcctgactgggagcgtggagtggatttcgggtgcgttccggctctgttgcggggctggatatgcgtggcgacgacagcgactagggtcaataggctgagtacgttgacggtccctcccgcctgcaccgcggcggaacggtccaacccgtccccgatgccgatgcgtaccagcagggaggcctccagcaggaaggcggggagccagaaccacgtcgtccatttcagccggacctgcaacacggcgggcaggatgatgggggcgtggccgaggatcatccccatggtgaatccgaggaagagcgagtggacgacggcgtcatacccacttcg

SEQ ID NO: 631959 - DNA, 201 bp, Homo sapiens
aactactaaagttccagtagttaggccattcatttaatgtgcattaggcccttttctgtttatttaaaagtcaattgctttctaatgctctatgggccgactatcaagatattagtaaaaaaggatcatgtttttaaacagcaggtcccgggccccttggaaataaaaatttgccggattccaataatttggtttggggga

SEQ ID NO: 631960 - DNA, 416 bp, Homo sapiens
  misc_feature (416)..(416): n is a, c, g, or t
attcctgaagttgacagcattttcgccgagaggtctcgctccgtggccttagctgtgctcgtgctactatctctctatggcctgcaggctatccaccgtactccaaagattcaggcttactcacgccatccaccatagaatggcctgacaaagaccctgaatggctatgtgtctgggcttcatacatccgacattgaagttgacttactgaagaatggcgagagaattgaaaaagtggagcattcctggtctttcagcaaggactgggctttctatctcttgtactacactgaattcacccccactgagatgagtctgcctgccgtgtgaaccatgtgactttgtcacagcccacgatcgttaagtgggatcgagacatgtaagcagcatcacggaggtttggatgccgctttggn

SEQ ID NO: 631961 - DNA, 874 bp, Homo sapiens
tcaaaaaagccagtttttttttaatttggtaaaggctctgccataaatctttctagggggtgccatgggtcaccggccaaatctcgccccgggtggcccgtgtacccggcaaacagagtctcgtggccattcagccagaccaggccagggaggttgcacgtgggggtggttcgtgcctttgctgtgcggggatacgtgatataacttctcgtgggcttcagtctcatctctacaagtgatctctttctcccctcataaatctcccagactctggagtgcgtggggccgtggtggcagcacccgcagcccgagtatagcgcggtgtatgagggcttgtaagccacgagggcgcgttgtggagtgtatgtgtctccccacaccattctatagcgcggtggtaacgacgggtgttttgtgccttctcggtgtggagaatctacccatataaaaacgtgtggccgcgtgggccgatctcctttggggccttcccgagaagagcccccgagagagggatctccccactcgtgcgaggaagaacgagtctcccccggtgttctcagaattagcccgtggtgtgtggccgcgcagtggtggctgtgggtcctatcagctgtgggcaagttataagcccagggtctcccatattaccgtttgggacgcaggctgtgttgttccccatgcctacgtgggagacccgattgaataaggggatgtgcctcgccatgttgagggcgccgaaaaaaaggcgcgatcccacagaggaaaccccccccactcttgttgaggttgggtgtctacaatccctgggagcagtggtttttttgcccccaccccccccggggttttcccccaagagcgtggaaggggggtcaac

SEQ ID NO: 631962 - DNA, 110 bp, Homo sapiens
  misc_feature (40)..(40): n is a, c, g, or t
  misc_feature (65)..(65): n is a, c, g, or t
  misc_feature (79)..(79): n is a, c, g, or t
acagctccgtgtactgaggccccgcagctctggccacagngacctcttgcaagtgccccctaagngacccggacacttncgagagggccatcaccgcctgtgtatataac

SEQ ID NO: 631963 - DNA, 1680 bp, Homo sapiens
  misc_feature (265)..(265): n is a, c, g, or t
  misc_feature (1210)..(1211): n is a, c, g, or t
  misc_feature (1292)..(1292): n is a, c, g, or t
ctcagacgtgtgtgtttttatttcgtctccctcctttctgttgtttcgtgcgcccacagcctcgcagcgacgtggttcttctcatattacgggagagacagggtgtgttgttgagacaaggtggttaatgagagtgagtgttctctctcgccgtgccgacatatttgttgtttctcttcccccgcgccccgttgtttttgtgccaccgaccaacgagatgtatcattctgagtctccttgtggtgtggttcggttgtgtcccccncctgttttttttatgttgagggggggggctcccctcccgccctcgtcttctggggctctccaaacacagtggtgagagacaaacacaacgagcgtgggtttgtttaacacgcggccggccccgccgggggggtgtgttctccctcttatatttccccgccggcgtccaaaataagaggtggtttgttgctcaaatagaaggaaatctcaacaccgcggggggttgtcgccctctgctaaatatattgtggggggggcccctcctcgtttatgattatgagtgggggcggggctccaccaacacacgacggcggggggttgtaacacaacgccgttcgtgttgtttgtaagtgactgctgtgtagaacaccgagcgcctggcggatgagttgtggagcttccccctcgtccccccccctggtataataagaagaggcgggggctggggcaatcataataagaccaccaccacgctccattagattagtcagcgcagagagattgtcgccctctccctattcttggggaggagccgttctgtatatcatcatggtataggtataaaataggcgtggcccaccaccactgctgattctgctttttacgccacacatctcgctacactacagcggcgggttgtctcgtagagattttcgcccacacatcgctcgcgctctttttataaaaaatgtgtgtgtgtcttgtgtgggggtgcgacaacactcgtggcgggagcacacgaagagaccccacacaccctctctcggaggcacacgcggacacaacatctgtctatgatagaaagcgtttctacaacacacatctcgccaaagcgcgcgcaatcatttatcatatatatatatctcacatttgtgtaggtgcccatcatataatctgtgtgggccacacgcgcgggagcacacacgctttattctctctcgtcggnngagatatacacacgcgcgcgcacatctcttctcatatttttagtggaggaggcacacatatatcacacacacacataaggngggtttatacgcagcaccccgcgcagatgttgtgggagagacacgagagacacatctcccgcagcggtggcggcacaccgcgcgcgtatatatataaagggtgtttcgttgtgtttctacacacgcagagttataaaggtcttctacacgcgtgagatattgtgagtttcacgcgaccgcgcgggtgtatatatccacgagggcgcgtgtttttgatatttattttctcatatattctctctgccctgtgtacggacaagagacacacaagagaaaatatatagagcctctatctttctccacaagagcgccctcttcccccgcttaaatagaaattttttcttactttgggtttaaaccccccccccccccaaaaaacggggtttta

SEQ ID NO: 631964 - DNA, 242 bp, Homo sapiens
tagaacagtttcctgtccagctcatggcggcccatgtaggcccaaaacttcctcaagtcaaactctccaggcccaacttctgcttcccagtggcatgaacaggcccagcattttgacttgagcaacagcctctgctaagccctgcttcttgcactcccagagggcttattccagagcccagactcttgcctcatggacagctgccccagagccaaatttctgacctgcctgcccagcagacc

SEQ ID NO: 631965 - DNA, 295 bp, Homo sapiens
  misc_feature (24)..(24): n is a, c, g, or t
  misc_feature (89)..(89): n is a, c, g, or t
  misc_feature (104)..(105): n is a, c, g, or t
  misc_feature (116)..(116): n is a, c, g, or t
  misc_feature (120)..(122): n is a, c, g, or t
  misc_feature (125)..(125): n is a, c, g, or t
  misc_feature (132)..(132): n is a, c, g, or t
  misc_feature (135)..(135): n is a, c, g, or t
  misc_feature (142)..(142): n is a, c, g, or t
  misc_feature (179)..(179): n is a, c, g, or t
  misc_feature (192)..(192): n is a, c, g, or t
ccccccttaggatgggcaccttantcgtctcagcaacaccaaattaaccccttcatccagtggcccctccaggcaagagtctcagcggncgagagtccagcctnncctcccccccnccannnagngggcagnccngcacagntgctgggagcccttgtgtgtctggtcacactttttangcgtcacgccaanaggccagcctcctggccccaatacccattttggaagcccctgtggccgtgtggatgtcggtaacagttgtataaaataaattctatttatcgctattgtaaaa

SEQ ID NO: 631966 - DNA, 1113 bp, Homo sapiens
gtgagctggcgccgagcgggtgcgggtgctgggcgcatcggccatcaccgcgcggccgcgccagcggacaccgtgcgtaccggcctgcggcgcccggccaccgtgggcggaccgcggaacccgaggctatgtcccatttaacaagagttttcatcgggtgtcatggggacaaacgtattccatccccaccaagccctggcatactccgtgcggagtggccccaaggcaaaaccaattgaacaccacaacataattgcatcaagcgcatacacataagacacatggaggagacccggtagtgagggacaagacggcaaccacaaatcaaacaacggacgaagtgaacacaagagaagacacacagaacacgacgaaaagcagaaaacaccaatggcaacaacctacgacaagcaaacccaacacaccaacagcaatgacacacaccaacaagagcaaacaacaaacaagaggtaagaacgcaggtgagtgtcaggacagaacagacacagcggccagcacaccggaacgggaaagcgaagcggcggaaaagacgggaagggaagagacagaaggaacgacacgaggggaggcaagaagcgagaggtggagggaggggaggcgacaagacagcggtccgaagtagactagaccacacggaggcggagaggaacgagagcgcgacgcagaacgcggatgagagacaagaagtcggcgaggctagaatcagagaggagcgaaggagaagagagggcaggaagacagctcaggaacagagaacgaggacactagaggagggagcgcatggagagagaagagagggagaggcaagagaaaagagagcacgaggagagtgggcgaggcaggaggggagaaacgaagaggacaacggaagggagagatagacgagagaagcgggtgcagagagccggaacacggacagcaggggcgagcggacggaagaacgagaagcgtaaagaacaagactaggacagaggaagagcagagctagtgtacatagggagccaagagaagaaaatcacaagagagggaggaagacacagagagacagagctacagtcagtggagagacaaggagaagaacgagggagaaag

SEQ ID NO: 631967 - DNA, 480 bp, Homo sapiens
agcggggtctgcgttgccatcccggccctgctggaccgcgtgggtcagtaggaagccgcggtggatggtggcgagagaggacccaggtgtcctgagacagtgagtgcaggccggcgagtggcacacgctggtgccaaggatgcaggcggccagggtgcggagacatgttcgccaccgaccctgtagatactccatatccttgatttcgtccacacatgtatcgggagttggagatgtgcacactaaaggagagcgcatcatggggaactggacacaatctggacaactgaagtgacacatacgacacacacttgacctcgaccacacatggacgacaccatgaacacacaacacaacaagatgcacattagaacgaggtcagcatcaaaaagtaaggggcccccagcggatcgaccacgcaagcatgggcaccgacgaacagaaaggcccagaaccccgacctgccagagaacagaccac

SEQ ID NO: 631968 - DNA, 1478 bp, Homo sapiens
  misc_feature (173)..(173): n is a, c, g, or t
ggcccagcggagggtggaacggcgtcggtgcgagcttgtgggccgcgctggtcctaggggccgtggcgctgatggccggcgtgatcgcgggtgtccgtagctcgcatcgatgggttgggcgtttgacggtgctggcccgtgcgggctgtcagtgcacttccgtatcgtcccantaagcagttggtgccccggggggacatcattataacggtgataatgcttcaactgtatcgacctcgtctaagggacggtggaccaattgacgtcaagtggacagagtgaaggtcttggggacgcgagccgcacagacgcatcgcaagtcaacttatcagccctgtcaccgcattgctgggatgagctcacacaagggcgaaaggtacactaatactcggtacgttgcagcagctagtattcaaggtgtccatgcagggatggctgggagctgcgtgacgcaagttgacgttaactggctcatttggacgctaaactacgtaaaaagacccgtcgagttctagcacaataggggggcacattatgtctgatttgtaccgcttgcctaggaaaaaatcttcggcaggcgcaaattttcgaagattgttggtagcctacatatatcaaggacggacaggtcgtgacttcaaaccatgtggccccctggggtgggcaatatcgacaaaagctgtgacgcctgggtccgaaaagtcatcgggtcggaagttcgtagggacccacatcggtacaattccgtcgtcgacgtggcaaggcgtgctaggatcccaggaccaagacgccttagtctagccaggaggttgggacaaccccttttctttcgaattccttacccggggtatgaaaacggcttggaaaacggggggccctaggttggttacccccttggacacaagggggccgaaagacaaaacatttaccacttggtgttttatgtaccttacagggaagcgcggaactacatatgaaaggtgttatacttaaacacttggagaggccttagaacacggtgttcgacccttttggttcaccctgggaaggaggggggctttgaacaaggaggggttgtgagcttcgaagaagcccctttgggtggaggcacagacaggaaaacaaggcaggggtgtcccaagagtggagcctccccttggggagtcccccaaagacaagggtctcctcacaggattccccaaccttttccctaggcttgaagacctctattccggggaacttcacgaggactcggcacagaaaccccgaggggggcacccaagcagggcggggggggcacaccatgggggggggcaaagaacggtgggcgaacgcgacagccgatgatcaccaccgggaagcagccagacgaagacgattcatcagaagacctgtatgaaacgaggcttgcccagcggattacaccacgggagacacccctcatagacctcacacgcggaaaaaagaaacaggtgaga

SEQ ID NO: 631969 - DNA, 1304 bp, Homo sapiens
  misc_feature (687)..(687): n is a, c, g, or t
gcctccatagctggtagaccttacataaggcctatgcagatgtgagtgtgcaagttgcctggtagctgtcgtcaatgatgctgatgcgattatcactgttctgccaatcccaacattttggttggacgatgagatattcctggatagagagtgagaaccatgcgacgatcggctgacgcgagccacgtgccgtgtccgtggctgcgatctctaactctggtggctcgaatggatgatgaatttacgcaaagtaatgcataatactgacgcctcactcccgactattacgtggagcacttgaaggattgatgcccaggtgtgtgccatcatcgatcgtgtgcagcgctacctggaggagaagggcactacctgacgaggtctagccgcagtctacactgactgcgtcattccgtgcatcgatccttagctacagagtattgacttatcatatgcgcccagtcatgtcgcacagtctgaccccgtcctgagggctcctcaaagtctgatgcaagaccaggcagaaagatgagggcgatgactcggctgtgttgatggagagactgtgcaagtacatctacgccaaggaccgcacagaccggatccgcacatgtgccatcctctgccacatctaccagcgcgagtgcagagcatggtggtagatgtggcaaggatggcagcatgtgccgnacatgctctgactcgcgctggtaccaggcccggactcatgctcatgaccacttgcaggacaacattcagcatgcagacccgccagtgcagatcctttacaaccgcaccatggtgcagctgggcatctgtgccttccgccaaggcctgaccaaggacgcacacaacgccctgctggacatccagtcgagtggccgagccaaggagcttctgggccagggcctgctgctgcgcagcctgcaggagcgcaaccaggagcaggagaaggtggagccggcgccgtcaggtccccttccaacctgcatcatcaaccgtggaggctgctggagtgtgtctacctggtgtctgccatgctccgtggagactccccttacatggccgcccatgtgagagcgagtgcccgccgacgcaatgatcagcaagcagttccaccaccaggctgcgcgctggggcagagcgatcgaggcgcccgtggcatgggatccgccctgtagtctccaatggcgaggaagcatgtggatcgcctgacctccaagtgccatggaagaatgggtgactgggaagcacctgtcgacaggtttgtatcatcaatgagaacgatgaatgggaaagtgtgcgga

SEQ ID NO: 631970 - DNA, 1004 bp, Homo sapiens
aatctgcgatggcatcctaatgcttaccgaacgaaaactactagcgctatatacaactacgcaaaggccccaacgtatgtaggcccctacgggctactacaacccttcgctgacgccatatacactcgttcaccaaagagcccctaaaaccctgccacatctaccatcaccctctacatcacctgccccgtacctatagctactcaccatctgctcttctactatgaaccccacacataccccataccaaagcccactgtgacacaccactgaagctaaagcctacctatataatatcatagaccacctcgtagcgctagcccgcacactaatacaagtacgcaatcagaatacaagaggagtgaagcgaatcgaaaaactacaaaaacataccatagccaacaagcatgtaagatgaaggcgagcataacgatggcaaggaacagacacacaaacaacgaaatcatacactggtgtaaacgatcaacaccgtagaacagagacaaatatcgaaagagaatccactcactagtaactagaagtaaagacataagattacaataggaaatccgttcatcacgaaacacctaataaaatcaaaaacaaaaacagaacgagaacaaacacatacatagaatttaacaaagcgaaagaaacaaatattagaagatacgcctagagaaaaccaaaaataaatataatgaaatatacaagatatatgcagacacgaaactacagggagaaaaggaacaccatatatcagacaaatatctcaagcaaatacaaaacacaagaatgagtaacgcaaaagtggcgacagatcagaaacacaattaaaaagagatcgaacagatagagaaacataaaatataaacagagataaaatcaaacatagaaagacaacatatcgagtacaaatacatacgaacattataaatagtaagaatgagacacaacaaataatagaaataaagaaacactcagtcaacaacataacaaggaaa

SEQ ID NO: 631971 - DNA, 943 bp, Homo sapiens
cctagcgcccctggaagccaagaatatgaggaagtcttcttccttcgcgccttcttcttccttacgctccaggcagcctgacagagccgctcgaaggctctgctggccgcggctagccggtttacccattccactggacccagccaccacccactcctgctgtctggtaaactttcctcctgtttctggggccatgtctggcatgaagagtttttactgaatagttttcattgatcgcaggccagttctctcttctcacccctttattgaagtgacagtgaaaatctaagtgagaaagcactgttacaggggctgaaaaggctacaggagaccagagccattgacttttatttttaaaatgaagatctcttttacttgaaggaacttaagaattttggcattcaaataggggctggaagacttgaaagcagtagaaatttcaccacaggtgataggaaaggatgatcacgaaatgaatatctcctgacttgcacacctagtgagcagagccaggaaggacctccttcaccttagcatttggaacaggctgcaaagttcattcttcctcatagcagcccctgcattcagtttggtttagttgttttatgtggtttctagcctgattttttttttcagggtgcagcagaagtctcaggtagctgagaagttcatggaatcttcttatttgctacacctttcactactgcttgtgatatagtgcagggttgggatgtgcagacatttctcaagtgcactgtgtacctacacagcatgctgcaatttggctactgaagtcaagagaaactggtttgaacaactactgagtgtaacataggaagcgcatttcatttgataacaggaacacagcttttgtgctaataaaatgcttcgccacttcccacaccacaccatcccccccatcttccacacacctgctcacatc

SEQ ID NO: 631972 - DNA, 275 bp, Homo sapiens
  misc_feature (35)..(35): n is a, c, g, or t
  misc_feature (38)..(38): n is a, c, g, or t
  misc_feature (42)..(42): n is a, c, g, or t
  misc_feature (46)..(46): n is a, c, g, or t
  misc_feature (51)..(52): n is a, c, g, or t
  misc_feature (57)..(57): n is a, c, g, or t
  misc_feature (85)..(85): n is a, c, g, or t
  misc_feature (90)..(90): n is a, c, g, or t
acgtgggacctattactttaaagtgaattggaaanaanatantaantcacnngtganttattatgttgtttccaattcactttanagtantaaactatatataaaaaagctttcttgtaccatctgaaaccttctcatgtgtatatcagtactttgggaaactttgcataagaccatctgggtctactggttgaatggtaagagaagggagtaataaaaaaataagaaacaaaaatgatactgttataagcttataagccatggagtaaatggca

SEQ ID NO: 631973 - DNA, 1250 bp, Homo sapiens
gcctccatagctggtagaccttacataaggcctatgcagatgtgagtgtgcaagttgcctggtagctgtcgtcaatgatgctgatgcgattatcactgttctgccaatcccaacattttggttggacgatgagatattcctggatagagagtgagaaccatgcgacgatcggctgacgcgagccacgtgccgtgtccgtggctgcgatctctaactctggtggctcgaatggatgatgaatttacgcaaagtaatgcataatactgacgcctcactcccgactattacgtggagcacttgaaggattgatgcccaggtgtgtgccatcatcgatcgtgtgcagcgctacctggaggagaagggcactacctgacgaggtctagccgcagtctacactgactgcgtcattccgtgcatcgatccttagctacagagtattgacttatcatatgcgcccagtcatgtcgcacagtctgaccccgtcctgagggctcctcaaagtctgatgcaagaccaggcagaaagatgagggcgatgactcggctgtgttgatggagagactgtgcaagtacatctacgccaaggaccgcacagaccggatccgcacatgtgccatcctctgccacatctaccacatgctctgactcgcgctggtaccaggcccggactcatgctcatgaccacttgcaggacaacattcagcatgcagacccgccagtgcagatcctttacaaccgcaccatggtgcagctgggcatctgtgccttccgccaaggcctgaccaaggacgcacacaacgccctgctggacatccagtcgagtggccgagccaaggagcttctgggccagggcctgctgctgcgcagcctgcaggagcgcaaccaggagcaggagaaggtggagccggcgccgtcaggtccccttccaacctgcatcatcaaccgtggaggctgctggagtgtgtctacctggtgtctgccatgctccgtggagactccccttacatggccgcccatgtgagagcgagtgcccgccgacgcaatgatcagcaagcagttccaccaccaggctgcgcgctggggcagagcgatcgaggcgcccgtggcatgggatccgccctgtagtctccaatggcgaggaagcatgtggatcgcctgacctccaagtgccatggaagaatgggtgactgggaagcacctgtcgacaggtttgtatcatcaatgagaacgatgaatgggaaagtgtgcgga

SEQ ID NO: 631974 - DNA, 1218 bp, Homo sapiens
cctagcgcccctggaagccaagaatatgaggaagtcttcttccttcgcgccttcttcttccttacgctccaggcagcctgacagagccgctcgaaggctctgctggccgcggctagccggtgaggagggtggggggaggggccgtcccgcgtgtgggggagtctgaaggcgaccaacgagagggagggccggagcggggaggtggctcggaggcatgtccagtaaactggggatgaaaatcctcccaggaacccgattattaatgggttgagggaagtggcaggtgcagcggttgcgcaaagacaatgatgcttagtagccaggacttcatggccacaaaattgtgtgtagagagggccacagcagcctgaaaaccattttcgtccccttttaggtttacccattccactggacccagccaccacccactcctgctgtctggtaaactttcctcctgtttctggggccatgtctggcatgaagagtttttactgaatagttttcattgatcgcaggccagttctctcttctcacccctttattgaagtgacagtgaaaatctaagtgagaaagcactgttacaggggctgaaaaggctacaggagaccagagccattgacttttatttttaaaatgaagatctcttttacttgaaggaacttaagaattttggcattcaaataggggctggaagacttgaaagcagtagaaatttcaccacaggtgataggaaaggatgatcacgaaatgaatatctcctgacttgcacacctagtgagcagagccaggaaggacctccttcaccttagcatttggaacaggctgcaaagttcattcttcctcatagcagcccctgcattcagtttggtttagttgttttatgtggtttctagcctgattttttttttcagggtgcagcagaagtctcaggtagctgagaagttcatggaatcttcttatttgctacacctttcactactgcttgtgatatagtgcagggttgggatgtgcagacatttctcaagtgcactgtgtacctacacagcatgctgcaatttggctactgaagtcaagagaaactggtttgaacaactactgagtgtaacataggaagcgcatttcatttgataacaggaacacagcttttgtgctaataaaatgcttcgccacttcccacaccacaccatcccccccatcttccacacacctgctcacatc

SEQ ID NO: 631975 - DNA, 414 bp, Homo sapiens
  misc_feature (45)..(45): n is a, c, g, or t
ttttcctatgtcctaccgtggaaatgtgatacagaaaatatccanggaataatcctctctaccaaaagccttcctgaggccgggcacggtgacttacacctgtggcccttgcactttgagagaatgaggcgggagaatggttggagctcaggagtttgagaccagactgggcaatgtacagagaccagtcactgtaaaaaaaaataaaaataaaaataaaaataaaaaagtagccaggagtggtggcgcaacctgtggtcctggctactcaggaggctgaagtggcagaatcgcttgagccagggaggtcgaggctgcagaggctggagtgaactttgatcatacctctgcactctagcgtaggtgatagagcaacaccctgtcttaaaaaataaataaataaaaaataagagg

SEQ ID NO: 631976 - DNA, 304 bp, Homo sapiens
ataatctttcttatgcatgtggaagggatgatgaatgacctcatcctatacctccttctccaacccaccagtatcgctgatatcctggtcaaacctgcatctacactggttcatgccccaaggcctcttgtagggacttccacatgggtaatgagggctgccctttttattttactattatgagtagtggatgctaattctggatatgctcaatgttctccctcacaaggtaggccacaaattcttggtgttgccctcacatctggggtcttcaggcaccagccaatcctgccgtggattgctg

SEQ ID NO: 631977 - DNA, 434 bp, Homo sapiens
  misc_feature (97)..(97): n is a, c, g, or t
gggggggtctggccccggcttgggctaagcagggcgaggcctgtggcgggttccctgggccccccgggaggggggcagccatcacaagcggaggttnagccgagcccccctaaatgtattccctggtgctggtagaagagtctttggggttgctcccgaaagccgtgctctccagcctggctgccagggagggtgggcctcttggttccaggctcttgaaatagggcagccttttcttcctatctctgtggctttcagctctgcttctatggtaattaggagaatagatgggtgatgtatttccttatgttgctttttcaacaaagcagaattaatgtagggagctaaatccagtggtgtgtgtgaatgcagaagggaatgcaccccacattcccatgatggaagtctgcgtaaccaataaattgtgctttctc

SEQ ID NO: 631978 - DNA, 1010 bp, Homo sapiens
gctctttctggtcaaaatggctggtaagcaggccgtttcagcatctagtgcaagtggctaggtatggtattcgaaaagttggtattagaatgctgcatggattcaatagatcatgggtgttaatgcagagattgatacaatatacgaggatgaagattgtataagaagccataagaagatttcctgtagaacctttgagtaatgacgaggatgtttcgccattaaagagggcacctggaccctgaacctgttatagcatcagatctatgccctaaaggatcagtggaactcaatatatgactgagcgaacaaatcttctaaccttgtaaccgtgattcttggaaatgaggttattcgggataagaatgatgaacacgcagaacgaatggggcaacatgaaggtaaatcaatgctagttgaaagtctcgtggactgtcatgcctgttactgaacgcactgggttaaagcgttgagagatcaagagcaattgttacagaaattattctgggactgaagcatggtttatatctttagaatgatctgtctattgtttaaacacttaacaagaaaggtaacaacgaagatccaataatactttgtggcggtacggaagtaatgtggctccgtcaggtacaacgactttatcccgcaactctttgccccgttgtaggccggtggtgggactcacgtatggttggttgttgtaccagcgagcgtccactgactgcgtgtctgacactgggtgagaaaccccacggacgcgttaagagagtctccagtgcgttttcgggaattctgggtcccccactctaataaacaaggtctgccaggggagaggtatgcatccaaagcatttccttagcaaggggtactcccccaatggcgtgtcaccaaggttaccaaacgtgagggacgctgtcactcggtgtggctcacagtggggtctggggattcacaattgagaccggcactctctgaaggggcctgcgggaacaggccaaaacaagcag

SEQ ID NO: 631979 - DNA, 106 bp, Homo sapiens
taggtaataatgtgattcctaagttttcaatcttagggaactgaaccgtagatgctgatgtggtcaacgtagtcatatggaaacaaatgaggagaatgatttcaat

SEQ ID NO: 631980 - DNA, 652 bp, Homo sapiens
cgctatacacaaaaatcaaatcaaaatggattaaaggcttaaatctaagacctgaaactacaaaactagaagaacacactggagaagtgctccaggaccttggtctgggaaaagatttttttgtttaagacctcaaaagcacagacaacaaagcaaaaacagacaaatgagattacattaagctaaaaagtttctgcacagcaaaggaaacactcaacagagtgggggagacaacccacagaatgagagaaaacattttcaaactatccatccgacaagggattaatgaccagaataaagagaccaaacaatttaagccaaaaacaaaacaaacaaacacacaaaaaaaacaaaagccaaataatctaaaaagtgggcaggtgggtggggtggctcaagcctataatcccagcactttgggaggccaaggcaggcaggtcaagagatcgagaccatcctggccaacatggtgaaaccccatctctactgaaaatacaaaaaaaattagccgggtgtggtggcatgtgcctgtagtcccagctacttgggaagctgaggcagtgagaatcgcttgaacctgggaggcagaggttgcagtgaaccaagatcacacaactgcactccagcctgatgacagagcgagactccatct

SEQ ID NO: 631981 - DNA, 974 bp, Homo sapiens
tcatttccagctgttggatctaaagtgagaaatttgcaactccttctttcacttgaacagttagaggccattgtggggtaatgaattggcctaatttcaatattgtccctcagggaattaggaggcctggcgaagaggaggagagaggggagagtggccagttggtggagcagtgagaacatagcatttgttaagtttgctgtcttcgaaggttgtggtttgtggtaccccaaaacaattaaaataggaacatcaaagatcacagagcagccgggcacggtggctcacgcctgtaatcccagcaccttgagaggctgaggtgagtgaatcatgaggtcaggagttcgagaccagctggccaccatggtgaaaccccgtctctactacaaatacaaaaaattagccgggcatggtggcaggcacctgtggtcccagctattcaggaggctgaggcaaggagaatcacttgaatccaggaggtggcagcgttagagtgagctgaggatcacaaccatgcactccagcccaaggtgacagagtgagattccttctcaaaaacaaacaccacaaaaaggggggggcggcattaatttcgttataaattaaaagactacatcggttgtgcaacaccgcagcaagaacagcgactagggaaatgaaaaaacaaacctgaagataacgagaaaacgtggaaggggacacaaggcggacacagaagccagaagacgcccccgcgacaaggacgagagcgaggagagagacgagacaaaaggagcaaaacagtaggaagaaagctagcggcaaagagacgacagcagagaggtagaacgtagagcgaagcacagagaagaaacagaagacagaagcaagaagaagtaacacgagcagggaagaagcagaataccaagtagagaaaaaagacaaggcaaaggaagctacagaagaggaaataaggcaggaagaagagaagaaat

SEQ ID NO: 631982 - DNA, 676 bp, Homo sapiens
gcggagggatgtggccctggaatattggtaggggggtgcccgggtggctgtcatgcaggtaccccgcgctggtgtgcctcgcctcgccgctcactttccagcgcacgcggacgccgcagcggacactccagaacgtgcctggccctgcagctgtgtgcctgcacgcgactggcgacccgggctctcccagctcattcccatccgtggtggagcagactgggtctgcggcgagcgctgcctatgacatctactcgcggctgctgctgggagcgcatcgtgtgcgtcaatgggcccgatacgatgacagcgtaagccagccttgttatcgcacagctcctcttcctgcaatccgagagcaacaagaagcccatccacatgtacatcaacagccctggtggtgtggtgaccgctgggcctggccatctacgacacgatgcagtacatacctcaaaccgatctggcaacctggtgcgtggtgccagggccgacagccatgggctccctgcattctctgccagacggcaccccagggcatgcgcccactcgctccccaaactcccgtatcatgatccaccagccctcaggaggcgcccggggccaagccacagacattgccatccaggcagaggagatcatgaggctcagaagcgctctataacatctagcaagcacacaa

SEQ ID NO: 631983 - DNA, 215 bp, Homo sapiens
agaatttgaatgtttatagtttaatggttgtttggaagtgatttaagtattagaggattgctttaggctagagtcataataggtaattcgtagattgagaaatactaggttggaatataaataggggaggatggtgggttcgccatgttatggtatgaatcctcgcatgtcagtaatcagtgatctattagctataaaaaagaaaatgaaagctc

SEQ ID NO: 631984 - DNA, 250 bp, Homo sapiens
agtctgctgaccttcactcaagtgcgcgtagtcttgaaagcagtgcgaccgctttgcgggtccggctgcaagagtttgacggagcgttgaaacaacttcagcgacataggcttttccacgctgccgcccttcgattttcagagctgaaacgccggctgcacagagttcgtctatgtggttcatcacatcgagagatacaggatcttcaaatgcatagccttcttcatcgccgatgttgaaacgccctttg

SEQ ID NO: 631985 - DNA, 280 bp, Homo sapiens
  misc_feature (35)..(35): n is a, c, g, or t
  misc_feature (61)..(61): n is a, c, g, or t
  misc_feature (105)..(105): n is a, c, g, or t
  misc_feature (120)..(120): n is a, c, g, or t
  misc_feature (123)..(123): n is a, c, g, or t
  misc_feature (127)..(127): n is a, c, g, or t
  misc_feature (141)..(141): n is a, c, g, or t
  misc_feature (151)..(151): n is a, c, g, or t
  misc_feature (159)..(159): n is a, c, g, or t
  misc_feature (172)..(172): n is a, c, g, or t
  misc_feature (174)..(174): n is a, c, g, or t
  misc_feature (199)..(199): n is a, c, g, or t
  misc_feature (215)..(215): n is a, c, g, or t
  misc_feature (234)..(234): n is a, c, g, or t
  misc_feature (238)..(238): n is a, c, g, or t
  misc_feature (273)..(273): n is a, c, g, or t
atgaacaaaaaggtcatcataagggacagcctgtnagtttatgcactgcatactgcaaatnacccactccagcaatgggaagacacccctaacattgcttctttncttataacggaaatnttntttnttatcagctttaanatggttcttntcactctntgcagtctccgtngnaacgtcccataagcccagggttttnagaccttttttctgtnctctaagcctacatatctnactncctaatggccttttcacttgattgacacatcattnagtttca

SEQ ID NO: 631986 - DNA, 297 bp, Homo sapiens
aggtggtgggagatgagtctcaaagctaagtaccggaaactgggcacagtggctcatgcctgcaatcccatcacttcccgaggccaaggctggaggatcacttgagcccaggagttttatatcatcctgggcaacatagcacgacctcatctctgctccaaatcactaataaataaattatctgggtgcggtggtgcatgcctgtgatcctagctactcaggaggctgaggtgggaggatcgctagagcccacagaaccaaagatacagggagccatgatcatgctactgcactcca

SEQ ID NO: 631987 - DNA, 99 bp, Homo sapiens
  misc_feature (80)..(80): n is a, c, g, or t
gcacgaggcagaactatcctagagattagccactatattttacttctttgccatcagcaagagtaggattcctaccttgncttgatgaaatcctactct

SEQ ID NO: 631988 - DNA, 168 bp, Homo sapiens
aaaaaaaggaatttttttggggataaataaaaacttgcctgataaactggaggcaatgtttggttcctccaaaggttttggtggtgtcgggggttttgccctccctcccttttaactgttttaaaccccttttttttgttaataaaagtggggcatttggccctttta

SEQ ID NO: 631989 - DNA, 105 bp, Homo sapiens
cctagttttagaagtgtcaatagcaggaggcagctctctagacatgaaggctattcacgtcccatgtcaagtctagctagagttcagagcaattgagaagtgcaa

SEQ ID NO: 631990 - DNA, 1206 bp, Homo sapiens
  misc_feature (340)..(340): n is a, c, g, or t
taacggcagccactttaattttcccttacacaaggacgtgtggctgggggcctaatggtcctcacttaacagtaaaaacaccaaaaattgtggtgtgctcactcttcttctcaagagaaatctcgagaaattgtgcgttacaaaaaaacacctttacattaaatttaagaaaatgtgattcactttcacgggcgttaaagtgcaacccgttctccaacctcaagagcagagttaacgagcccagcgggtgtctctcgtggcccaaagagacacctctcgagcttagagaacagaggaacacacgtgggtctcctatagcggctgtgggacacttatctcncacacccgtgacacgagacacccccgcaagagacaccaaacacaccacagcgtggtctctctttgtgccgagcctctcttgagagagaaaaaatctcccgagaaaaccactctcgagcccccgtgaacgcgcgttataattccccagaggcggaaccgagtctatacacttctccaattcaccagaggctccaacatatctcgagcacaccagagttctctaccaatctcccgagtgtgcgtgaatactcgagaattcaccaagctctctcagaggaacacattctctctttctcagaagggcgcttatattcccaggtttctcgagagagggctataacgcatgtagagggtgctgtcgccattttgcgcccaggggggcaaattttctcataatctccctcaaattataacccccaatgtgccagcacaatgtgcatacggcaattcttgctggaggtcccccggttatagaagacgcatttgggccgggggggaacacagtggacaggcggccccccgaactctccgctcagaaacctcccgtgtatgggcataaatctccccacaattcgtgctcgtgcaaacaaggggttgccacaccccatacgaggcccccagcgcacatggggcacccccaacccggatatccccaaccacgcggaagcataactttgccagccccccgaggaggggactgcacgaaacgaacaccttgaggaaacttcccaaggggacggcagtggcaaccgcccccaagccgcgcgcagacatcctccccgctatcgggccaaaccccgggtccgggacacaaggcccccgggagtaccacaatggccgcggcacccacgccccgaaaaagccccc

SEQ ID NO: 631991 - DNA, 405 bp, Homo sapiens
  misc_feature (14)..(14): n is a, c, g, or t
  misc_feature (379)..(379): n is a, c, g, or t
ggggctcaagaggngtcctcttctgtaagaggacaatgtctcctggagcttctctaaactgtcccattgaaatctgggcccttctgttgaagactgtccagagcacactctggtagcaggggggagttgtgagtgagccgttgtagcggaagaattgctccagctgttgggggaacagctctctcacgctgaagggaggcacagaggtcttctgatctttgtatcttatttcatgtagacgactcagaatgtgatcataagctggattctcagtctcgcccacctcaatgaggatgcctaggacagccaggccctgtggcttctgagctgcctcactcaagctgctgtaggactgggagtcatagtgaaccacgtggtntccgcaccgtggcttcactgttgatc

SEQ ID NO: 631992 - DNA, 1313 bp, Homo sapiens
tacgccgaagttgccaggtacatcgtgggattgctcgtgctctttcacgtcttcgcgcttaaattcgggtgtcttggatgaataatcaaaagctagcagaagccgaacggcgtatcgatggccagcgtttgtagcaactcattacaagacagagcatgcacacagagcaggtttgacccgtactcagttccgaagactgtaattattcgaatggcattgaactgaatagccggtactgagtctggaacgcgcgtagctaacgctatcttgatgactctactggaggcaacaagcttgagttaccggtcgcatttgcagggataacatctctatcgagcacttgctgtgtggctgtgtggtagatgctgggcccagtgtggtacaaggtggccagatgagcatgatgacgtagcagagtgatctgcggtgtacgcagtcccaaggaagatctaggagaccatgcaagcattctgcatcaggttcttgtaacacagttacctcacggcgcgtacaaattacctggaggaacagcgtgacgacagactgaccgtacatgaacgcgtgcgtggactgtactggaccgggatcgtatgcacgaagtcggagtaggacacaacgcctatcttactgcgtgacctcggatggtcttctgcgctacctggcaagcgactttaaggtgcagtccagtaccattcacgtaggcactcttactaacatgaccaactccggctcacacgaaggggagattgcagcccagctcttgggctggtgcacgctccttccacaattcagtggactccactgaccatcacgatgttccactgccaagcacgctggggcaactcctccggcaacacgtcagccgtggatacccagacgtgcttgcaaacccatcaacatgtccactaacgcacagctgttggacaccttccacacaatatataatcggaggacagggcccgcacaccgccagcattgccagcacaacagggtacggaaatcgcggaaaagccgctcggagcgacagaaaaggaaggtccagaacgacaacccacgcgacacgaggtccaggggaggccacccataaaggccaatgaagcacacagcccagcacgccagtcgcacaccagaaaggtacgacaacagccagaaggaaaaatcgagacaaggacaggcgacgcaaccgcgacacaagacaaaacaacgcacacgccagcgcgctgagcacgccccaaccgacacaaaaggcagcagagcccacaaaaccaccaagctatcaaagcaaaataaacgaaaacaacccacacacagcc

SEQ ID NO: 631993 - DNA, 132 bp, Homo sapiens
gctactctatgatgatccccccgctgtaccagttgcgatgggagccagggaagatggggtgctggaggagagctatgtggtgagccaatggagcacctatggacaatctgtgcgtctggcaggacgtgatga

SEQ ID NO: 631994 - DNA, 253 bp, Homo sapiens
  misc_feature (5)..(5): n is a, c, g, or t
  misc_feature (7)..(7): n is a, c, g, or t
  misc_feature (9)..(10): n is a, c, g, or t
  misc_feature (16)..(17): n is a, c, g, or t
  misc_feature (19)..(20): n is a, c, g, or t
  misc_feature (23)..(25): n is a, c, g, or t
  misc_feature (28)..(29): n is a, c, g, or t
  misc_feature (109)..(109): n is a, c, g, or t
  misc_feature (184)..(184): n is a, c, g, or t
ggcgntncnngacagnnannaannnacnnttgtgcaggtcgggggagtgtaaaatgatactgctgtgtggaaaacagttgggcatttccccaaaatttaaaaatagaantgacatatgacccaacaattccacttcaaggtatatactcacaataattgaaagcaaggtcttggagagagattngtataaccactttcaaagtagctagaccataaaagtgtccagctgcagatgaatcaatcctgcttatct

SEQ ID NO: 631995 - DNA, 173 bp, Homo sapiens
tagaatgagcgggaccagatatcagagaaccccggaagtctgtggggttctcgagagcctgcttgagaccaccccaggctgggggtgccaccccctgccatctgcctccatcttcacgccgcatcctccctgcctgcgctgggaggccgagctgggaggacgggtggggagaa

SEQ ID NO: 631996 - DNA, 223 bp, Homo sapiens
gcttatttcggtgtcttagggtctcgagcctgtctggcctagtctgggctcataaattcttgtcgactgcctgtgccgatgcacctacttctgtgcctgcatctgggcacagagtacacttgactgtgtcaaagtaatccactcccaataggccaccagtggtcactaagcatttctgggctagaagagcgagggcccagatatccatacaggacaaataaac

SEQ ID NO: 631997 - DNA, 272 bp, Homo sapiens
cctcttgtcatgactccctgattctctttctgggatgatgctgcttcagaacagggctttgggtctttcccatccgtttctcctttggcgtcttcttcagtctcttccatgtcatcctcatccttttcagggtcatctggatcctcccagtgaagcagacggttagggacttcagcaaggaaatgaccacagtcctgctgaatgttaaagtggacagccagactctgccggacagccaagctgtgataatactgctgaagggcccgagagta

SEQ ID NO: 631998 - DNA, 792 bp, Homo sapiens
  misc_feature (705)..(705): n is a, c, g, or t
  misc_feature (727)..(727): n is a, c, g, or t
agcggcattgcgcgcgacccggcggcgggacaggcttgctgcttcctcctcctcggctcaccattccagaccaaaattgaaaaaatggttgacctcacccaggtaatggatgatgaagtattcatggctttggcatcctatgcaacaattattctttcaaaaatgatgcttatgagtactgcaactgcattctatagatggacaagaaaggttttggccaatccagaagactgtgtagcattgtggcaaaggagaaaatgccaagaagtatcttcgaacagatgacagagtagaacgtgtacgcagagcccacctgaatgaccttgaaaatattattccatttctgggaatgtggcctcctgtattccttgagtggtcccgacccctctacagccatcctgcacttcagactatttgtcggagcacggatctaccacaccatgtgcatatttgacaccccttccccagccaaatagagcttggagtttttgtgggatatggagttactctttccatggcttacagtgttgctgaaaagtaaatttgtacctgtaaggaaaaatcatacaaatcagcatccagtgtggttttaaagaattctgtacttccaatttataagtgaatacttttctttagatttagggtaggaggggagcagaggaaatatgaactggggtaaacccatttgaatattagcattgcaanatcctggattcttgtttacatntggttagaatttcacatgtatcttaagttttgtccgagtaaggacttctataaatgggcaggacc

SEQ ID NO: 631999 - DNA, 921 bp, Homo sapiens
  misc_feature (834)..(834): n is a, c, g, or t
  misc_feature (856)..(856): n is a, c, g, or t
agcggcattgcgcgcgacccggcggcgggacaggcttgctgcttcctcctcctcggctcaccattccagaccaaaattgaaaaaatggttgacctcacccaggtaatggatgatgaagtattcatggctttggcatcctatgcaacaattattctttcaaaaatgatgcttatgagtactgcaactgcattctatagatggacaagaaaggttttggccaattctcgagtaagacgtagtagtgatgccatctatggacatagaaggacgatcaaatggcgcaaagtacatgtcactcgttccgaagcgaagatgaaccaagagtagcaaacgttgtaacgcacgtaggcccaaccgttgacactgaccgttggaaaacagtatctgattaccgatgtctgcgtatggacatgtgcgcctacctgataattccgttggtacgtgagtccacgagtccacgtcttacagacacaattccttgacaacgttcagaaggcgtatgttgtctgggaggacaccgggaatcgtacgctaacatctcaattgtcactattgtagacctagcgcccattgcccgaaggcgcagagatgatgagctctgtggaagtcttgttgtagcttgggatatggagttactctttccatggcttacagtgttgctgaaaagtaaatttgtacctgtaaggaaaaatcatacaaatcagcatccagtgtggttttaaagaattctgtacttccaatttataagtgaatacttttctttagatttagggtaggaggggagcagaggaaatatgaactggggtaaacccatttgaatattagcattgcaanatcctggattcttgtttacatntggttagaatttcacatgtatcttaagttttgtccgagtaaggacttctataaatgggcaggacc

SEQ ID NO: 632000 - DNA, 425 bp, Homo sapiens
gctctgtcagtatccagttgatttatattgatattgaattcaactatattgttactaatttctgcctgctagatctgtttctgatggagggtgctgatgtctcaaattgtgacagtggatccatctatttctccttccagttctgtttttgcgctacgtcctttgaaaatcagctgtcaggtgcatacacattaaggattgtcatctttttggaggattaactgttatgtcatgatgcagtaccattctttatccatcataactttctttctttgaagtctactttgtgtgaaatatagttactctttttttttttttgagacagagtttaactcttgttgcccaggctggagtgagccgagatcgcgccaatggcactccattcagcttgagtggcagaggtgagactcccatctcaaggtaaa

SEQ ID NO: 632001 - DNA, 220 bp, Homo sapiens
  misc_feature (220)..(220): n is a, c, g, or t
agcggtgtcatgatcagagtcaacagcagcactggatcctcttacaaatacaaattagcttttagggtttgcttatccagctgttagaggctagcggagattgtttattaggaggtgagtttcagttagccggatcattcacccactcagcttggtacaaacagatttctcagttaagagacaacaaaagctgtcaccacaaagacacaacaaagaccan

SEQ ID NO: 632002 - DNA, 1373 bp, Homo sapiens
  misc_feature (1373)..(1373): n is a, c, g, or t
gggacgccaggacctcacttcctcctctagccctgcctgtgtgcctcccagcacctggcccataccctgcagactggccccatggtctggtgcctgcgtggctataagcagttcagtgtggggatcaccttcatctgttgcgtggcatcctatgacgtgcacgtctgtgcgtaccatgcgagtggccgaggatccatatctgatgagtactgcctgtaatgagcgagtcttgactaaccaatttcgttccacatccgtacagagatttagccagactaggtggagagtagaatgaccatcgctggctcggcagaatgcatgtattgacaacagggggctgaatgcgtagagatgacttgggaccgcgtgacgaacttaaacatctggggtgtgtccggcgcacggacgggatcttggccgtatgggcatagggtagctcatgtgcggatggggtcggaacttgaccgggaccggccagtgatgcctccagtaggcgagtagaaactcgccgtgcacattgtgagtaggcttagtcttgtatctccacataggtgtggtcgtgggtgcatagcagcgtgtatcgcggataggaatatcatgtggcgccaacgagtaggactggataagggccctcgggaaatcagctcgagttgaatacgaacagtgaactgttgcggacatgtgccatgtgtaggtgactacctggcaccgcgaagactcgcaacatgaccatggacgtgaacgcggcagaccggagaggattctccatggagacggcgagacagaggacagccgtttgcctcccttggaggcacatccagtcagtagagggacaggacgttcccgagggacacacttgagaaggcacaactagcggaaacaaggggccgatgtccccgagggatccacacgtccaggggacaggaagcgagaggctccccgggacatgacaccacggagcggagcgcttgagcaatgaagaaagaaaacagtggggaaccaggagggagccccccacagagtgtgtgtcccatgtatgtcctacgaggagaaaggtattccgtcagggcctactgacacagtaacatacccatggtaagtaacctacacactgcgagagaagacggccagagaccgcgataagcacgagtagagacgccagctgtcacacaagacaagcgcgacatcgaaacagtcgtatcgcaacaaaactagctcagcagtcgaactatgtaagttaagctccactgctcgtgtcgttctagcgtttatcgtgtacttacttcagtcatcgaacgtatagtacagaaacacactctcgacagagcaacaagacgagcgaacacacaaagatcaacaagaaagagaacgcn

SEQ ID NO: 632003 - DNA, 940 bp, Homo sapiens
  misc_feature (853)..(853): n is a, c, g, or t
  misc_feature (875)..(875): n is a, c, g, or t
agcggcattgcgcgcgacccggcggcgggacaggcttgctgcttcctcctcctcggctcaccattccagaccaaaattgaaaaaatggttgacctcacccaggtaatggatgatgaagtattcatggctttggcatcctatgcaacaattattctttcaaaaatgatgcttatgagtactgcaactgcattctatagatggacaagaaaggttttggccaatccagaagactgtgtagcattgtggcaaaggagaaaatgccaagaagtatcttcgaacagatgacagagtagaacgtgtacgcagtcatcgtaaagctgttacgattagcatattgacacggcagagccagaatggggctacaaactgaagtgaaaagtatgttacccgtgtgcaacaaatcgtgaacgtttcatacatacacatatggaacaattaactaaagaccttcaagagcccacctgaatgaccttgaaaatattattccatttctgggaatgtggcctcctgtattccttgagtggtcccgacccctctacagccatcctgcacttcagactatttgtcggagcacggatctaccacaccatgtgcatatttgacaccccttccccagccaaatagagcttggagtttttgtgggatatggagttactctttccatggcttacagtgttgctgaaaagtaaatttgtacctgtaaggaaaaatcatacaaatcagcatccagtgtggttttaaagaattctgtacttccaatttataagtgaatacttttctttagatttagggtaggaggggagcagaggaaatatgaactggggtaaacccatttgaatattagcattgcaanatcctggattcttgtttacatntggttagaatttcacatgtatcttaagttttgtccgagtaaggacttctataaatgggcaggacc

SEQ ID NO: 632004 - DNA, 228 bp, Homo sapiens
agacagtttattccccttctgtttctctctaactcggcttataccaggggtgtgtttccactagatgctcacactattgaggttgctaatatgcattagagatttgggagtaaagaattccggagactgtgtgtggagtgtcctggctcagtatgttcaacggagtacattcgaggaccatgtgttagagaatcgtggtactgtgtgcccttgatggagaccgatttg

SEQ ID NO: 632005 - DNA, 134 bp, Homo sapiens
  misc_feature (38)..(38): n is a, c, g, or t
aggatccccgagtgtcttcaagaaacgggacgactatntggaatggccagagtattttatggctgtggccttcttatcagtcacagagaagcaaagatccaaattcccaggtcggcgcctgcatcgctgagatt

SEQ ID NO: 632006 - DNA, 340 bp, Homo sapiens
  misc_feature (28)..(28): n is a, c, g, or t
  misc_feature (60)..(60): n is a, c, g, or t
  misc_feature (174)..(174): n is a, c, g, or t
  misc_feature (276)..(276): n is a, c, g, or t
gcctgcgggcagccgtgccgagaatagnccccagcacccgcagctacccaacggactcgntatacgtgggggacctccaccccgacgtgactgaggcgatgctctacgagaagttcagcccggcaggcgcatcctctccatacggatcttcaggggcttgatcaccagcggctnctacaactacgcgtatgtgaacttccagcatacgaaggacgttggagatgctctggacaccatgagttttgatgttataaagggcaagccagtacgattatntggtctcagcgtgatccatgaattcgaaaaagttggagtgggcaacatattcgttaaaaatgtt

SEQ ID NO: 632007 - DNA, 1009 bp, Homo sapiens
  misc_feature (910)..(910): n is a, c, g, or t
gtaaagcctctggctgacctgcggccttctctgccttctcgactcagaactggtggactgcgtgtggtctggatccgttatcccccagtgaaatgccctggcagtggtttgcgctcatttattgggatgaacgataagcgctacagttcgtctctgaaagacaggctctccatcatgaatgacagccccagaatcaggtggtccgcttacaagtgacttaaacattgaaacttgttggacacagatcatcatatttaacttgtgcgtagcacaactctctggtacgtagtaggacttcgtttgcctcgctgtggcgtgcagtggactcctctgcgtcagctggaactgctcttcagaacttatcaatcgacaggggtcgccatacggtactatcccgctcgtgcgcaccccttcgcttccaaaggattcacctgctgttgtgtcaccatatggcctagtactgatcgtggctcagtggagctatttgccctcgaaactcggtgcacggtgtcttggcaaccgcacgtcgcggcgtggaagccagtcgatcgttgggacaacttttcccgcatgttcctcacgaggtcctcaaggacttcttagtccctcagagaatgtgttggaccgtgcacctgtcacctaggttggggtgaccgagacctaccatctgctatgtttgaattcacccatcatacctgacacccaaggtggactggaatgttgatgccgcaactttgtgttaaaagtgacacatgacgcaccgcggatccaatgaactgatatcctggagggcaagcggtcagtctttctcttccggccaaattccgaggagccctcttggattcccgtactccctaccgttcaatctgtggtggacgttggcacgaaaagcttttgccagttcactctntatggtcgctggtgcagcgtggttaggcacgaacagattgcggggcgaacaccccggttgtacatccttcttcccacgtgtatgcggaaggtttaatcc

SEQ ID NO: 632008 - DNA, 506 bp, Homo sapiens
ctgtcgcgcctggcgctttcgctttcacgcgcgctaccgccgtggtgaagctgacccagctgtgcgacccatcgtcattcctgcgggatacccttgaccagaaactgcggtgcgcgactggcgagcatgaggtgggcctgcacggatgctgtttgcgcgctggaagcgaggccgttggcaagcagatgctcctccagctccttgaccaccctcgaagccgatttatggctgttgtgggctgaaaccagggggtagccctcaatacgtgtttcaccgtgggcttggtcgtatttccccacgcccaaggccgccagcagccagtcggtgacactgcctttgactgagcgagcctcgaatgtggcttcaattgccttgcccagtgcggtgcctctgtctgaacttatcaagctgctgatcaactgccgcggattcagctgttcctgcgcggagatcgatctgccgttgagcagataatccaggacatgcttgaagggttttaatcggac

SEQ ID NO: 632009 - DNA, 145 bp, Homo sapiens
aattcaagcttctaacgatgtacggggacatgctgaggatgtaaggtaatacatagtatacatactgtatcacctttcgaaaatccaagaaaatcctgaattcttgaaacatattgtccacatcataaaacttgcacagaaaaaa

SEQ ID NO: 632010 - DNA, 346 bp, Homo sapiens
tctagaggcaccctgatattcgtgtccatcgttaaaaaatcaggaaagaacagatgctagagaggatgtggagaaataggacagcttatacacagttggtgggaatataaattacttcaaccattggggaagacagtgtgacaattcctcaaggatctacaaccagaaatatcatttgacccagcaatcccattactgggtatatacccccaaaattataaatcattctaatataaagacacatgcacctgtctgtttattacggcactgttcacaacagcaaagacttggaaccaaaccaaatgccctcctttctttatcgcctgggacacgaatgttcagggta

SEQ ID NO: 632011 - DNA, 930 bp, Homo sapiens
  misc_feature (56)..(56): n is a, c, g, or t
  misc_feature (135)..(135): n is a, c, g, or t
  misc_feature (141)..(141): n is a, c, g, or t
  misc_feature (155)..(159): n is a, c, g, or t
  misc_feature (166)..(167): n is a, c, g, or t
  misc_feature (181)..(181): n is a, c, g, or t
  misc_feature (184)..(184): n is a, c, g, or t
  misc_feature (187)..(187): n is a, c, g, or t
  misc_feature (189)..(190): n is a, c, g, or t
  misc_feature (193)..(193): n is a, c, g, or t
  misc_feature (213)..(213): n is a, c, g, or t
  misc_feature (220)..(222): n is a, c, g, or t
  misc_feature (228)..(228): n is a, c, g, or t
  misc_feature (233)..(233): n is a, c, g, or t
  misc_feature (237)..(238): n is a, c, g, or t
  misc_feature (240)..(243): n is a, c, g, or t
  misc_feature (252)..(253): n is a, c, g, or t
  misc_feature (282)..(283): n is a, c, g, or t
  misc_feature (285)..(286): n is a, c, g, or t
  misc_feature (288)..(290): n is a, c, g, or t
  misc_feature (293)..(293): n is a, c, g, or t
  misc_feature (297)..(297): n is a, c, g, or t
  misc_feature (306)..(306): n is a, c, g, or t
  misc_feature (308)..(309): n is a, c, g, or t
  misc_feature (314)..(314): n is a, c, g, or t
  misc_feature (329)..(330): n is a, c, g, or t
  misc_feature (334)..(334): n is a, c, g, or t
  misc_feature (337)..(344): n is a, c, g, or t
  misc_feature (373)..(373): n is a, c, g, or t
  misc_feature (381)..(381): n is a, c, g, or t
  misc_feature (386)..(387): n is a, c, g, or t
  misc_feature (389)..(390): n is a, c, g, or t
  misc_feature (394)..(394): n is a, c, g, or t
  misc_feature (396)..(396): n is a, c, g, or t
  misc_feature (399)..(399): n is a, c, g, or t
  misc_feature (402)..(402): n is a, c, g, or t
  misc_feature (404)..(406): n is a, c, g, or t
  misc_feature (408)..(409): n is a, c, g, or t
  misc_feature (412)..(412): n is a, c, g, or t
  misc_feature (418)..(418): n is a, c, g, or t
  misc_feature (423)..(423): n is a, c, g, or t
  misc_feature (425)..(425): n is a, c, g, or t
  misc_feature (427)..(427): n is a, c, g, or t
  misc_feature (431)..(431): n is a, c, g, or t
  misc_feature (435)..(436): n is a, c, g, or t
  misc_feature (439)..(439): n is a, c, g, or t
  misc_feature (441)..(441): n is a, c, g, or t
  misc_feature (444)..(444): n is a, c, g, or t
  misc_feature (447)..(448): n is a, c, g, or t
  misc_feature (451)..(451): n is a, c, g, or t
  misc_feature (458)..(458): n is a, c, g, or t
  misc_feature (465)..(465): n is a, c, g, or t
  misc_feature (471)..(471): n is a, c, g, or t
  misc_feature (476)..(476): n is a, c, g, or t
  misc_feature (483)..(483): n is a, c, g, or t
  misc_feature (485)..(485): n is a, c, g, or t
  misc_feature (496)..(496): n is a, c, g, or t
  misc_feature (504)..(504): n is a, c, g, or t
  misc_feature (506)..(506): n is a, c, g, or t
  misc_feature (512)..(512): n is a, c, g, or t
  misc_feature (514)..(514): n is a, c, g, or t
  misc_feature (519)..(519): n is a, c, g, or t
  misc_feature (521)..(521): n is a, c, g, or t
  misc_feature (523)..(523): n is a, c, g, or t
  misc_feature (526)..(528): n is a, c, g, or t
  misc_feature (531)..(536): n is a, c, g, or t
  misc_feature (540)..(540): n is a, c, g, or t
  misc_feature (543)..(543): n is a, c, g, or t
  misc_feature (556)..(556): n is a, c, g, or t
  misc_feature (559)..(559): n is a, c, g, or t
  misc_feature (561)..(561): n is a, c, g, or t
  misc_feature (564)..(564): n is a, c, g, or t
  misc_feature (569)..(569): n is a, c, g, or t
  misc_feature (587)..(587): n is a, c, g, or t
  misc_feature (721)..(721): n is a, c, g, or t
gttgcattgtacacttttaattgcatgggtagttttaaataaatggagaaagcacntttcagaagctacactagcaggaaaaaattccatcaagcatttacatagtaaatttctataatttcacaaaagattctngatctnacttgaagtatacnnnnnggaaagnnccccctcagcaggngtnccngnngcntacagaagcaaactaaaggncctaaannngggggnaagcnaggnngnnnnggggggggnngagaaatgataaagaaccattcataaatnngnngnnnacntcangagatttgngnnatganccttacataataggnntttnggnnnnnnnnaccacccttttaagataaaagtacaatcntaaaagcngtagnncnnaatnanagnaanannncnnacntccagnaatangncncaanaccnnggncngcnggnngtnaaaaganaataccngggggncatcnatgagancngaacaaatagnggaattcncnaggacngnatacncngnatnnnggnnnnnngaangangtacagacaggcntcncngcnatccnccaggcagtgtaatagtnaaggaaaagggcaacagtattggatcattccttagacactaatcagctggggaaagagttcattggcaaaagtgtcctcccaagaatggtttacaccaagcagagaggacatgtcactgaatggggaaaggganccccgtatccacagtcactgtaagcatccagtaggcaggaagatggctttgggcagtggctggatgaaagcagatttgagatacccagctccggaacgaggtcatcttctacaggttcttccttcactgagacaatgaattcagggtgatcattctctgaggggctgagaggtgcttcctcgattttcactaccacattagcttggctc

SEQ ID NO: 632012 - DNA, 269 bp, Homo sapiens
gcaggcccaggtgcgcctttctcagcatcttcccgcgtgaggctggtgggggcgggatggggggaagaggacgaacgcctagcgcccatgggtattggcctccagtgggtaggtgtggccatggatggagtgcggagagacttgaccttgggatggcctgacttactgaccgcagtgggcagctggactgggacggggaactgtggcaatgccctgggactggtgccgtgtgtggcgaagtgctggtgggcgtggcctgggtgctggag

SEQ ID NO: 632013 - DNA, 329 bp, Homo sapiens
catgcaggtgagccacaggtttgtctagcataccactatacacacacacgcacacacatgcgcactctcacatagctacacacacacaagtagtgcaattgagagctttgggccgtgacgctagaagcataggtatgttgttgtcgattgtggctcggtggcgctgggcgatacattcagcgatccacacgatgttgcgacactcctgctccttgagcttcacgaaggcatagaagacaccaaagtggaactggttcaggaaggccaacttgttcagctttacctcgtgctcaaagaatcggtcctccagcgtcttgtccggggttgtt

SEQ ID NO: 632014 - DNA, 143 bp, Homo sapiens
ctcatgcctcacatgattcaattccctcccacattacatggaaattcaagatgagatgtgggtggggaatacagccaaatcatatcaatttctaagcaaccatatttggatatttactctggaaatgtagttacaaatgagca

SEQ ID NO: 632015 - DNA, 703 bp, Homo sapiens
agcgggggagtttggtgatctatagcagccaaaggcttgtccctgacttcatatggctgctcctggctgagcgactgagtcgtccgtgatggaacacatgaggctaggcttttccgagatcgtctcagcgatggccgtttcgggtcgctggtatcgggggttgtgctcggtttgcaggaagcctgggtgcaggttcggcagaccatgtgaacacagctccgagctcggtgagcgaaatcgtgaagtggacccatgtggaaaatgaagctgtctgcccgagaattcagcgaaggcggaagccccggaacctggagctgtgtatctgtagccaggaaagagcggggctggcggacggtgtttgcctcccgtgagttctggcacaggttgcgagttatcaggactcagtcatcatgtataagcacttgtggagcatcagtaatggcaaggtttgtggatttcggcctccgactcgtgagatgggctattgacaagcagcatttatagtaccagaaagtgtggtggcgttgtgagagtataggaggagtgctggcacgagagatgcttagaggcgggaatcaagtttcatggtgctaccagagcaatcccgtgggaggcagctcgagattcgatgaaactgactacaaagtgccatgacgtgaaggtggtggtggttctacggggaacctcagagaatctatgactg

SEQ ID NO: 632016 - DNA, 370 bp, Homo sapiens
acccgtcgcgcacgtgtatcccgtactggaaggcctatacgggcaggtggtgggtgtgtgtggctgggtctgtgcttgctgcgtgtgacactcgcgccatcgattggtatatggttagctgtgtaggttagtaggcctagtatgagcgagcgttatggcgtggacgtgaaatcacatggctaggccggcaggtcattaggggggctgcagcagggccctgttaggggtcatgcggctgggttttcactcatctgggtcttacaatacaaatttaaatgcaaataagtgagagtggctatgcctgctttgctttgtgtgtgattttaggtcagcaaaacattcacatcttccacatagcagttggcatgta

SEQ ID NO: 632017 - DNA, 104 bp, Homo sapiens
cctgtgggtgtgtgcatgacgtgcgacgtgtgtgtaagtgtgtgggtgtgtgtgtgtggaactgtgtgacggggacgtgtgtacgtgttgttgaatgggacgtg

SEQ ID NO: 632018 - DNA, 554 bp, Homo sapiens
tatatcaagctagcagtgaatttagtagccaatagctaccagtactagggtagggaaatactaaaataatgatagatactagtgagagacatacaccaataaggtactgacatctacttctaagagaaccacacaaataaacaaaaccataaaattatatctaaatatgaaaaaagttctcacaagctaacaatgttataagtttacataagaacacttgaagcaatacaaacatcatgccacatgaaccaagttactgacaagatcacttgttgatagaggtccttaaataaatccatatgcctgaagtacaagatagactccccttacactatactgattgaaaaatacagtcacatctgcccatgggggagaactgctatatgaaccacttgaccagtgtaacaaaacaactagtagatcagaaaaattttatcaaacaacatttatcaggcattgactgtgatcatctatatacgacaaccaaagaggtaaagcccttaggatctatgtcccagcataactgtctggagaacgttccaggttgcagccag

SEQ ID NO: 632019 - DNA, 302 bp, Homo sapiens
gtacaagatgagttactatcgctttggacaggtttacacagaagccaagcgtcctccaggctttgaccgtgtccgaaatgctgatattgggaataaagactttgagcttgatgtcccggaggaagcatataccacagaacattggctgggcaggatatacacggtgaaggacctggataatcgaggcttgtgaaggacatatatgtgacgtgcagctctgatatgctttgcactgagcacatcacatttaggacgttgaagatattttttttttttttttttaatatgcagtttgtaagaac

SEQ ID NO: 632020 - DNA, 503 bp, Homo sapiens
cggtctttaaatctgggcagcatttgcttgtatttgggatggtgccaaaggccagcgtcgggatattgacatcaggaaatcctgattctggccgtcatcgccttccagaaggcgaggcccctcgacccccatcaccttcaacgcaaagccgcgcggctggggaatggagtcgggccgcaccccgccgggcgccgaggacagccgcaccaccacatcatgggttccgggccgcgcaaagatgccttgcgccagatgcgcgggcagatcatcgcggatggtgagccggccgaccagaacgccgtggcttttggcatgggcgtcacggacggcgtggcggtggcgctcgaactcctccatgttggcctcggccatcatggcggcgacctcgtcgatcagttcggcctcgttttcgacgggcacttcgatttctggcgcgtagcgcacaggacgtgtcatcgcatttcctttcgatggacgggcagcctcgggccggccctgaggat

SEQ ID NO: 632021 - DNA, 862 bp, Homo sapiens
  misc_feature (338)..(338): n is a, c, g, or t
  misc_feature (372)..(372): n is a, c, g, or t
  misc_feature (376)..(376): n is a, c, g, or t
  misc_feature (396)..(396): n is a, c, g, or t
  misc_feature (467)..(467): n is a, c, g, or t
  misc_feature (567)..(567): n is a, c, g, or t
  misc_feature (569)..(569): n is a, c, g, or t
  misc_feature (571)..(571): n is a, c, g, or t
  misc_feature (582)..(582): n is a, c, g, or t
  misc_feature (591)..(591): n is a, c, g, or t
  misc_feature (596)..(596): n is a, c, g, or t
  misc_feature (605)..(605): n is a, c, g, or t
  misc_feature (614)..(614): n is a, c, g, or t
  misc_feature (626)..(626): n is a, c, g, or t
  misc_feature (638)..(639): n is a, c, g, or t
  misc_feature (643)..(643): n is a, c, g, or t
ggttccgcccccccgcgcatgggcaggtaggctcggaccggcccgcggagctgctgcagtccttcgcgccctcctcgccctccccaccgacatcatgctccagttcctgcttggatttacactgggcaacgtggttggaatgtatctggctcagaactatgatataccaaacctggctaaaaaacttgaagaaattaaaaaggacttggatgccaagaagaaaccccctagtgcatgagactgcctccagcactggccttcaggatatactgattctactgctctttgagggcctcgtttactatctgaaccaaaagctttggcttcgtctccagccntcagcacttctcttctttgctagacccgtgtgtntatntgctttaacagcaagcaaanatggggccccaatttggagaactacccgacatttccaacatactcacctcttcccataatccctttccaanctgcatgggaggttctaagactggcacattatggtgctagattagtaaaccatgacttttcagatgagtagtgtcttcttatcgtcgcgatttactaccntntntccaacagaanaatgatganttgtntagtggtcngatacactnatagtgcttcanagttagcattannatgngtacttgtaactttgtctcaatatgtgctggcgttataaaatagatcaaagcagttctgggatatcctaatgcggggagcagctgagtggaataccaaaggctggtacagacaacgttgaatcgtggaggggtggaaacaaagggtggccgaaagttagggggtggaggtgggagttccaaacgagcaggatgagagggacaaatgtggacacacgtgg

SEQ ID NO: 632022 - DNA, 140 bp, Homo sapiens
aagcagttatacagaccacgatttaaaatatttcccctagtttattgggggggataggaagaaagatttgttactgtatttgtttaactacataaaattagatcaataaatgtcagcattggcctcgtgtgtacaaaccc

SEQ ID NO: 632023 - DNA, 888 bp, Homo sapiens
tcaaccatatatggtctagactatgtagactaacctacggctcctccaggtgctgacagagtattcgagccgaacaattatattgactaacactggtcatgattgtgccaaacacataatttgaatcaacaacaaaacactcgcacgaggcctaattattaagcatcatccctctacatatctttttaacccaagagtcaagaacaacctatttaagacgtgttcccgcgaaccattttcctccgaaacgcgcctaacaagcccccttcctaagtaggtaactacctgacttcatacaccctcacaagtcgatggcaagccgaagcggccgagattatccagtgagaggcactatcaacgacaaaaaaagtcggacctctctatagtaagtctcccgtacaaatctccttaattataacacttcaccgagggaaagaactaatcatattttatatcttcttcgaaaccagcacttatccccaccttggtatacatcacccgatgagggcaaccagccagaaacgcctgaacgcaggcaacatacttcctattctacaccctagtaggctccttcccctacttcatcgcactaatttacacttcacaacaccctaggtcaactaaaaattctaatacgtcactctcactgcccaagaattattaaatcctgaggcaacaattaatatgattaggcttacacaataacctttatagtaaaagatacttctttacggattcagttatgaattccctatagccatgttgaagccccatcggttggtaaagaatggcggagagacttaaatagggaatggaaataagggcaaattttttagcccttgaaaagaatgtacctttttaaatcatggggaaaaaagcgctggtgaa

SEQ ID NO: 632024 - DNA, 151 bp, Homo sapiens
cggcgttctttgtctgtcagtggggacgtcatcagcatgctggaagccattaatgaactaattcgtttgaccacatatataccaagcccctagtcttagagatagcctctgagacagagagccaagctaatgtggtcaaaacgaattagtt

SEQ ID NO: 632025 - DNA, 94 bp, Homo sapiens
gcggccgcctactactactactactgctcgaattcaagcttctaacgatgtacggggacatgtatttaaaacttggaactagaaaaacggctgt

SEQ ID NO: 632026 - DNA, 100 bp, Homo sapiens
ggcctgggatacccagtagggtatataaaattaccctgacggggtcgggtttacgacatatgccggcggttctgtcatctggggctatggtagatttagt

SEQ ID NO: 632027 - DNA, 406 bp, Homo sapiens
gctggctacggagggctgtcttttaatgcagatgaaaccctggatgggtaggggctcccagaaagaataaactttcttttctttgtatttgagatggagtttccctcctgttgcccaagctgaagtacagtggcatgatttcagctcaatgcagccacccctcctgagttcaagcgattctcctgcttcaccctcccaagcagctggtattacaggcgcatgccaccaagctcggttacttttttgtatttttagtggaagacagtttcaccacgttagccaggctggtcttgaactcctgacctcaggtgatccggctgcctcggcctcccaaagtgctgggattacaggcatgagccaccgtgccaggcctttaaaaacattttttctgagaccgagtcttgcc

SEQ ID NO: 632028 - DNA, 360 bp, Homo sapiens
  misc_feature (179)..(179): n is a, c, g, or t
  misc_feature (329)..(329): n is a, c, g, or t
atgctgttggcagtaacttcctagttaaatacaggcaatacaatacgagatgtgagtccaaatcagaatacctggaattctgagtaacctagaaattaagatggaggaggtggggagcagaccggattttcttaaaaagtctaacgttacaatcttgtaatttgctactttataataanatgcaactcatcctagcgggtgggacgccccaatgtgcagggtcaaggataataaactacagtgaagtagtctggaggagagaggctgtttaaatgcctgtaagcgctaaaactacaaggctattgtgaatcttgctgcaataaacatgngggtgcaggtgtccctttgatacactgaaaa

SEQ ID NO: 632029 - DNA, 105 bp, Homo sapiens
ggatggatgggattaatggcaggttggggcacagcaagagaaatgaccaggccaggcacggggctcacaccttgtcatcccagcacctttgggaggccgaggcag

SEQ ID NO: 632030 - DNA, 520 bp, Homo sapiens
  misc_feature (9)..(9): n is a, c, g, or t
cagcatggnacagatcaagaatctaaaactgaaaatgatactggtatcagttcatttgtctgctgcttataacagagtacctgaaactgggtaatttacaaataaaagaaatttatttcttacagttatgaaggccgagaggtttcacgttgagaacccatatctagtgagaattttctttctggtggggactctctgaagagtcctgaggaggtgcaggatgtcacatgatgaggggactgagtgtgctaatgtactggttcaggtatctggtcttcttataaagccaccagttccactcacatgataacccattaatccattaacccatcaatccattcatccataaatggattagtccatgtataaggtctctgccctatgacccagttacctatcaatagccttacctttcaatactgccatattaagggtcgttccaccatgtgaaatcgggggggcatatccaaaccatagcacacactgcctctccttgaggaaaggcctagagtcagttact

SEQ ID NO: 632031 - DNA, 1299 bp, Homo sapiens
  misc_feature (595)..(595): n is a, c, g, or t
  misc_feature (1299)..(1299): n is a, c, g, or t
gatgacgaacacaaaggggaacgaggagagggcgagccgagtatagtgtgtctctaggcctttcgagacacagacatggacgttgttccatgtaggcgcagcactatagtgcgatagtctactataggataacaggtgatacttgtaggacactcaacgggaactgggtacttggtcacaaaatggaatgcccgcactagaggtgttagccactggcaacagactcggtaaggagtctcatcaactgttcaccctcaggctactagctagttaggctacttagttggtacaagctaggaacagaagttcaatggggcaaggattgtcttgtgcacgaatgacgaagttcatactgtagtcagtttattagaagcaactacttaaatgcatcgtacgtaaagggacgcccgtaggaaatcaggcgtattcgcgttggaaagaactgctgttggcaagggggataacacttggatccaggaatagatacgcaatagcagagtccgaaaggaggacaagggtcacctgggtggttctaaacctaaaaatgcgaccaagcactgacatcccatcgctcatgaaggacacgctacgactntgtccgttgggagacacccaaatgcgcgtgcaccaggagcgctaggatgcgtatgcctgggagacccttatttgccactgaatcgagatttcgatcggccattaaataacggtggtttgaattagatccacacaaaaattcatacggtggagcctctggggggcttaacggaaaggaaacagacaagataagagcaaacaaaagatacacccaaggaggagcgctctatcaaaagggggcgcgcgcgctggggagaagagaccaaggagaggggaagaccagggcagactgggcgggcgcaccttccgtgggctaccgtacaatcgcgaatggcccggcggggtacgccgcccccgttctggtctaaaggggccacgaacacgggggcgagaagatcccaagcggcgcagtggtgcgcacccttaataagtagggggagatcgtcctgccgactcaagatttggcaacccacaaaggagccgcaacggcgtggaacaagccgggcgtcccaagcaaagacacgccccagggggcgcacaacaagcagactttccgcgtggaaccacggcgctggggcccaaagggccagtgcaagggacagctctgggatgcggaggaacccggggggcccaagggggcatcccgacgcgagaggcgggacgcacaagacagatgtcaggaggaggccaccaagacaacaacgn

SEQ ID NO: 632032 - DNA, 514 bp, Homo sapiens
  misc_feature (415)..(415): n is a, c, g, or t
taaaggtacaattcccattataattttcctcccacgaaaatagcctgtcttgcagtctttaaaaatctccagctccttcacttggggcttgggtggggggcacgtgggggcagcacccgccaggctctaaactcggggtgtggggggtgtctcggctcctttggcgggcattcacgaagactcagatctccgtgacatacttgtgcgtgttgaattgtgcacaacctcacacgagtatgtgtagctctcacattacagcttggggaagcacataggcattcgaagaacgcctcgcttcagaaaattgtgtctcccgtgacgtgcgtggcggccctccaccatagtgtttctcgaatgtgacgacatttctctttaagtgggccttgttccctgttgggcacgctctcgggcccangttaggtgcacgcgaaaataggcgtgcaccgtgtggccgccggccccctttgtgggcaccagacccattgggtccctctctttctctgtggctcatcct

SEQ ID NO: 632033 - DNA, 200 bp, Homo sapiens
acccagtttttcccccccccccttacccccctggggtaggtttcccccaggggtggcctcagtttttcctcaacagggctgggggcagccctttccctgcctagttcccgcctgagggccagcccccccccccgccttccgccccctgttcaggtttcctcccccccccagtgaaataaagcatccccccccgccgttta

SEQ ID NO: 632034 - DNA, 177 bp, Homo sapiens
gttcactttctacaccagccatccacatggtgctgacagagcatgagccttttaagcgcagtgcagactcagaattgaaggccttggttgtgcatggccctgaatgagcagcgtctggtgtcctgggtgaacctcatctgcagcaacaggatgaggactttgagaagaagattccaa

SEQ ID NO: 632035 - DNA, 343 bp, Homo sapiens
tcctgtttggagggacccagtccctagggcccaagactgggtgggaaagggggagtctcccggggccccaggcttattcaaaactggggtttttaaagtttcctttaccccgcccctgttgaacctttaaataatctaacctgggcatcaagctgttctccctctctcttttttttaattttattattattattttggccacatgtccctttctaacaaagtttatcggggctattaaagtgttttatttccccattcatattactcttgtatcgagtccctgaggtttaaggccacttagatcaaagttttaaaaaagtaaaaatatttccggttttggcca

SEQ ID NO: 632036 - DNA, 132 bp, Homo sapiens
ccaaggttgaaattaaccccccccaaaggggaaaaaaagggggggtcccccgggggggggggcggtttaaaaaaaggggatcccccggggggcaggaatttgggtttttaaaaaaaaaaaaccccaacaaca

SEQ ID NO: 632037 - DNA, 238 bp, Homo sapiens
gaggatctctaatatgctgtctcaacacagaataacccaccgcgaggacgttcaaatgcacccatcacagcccttattgaagtagaagtgatggatgaaaccaagtgctgctgttttttccaaacgaaggaaaaggaaaaccatacagggccacaaatgattttggacaccagaacagaatcctggggagttatttaacattttcatcttgctgtctttgttgatttaaattcatttt

SEQ ID NO: 632038 - DNA, 450 bp, Homo sapiens
  misc_feature (20)..(20): n is a, c, g, or t
  misc_feature (42)..(42): n is a, c, g, or t
  misc_feature (154)..(154): n is a, c, g, or t
  misc_feature (183)..(183): n is a, c, g, or t
  misc_feature (265)..(265): n is a, c, g, or t
  misc_feature (293)..(293): n is a, c, g, or t
  misc_feature (322)..(322): n is a, c, g, or t
gagtgaaaagggacagagangtatgtacaaccaacagtgccncccataagtccctgcaaaaaaacttttctgtcatatacccccggttatattcagtgtcaagtttgccatggatggatggctcagagattgaacttagtatacaacacatctnctctatagaatgtggccacatctgtagtncagtgcttctgcacttcctttacacatactaacactgccccagtttgtttgaaaaaaatcagccgccatcagtatcactggnagttatatatgatgtatgcccttattgnctcaagacagatcctgtggactggatttntccatgtactttgtgccaggaactatgggttgttggcataccaatgctctgagtcttaaaaatactgatttttaaaattgctatctggcagtatataagaaactctttgatttactgcataaaaaaaa

SEQ ID NO: 632039 - DNA, 683 bp, Homo sapiens
cactttgggaggccaaggcaggcatatcacctgaggtcaggagttcgagaccaacctggctaacatggtgaaaccccatttctactaaaaatacaaaaaattagctgggtgtggtggtacattcctgtaatcccagttactcgggaggctgaggcaggagaatcacttgagcctgggaggtggaggttgcggtgagctgagatcacaccactgtattccagcctgggtgactgagactctaactgaaaaaaaaaaaaaaaaaaaaattgattgctgtgcctcattacaaatgcatatgatgtttgaaaaaaaaaaaaaaaaaaaaaaaaaaaaaaaaaaataaaaaaaaaaaaaaaaaaaaaaaaaaaaaaaaaaaaaaaaaataaaaaaaaaaaaaaattataattaaaaacaaaaaaaaaatgggaaaaaaaataaaaaaaaaaaaaaaaaaaaagttttggcccctttggcccaaaggtttttataatttggaaatttttaatatttggcccaaattggggtccttttggcaaaattccccttttggggggtgttttaaacaaaaagggcccggttttaaaaaggtggatttgggaaaaccttgggttcccaaataaaaaccttggggaaaccctttttcgcagggggggattttaagggcgcccacaattgcgtttttc

SEQ ID NO: 632040 - DNA, 365 bp, Homo sapiens
ggatctaatatagtcataagagacattgtgacctcctccctgctctcttgaaccactcattctgggagaagtcagctgccatgtcatgaagctactcagggaggtccatggagaggtccacatggcaaggaactgaggcctcctgccagtagccagcaccatcttgctggccatgtgagcgtgccatcttagatgcagatcatacggccccagtcaagccttcaaatgactgcatccctacttgacattttgactgtaacctcatgagaaaccctaagccagaacaccagctaagccactccccaattcctcatcaagagaaactgagataataaatgtttattattgttttaagctaaaaaaaa

SEQ ID NO: 632041 - DNA, 120 bp, Homo sapiens
tttactctgacatatttatatgcacataaattaggagtgctctgacccctgcccgtggagccaagcactgagcagggaggtgaacgccagtccagagagaaggtgctggagcccctgctc

SEQ ID NO: 632042 - DNA, 127 bp, Homo sapiens
ttatcaggacagcattctcaatcaatccaacagtcatattcggttgcagtcttcatacacactacagctattgttagtgttgcctgcggacatcggctggccctctgtccatgatgatgctatgcgg

SEQ ID NO: 632043 - DNA, 773 bp, Homo sapiens
  misc_feature (579)..(579): n is a, c, g, or t
gagatgcctttgaaaaagaagaaacctttgccctgagctctacaaaaacccttgaagaagctgtcaacaacatcatcacatttcttggtatgcagccatgtgagaggtcagataaagtccccgagaataagaactcccactccctctatctagcaggtgtatacagaggtggctatgacttattggtgcggtccaggctggccctagctgatggagtgaccatgcaggtgactgtgagaagcaaagagagaacgcctgtggatgttatcttggcttctgtgggataagttcttgctgggaagggtgatgttgctatgccctccctattggtggtttttaggctagtggcatgatcttccaagaatcacacataaagattaataatgatgactttgaagaagcaaatccaagtgtttggccctgcgccagcagatcaaacatctgtctgtctgtctgtctttgagcatgagctttagagtttcttccctcatctcatgtctcactcactcagcctcggtgcgacaatgcagctttgagtgggcttgaaaatcagatactacttatgctattctacagctngcttagcttcattatatgcttctatttaatgtggtgaaaaactcttggcaatggtggaaaattttatcccagaagggtggagggggagggggaagcggaatccatttttgtcacaggttgttttattattgaaaataactcctctttccgtttcaagtggcttactgaattttaatttaaaaaggatttaattt

SEQ ID NO: 632044 - DNA, 272 bp, Homo sapiens
  misc_feature (118)..(118): n is a, c, g, or t
  misc_feature (249)..(249): n is a, c, g, or t
ggcaccgcttccgtgagactgggcgcgaggcgaccaggccgagaagtgctggcggtacacgtcatcgagttgggcgaagtggtagctgccggtgatcttgtcagcgaacttgtagtcnacgccgccgaagttgaagtgcttgccggtagcgccgctgacaaaacggctgttcttgttgttgagggcgatctcttcgtagtcagtggaatcgcggtctttggctttatccaggcggccgccggtaaacancaggttcttgaattctttggagg

SEQ ID NO: 632045 - DNA, 1015 bp, Homo sapiens
gagctgagcatcagagtccgcacttgctccggcgatgggcagaatagcgcgagggagcgcggggctagcagaagcgagagccgagtcgcggtacccagccaggacccatagccctccccagctgcccagggaagagccccagccatgtgaacaccaggtcctgtgctgcgacagtggaaaccatccgccgcagcgtaccctcgatgtccatccatcctctaactgaccgtggatgcgtgcgggcccatgcttgagaggcgtgaggagacctgcgctgccctcgcgtgttctactttcagaatgtgttgcggaaggaggtcctgccgtccatgcggaagatcgtcgccacctggatgctggatggtctgcgaggaatcagaagtgcgaggaggaggtcttcccgctggccatgaactatcctggaccgcttcctgtcgctggagcccgtgacaaagagccgctctgcagctgctgggggccacttgcatgttcgtggcctctaagatgaaggagaccatccccctgtacggccgagaagcttgtctatctacaccgatcaattccatccggcccgaggagctgctgctgaatggatctgctcctggtgaacaagcgtcacgtggacacctggcctgtaatggacccgcacgatttcatttgcaagcactttccctctccgataatgcccagaggcggaggagaactaaatgggatcatccgaaaacacgcgcagaccttcgtatgcctctgtgcaacagaatgtgaaggttcatttcccaagtccggcctccattggttgcaagcgtcggacgcgtgtggttgtccgcatttgcaaggtcctgaaaccttaagggatgcccctatcaaactttccctgttcgtaattaaccgggttcaaacggcctttcttctcacagagtgagtcagttgtaccctggattgcctccggggactggcagatgccgcatgaaggctgtctggggtcaagcgtggcaggccagagacatggacccag

SEQ ID NO: 632046 - DNA, 311 bp, Homo sapiens
atgctggtccgcgttgttcttgcagacactctgctgtttcctgccttggctgtggctacagcatggctatggaaagctgctgccatccactccaccttgggccatagcttggttctgctcctgcttgcagggacagctgagctggctatttcggcgcttcgggcaagaactgctacaggctctcctgggtcctgcaggtgtacagccgggcccctgccttgtgcctcagctctcgaggagctgctgctgccgggtgacctgatccaacctgataaggtgccatcttcagctacctctgcaaggaacccacg

SEQ ID NO: 632047 - DNA, 148 bp, Homo sapiens
catcccccaacaggcacctcagcagcagaacacccttcttcgttccttccaaggcacagcaggcccagcagccgggcagcaatcagcagggggcatttccagggcattgggccttcttgtcctttgcaggcacgcaggcagggggtca

SEQ ID NO: 632048 - DNA, 268 bp, Homo sapiens
cgggcgtcgcacagttcgcctgcgtatcaaacagcgtcactgccggaaagtctttcatgaccctggcactacttctttgtattctttgttcgagagcacttctgccgagatatagcgcacgggctctttaaaacccttttggttttgggttccaaacggtaatggacgactatcaacgcacgacatcggagagaagcaagctcaggatatcaatacgaacacactggaagcgtacgtgtgggtacgagctcgaaatttcggtaaatcc

SEQ ID NO: 632049 - DNA, 1090 bp, Homo sapiens
  misc_feature (284)..(284): n is a, c, g, or t
  misc_feature (1090)..(1090): n is a, c, g, or t
actagagactgcgcgtaaataaaaccaaagtatagatcagctcaattgctgtctgatctccacgcagccctattcgcaaactagtctgccgcgaatgatgagaaggttcggcatcactacctgtggacgtcctgtcgcatgcaggcgctgctcaaaagtcacacgaatggcatgtaatgtcttagtcgcatggcgctacgtcagccagagtagccgtctgaatccgaccaatgttgacagtcactattcggccgcagcagctcaacatacgagagcagtaccgntcagtggcttggaattactcacgcgtagcctgtcaacgtcacaagtgggcgtgcacgtcaatacttgcttcaggtctgtccttctttcactatctcaatacgggcgatgagtctaatatttacggactcagtttctctactcagaatcgctgagaacatcggggattatcctccggcttgcaactagtagcaactagacttcataggctatgtcctcccgtgaggccaaatatattctgaggggccgcagtaattacaaggttactattcgacatcccatacatggggacaggacctagtccaatgatatctgaggaggctactgcggtagacatggcccagcctcacacgatatcttgaggctttcagttcaatctgcgctgtaatattggagccctagcagaaaccacagcctaatcttgcggaaaagggtctaacatcccctggaatactccatccggaaagtctctcccctttaaaggtagaacccgggtaattttcttccaaagatagggtttcgacctgggcccgacgaatgacataccgaaacggcgatgaatgacccaggccggggtgatcttccccccacggtggtcgctccctcaattccccaccggcgtgtggcacaccacagttggtgatgacacgtatagagctagacaacgaacagcaaatcaccacaacgcgagacacacaacataacacccacaacaaggcaacggacgagcaaaagcacaagacggagaaaagaacgaacaaacgacgaacgaaaagacacagcagaacacagcacaagcagacaccan

SEQ ID NO: 632050 - DNA, 224 bp, Homo sapiens
  misc_feature (193)..(193): n is a, c, g, or t
agtcggtaccgggaagactgtctcgaagctgctgttcgttatgcatcgctgtgtcgagcttcgcgcgcgctctgggcggctggcgagaagaagcaagcggaagctgcgtaatcgaacgtgcatcagcgtcattgatcgctggcgtgtatcctgcattcaatttatggagtatttcaacatgggaatcgcaaanagaagacatcctggcgagcagtcgacaggga

SEQ ID NO: 632051 - DNA, 625 bp, Homo sapiens
  misc_feature (425)..(425): n is a, c, g, or t
  misc_feature (460)..(460): n is a, c, g, or t
tgcaggattcggcacgagtaatgattaaaaaaaaaaatagaatgaataaaacctggtatttgatagaacgggggactacggtcaataataattgtacatttaaaaataactaaaagagtataattggattgtttctaatacaaaggataaatgcttaagggaaggaatactccattttccatgatgtggttattacgcattgcataagtgtagcaaaatatttcatgtactgcataaatatatacacctggctgggcgaggtggctcacacctgtaatcccagcactttgggaggccaaggcaggtggatcacttgaggtcaggagtttgagaccagcctgaccaacatggagaaaccctgtctctactaaaaatacaaaattagctgggcgtggtggcgcatgcctatagacccagctactcangaggctgaggcaggagaatcgcttaaacccgaggnggcggaggttgaatgagccaagatcgcgccatttgacttcagcccaggtgacacagcaggactcatctggaaaaaaaaaaaatggtacacacacacacacacacacacacacaccccttgtacccacaacgaactttgttaggacaatattctcaatttgttctt

SEQ ID NO: 632052 - DNA, 161 bp, Homo sapiens
ctcaatcaaatttgtagtttgtaaaagtattttaacagctctgcggcaaagtgcaaatgaaaagtcttgatggcatggactgagcggggacagttggggattggagaaagggggaattggatttttggatgtgttttaggaagggagattccatgttaagg

SEQ ID NO: 632053 - DNA, 1047 bp, Homo sapiens
  misc_feature (395)..(395): n is a, c, g, or t
  misc_feature (1020)..(1020): n is a, c, g, or t
agggtggacatttttgcttatactctggcgccgatgagctatatcacttatttcgtgtgtggtcagttccattgaaatatagcaccacacgaagtcatgtctgtgggatctttgtgtgagtgcagtataagttattatgtgcggacagacttatttgtaatatagtgtgtgcttgaataccagacgtcgttgtatagtctacaagtagaatacttactcgtcaaaggggttgcgattcgtaagtgggatagtgaccacattcagatgggcgggattgtgcctaatatgtgagatactttaatatattgtgtgtcccctcgatggtgacgctctcggtgtacaacaactagcttcgtgactccccatgttgtatgtgttgtaggtactttactatnaggggtgtgtattcgtaaaaccgcgcttcgtttttcgtcgcttcccccatcgttagtcgctcctccagggttctcttcccctaataacaggggggctcagcagttcgtgtcccacagtgtcaactctctgagagggtgtctcatgcgtggcttgtggttcacatgaatcgtgtagtgtgtagtgtacacctcgcgcaaacatgtaatttcgcgtgtgcatgcttttatccttttccgtaggcccccgcggcgatttctcacaacttgccacacaggggtgtagtgcaactcagccctcgagcatcgtcatattggcccatggccgtgctagggcgaggagtaatggaggtagggactaggcagctctaagcccacggaagtcgccagcgtctagtacctgtgaggggcgtagcatctcatgcttagtgtattgcgccttctttaggctatcgcgagtacatcgctcttgtgttgagacgctgtgcctgcatgggagggaacccccctgcccacgtcactccaggtgaaacaagcggtcatgcttcaggggcccatttccagcttggccgctatctgtgaccttgggcaagtcactagacctctgtgtgccatcaacttcctcctnttacacgcgggacagtacatggcaccc

SEQ ID NO: 632054 - DNA, 419 bp, Homo sapiens
tggagctcgtgtatcaaattctagcaactacatatgccattcactgtataattgctcattagatacatgttagtgtagatggggaagatcggtaagtatacttaggcctcagagctcccatagaccattaacatgaattgtgacatccacggttagtaacgcaaaatatttacatcctgtatctattggactgaaaatggtatatgacgatatcatattatggtgctagacgatgtcctatatcaagtattgcagtactgagtgagatacgcagtctggtaagcaagtattagtaatgagtattatatctgataaagacactcataacatgcacatggtggtggcctcatataagatatagttgagtgctacccgttactgctgtatgtgctgtcaaagcactgaatgtatcacgaatt

SEQ ID NO: 632055 - DNA, 295 bp, Homo sapiens
gctatcagtgtttgtggacttttaaaaattagtttgaattttggaatgttctgtgacaagatataatttctcctattttgtacatttgaatatgccatgttgtaaatgtctgtattcagcattattgtaaatatctgcattttaaggatcatgaaagattttcctcaaaaatgacagaactctccatactagattgtgacacattataagatatctgattttaagcttttggattttgttctaaaaattaagtttaaacatgctgaaaattccataagaataaaattttgaaaat

SEQ ID NO: 632056 - DNA, 137 bp, Homo sapiens
agtcattacaccatgcatcgcatcatcatcactatcaccatacatcaccatcaccctccttaagctctacttctacctacgccatattctactccacctcatcatcactatcaccatcatcaccatcatcaccatca

SEQ ID NO: 632057 - DNA, 569 bp, Homo sapiens
ctggagaagaccaggagacccctagaggaaaatcccctgcccttcccaaggaaaccgattggcaccagggagaacgcctacccaggccgatatctggttaatggaggccgtgccgcccgcccataatgcccctgtgaccattcccaccaagccattgcccttcttaattttaccttcttttagcctgtttaacctttgtaagaacgccaagaggttggagtccagtttaaatgagctgtgctgccccctttcacactccaagagactatctgagccacgagaggcccgcgccctgccctttcccactctgtctatactatctcggctggcacagggagaggagaaggacttgcactgttggtgaaaggaaagaaagtggtggtggaaagaaattggggtgggacgaacacgtgaaattctagagttaaacccaagctggccccaaggtgtcctgcacggctgtaaatgccgtttatatcagagtgccctttttttttttgttcaaatgattttaattattggaaagcaccattttttttaataagccaataaaaagttttaaaacttta

SEQ ID NO: 632058 - DNA, 193 bp, Homo sapiens
tgatcagttcttagaaacagttaaccaaaatcaggaatccttgggggtctccttttcttcatcctttttctcatcttcaatctgggccttttctttgcaatcccttccgaaatctcatcttcttcacctgggttcccattcacatttcttcttccggtaggttcataaattggctttattattttcaaattgg

SEQ ID NO: 632059 - DNA, 83 bp, Homo sapiens
cggcacattgtcggttggaggcctgtggctgtggctgagtggtctgctgtctgtggcacccattaaagtgcagttccctccgg

SEQ ID NO: 632060 - DNA, 340 bp, Homo sapiens
  misc_feature (18)..(18): n is a, c, g, or t
  misc_feature (20)..(20): n is a, c, g, or t
  misc_feature (22)..(24): n is a, c, g, or t
  misc_feature (26)..(26): n is a, c, g, or t
  misc_feature (49)..(49): n is a, c, g, or t
  misc_feature (73)..(73): n is a, c, g, or t
  misc_feature (105)..(105): n is a, c, g, or t
  misc_feature (112)..(112): n is a, c, g, or t
  misc_feature (115)..(115): n is a, c, g, or t
  misc_feature (117)..(117): n is a, c, g, or t
  misc_feature (129)..(129): n is a, c, g, or t
  misc_feature (138)..(138): n is a, c, g, or t
  misc_feature (143)..(143): n is a, c, g, or t
  misc_feature (163)..(163): n is a, c, g, or t
  misc_feature (193)..(193): n is a, c, g, or t
  misc_feature (238)..(238): n is a, c, g, or t
  misc_feature (247)..(247): n is a, c, g, or t
  misc_feature (249)..(249): n is a, c, g, or t
  misc_feature (259)..(259): n is a, c, g, or t
  misc_feature (261)..(261): n is a, c, g, or t
  misc_feature (263)..(263): n is a, c, g, or t
  misc_feature (270)..(270): n is a, c, g, or t
  misc_feature (286)..(287): n is a, c, g, or t
  misc_feature (295)..(295): n is a, c, g, or t
  misc_feature (297)..(297): n is a, c, g, or t
  misc_feature (329)..(329): n is a, c, g, or t
  misc_feature (333)..(333): n is a, c, g, or t
ctcgtgccatttcggcanangnnnangccaccgtgggtggtcctggggnactcagagagaaggcatgtctttngggagtcagatgagctgattgggcagaaagtngcccatnctntngcagagggactnggagtaatngcctncatttgggagaagctagatnaaagggaagctggcatcacttagaaggttnttttcgagcagacaaaggtcatctgcagatatacgtgaaggactngagcaaggncntcctggcctntntngcctttntgggccatttgtactnncaagactntnaacaccccaacaggcccaggagtacacgagangtcngaggatg

SEQ ID NO: 632061 - DNA, 97 bp, Homo sapiens
gactgtcgaccaggttggggcatatgtggagcttaatatatcatatctaatttaaaataatttcactgaactaaactccattgctatttacctacac

SEQ ID NO: 632062 - DNA, 433 bp, Homo sapiens
  misc_feature (91)..(91): n is a, c, g, or t
  misc_feature (259)..(259): n is a, c, g, or t
  misc_feature (308)..(308): n is a, c, g, or t
gggggttcagcgctcgggtgaggagctggtggcgtcggcaggttcgaggcgattcgagctccagcttaaggggaactggcaactccggaanggggttgtttgcaacgaccgtctggggaagaaggtccgcgttaaatgcaacacggatgataccatcggggaccttaagaagttgattgcagcccaaactggtacccgttggaacaagattgtcctgaagaagtggtacacgatttttaaggaccacgtgtctctgggngcgactatgacaattccaacggaatgcggcactgaacctgggagctttnattatcaatagatgagaatcctcatcttcctgccccgctttcctctcccatcctcatcccccacactgggatagatgcttgtttgtaaaaactcaccttaataaagacttagatggaacaacaac

SEQ ID NO: 632063 - DNA, 1389 bp, Homo sapiens
  misc_feature (723)..(723): n is a, c, g, or t
  misc_feature (754)..(754): n is a, c, g, or t
  misc_feature (890)..(890): n is a, c, g, or t
gcgccttggctgttcgcgtatgccacctttatccgtcctctccctctttctggtgccttctttttgtgtgtgtcgctcttctccctctgttcgctctccttgtctaattctccaccctgcgtcccgtgctgtcgctgcttctatctgttgtggtcctcaccgacctctctcagctttggttacgtagcttatatctgtcttgcgtctcctcctcttctcctcgcgtttccgacgcgtctgtgctgtggccctttctgggtggccgtcgacgcttctgctggcactcctccggtgctcgtcactacttgtcttcctctttatgtctgtcctacaggctcgatataattaccgccgccgcctgcggcgtgcctcgtgttctgttcattcctttcttgcccagcttccgcccagtctgcgtctgctccttctcttctgttgtctcttgctcatccgtggcctccgtctacggttcgcttgtttgattgtgttgcgtttatttttttcgggccgtctcctggctgtgtttctgtttgttgttgtcttttctcatcgtggttcctttcctctttttttttttttattttcttttcttcttgagttcctttgctttggctcttttcttcttttttttcttggtgtctttttttttttcttttttgtttttttttttttttttttttttttttttttttttttttttttttttttttttttttattatanaaaaatgccacattactctttattgaatgcnagcgccagcaccggcccctttctctccaagcacaggggcacgcaggcaaggggcacgaaggcaaggggcctccgtcccccttggccaggaatgcaggtggaagcctgtggcctccacttaccatttcaccatacangccagcacccctcctcgcgtgccgtggggcctcaggctcgtgttcaaacttccgtgctcacagaagcctacattgaggggtgtgggcctggacacctcgcctcagcaactcacagcggaccgtgtgacaaacgttctcataggcaaatgtcaggctcagatgtcaccttgttgccccacagcctttcggcaacagccccgtgctctgggccaaagcccgtggggccccggtttgtgttgctcccctttttctccccactatacaagcctctccaccaatcaccagagccttctgcctcaggggtaccttcaaatgccggggtccccctacgtagaaatccttccagtcaggggccaataggatatacggtccaggtccccggggggcgaaaagaagggcccgaaacccggcttggttgacgcgtcccagctccttcaatatgtcactgggatattcctctcgcccccctgttttattggtctctgcgtgatcttacatt

SEQ ID NO: 632064 - DNA, 1083 bp, Homo sapiens
gccagcacacccctgtgtcacctcctctgcggcagcttgtgcctcgcaatgcgcagtgcctgcagcgcactgccggagtggctgtagctgcccggctgcggctgccgccctgcgccgggctgtgggcttgctgtggctgctgcccccgtctgctggccagctctgcactggcttgcgtggctcttgccggctgacccgtggtgtgcttcttgcaagctggctgccggtgctgggctggcattggggataactgcgggccatgtgttgcgcccgagatctgcctccgcaaggattgacgggacgttggtgggtccaggttggggcttgcttggccggtgcccccttgtctctgcctgctgttacctttggcacattcctcaatccaccctttcagcttcttccccttgccgccattccacttccagttgcgaagatactatcagcgcaaaggtataaatcacaccttaacagatgtgtgaacttcgcgttattccttacctaaccaaaggaacatctttaggtgagcgatggtagcgcttcgcgcaaaggttcccaaagaagaataaaggtatcggcttcgcctcttataaaaccaacagcgcactaatcagccgccaagaccagtattcaccaagacagttatccgaaaccatatgggataaccacaaagagaatattatgcgggaaaacgcgtccttagacccctatgaacgggttatatcacaatcacggcgaagagaaactaatgcccccgtttgcagtccaaccgtataacgcgcaccattaagtggcatattttgctagagttgaacaaccaaagaaacacccgggaagagaagccccaaggcaattcgcaacctaaactaatccccccacttaacttcagacggaaacaccaaaggggccacaagaggccaattctcatatggagcgaacaaagcaggccattatgttggacagcgacaccacttccttgggaatgacccatcccctacggacaaaaccgcgcgacaagagaaattccaaaaccacagtatcggatatatactcccacttggaaccataaattgcggacgaaattac

SEQ ID NO: 632065 - DNA, 207 bp, Homo sapiens
ctaacagataagaaatgctactgtggcggttacacagatgcttatttggtttttaaacaaatccaagacaaaagaaagaaagagggaacagtgctgcttgaaggtgggggaggagagggaatctcatctgtaaaatgcttttccaggcaccggaacctcctagtctagcctggcacacccatgtcacgtcaggttaggtctacctgg

SEQ ID NO: 632066 - DNA, 233 bp, Homo sapiens
ttacaaccccacgatcacaatgcatgtaaagtacgtgaaccggtcaggcacagtggctcacgcctgtaatcccagcactttgggaggccaaggctgggtggatcacccgaggtcaagagtttgagaccagcctggccaatatggtgaaagcccgtctctactaaaaatacaaaattagccaggtgtgatggcatgtgcctatcatcccaactactcaggaggctgaggcaaga

SEQ ID NO: 632067 - DNA, 235 bp, Homo sapiens
acttgagcccagcaggttgaggctgcagtgagctgtaatcgtgccactgcactccaggctgggcaacagacgagacctcatctcaagaaaaaatacaaatttagttaagtagagtataatatctaaatgtggctccttttagacctctttgtgatattgacacatgtacctagacggttgctgtgtagctataacttgatatatacactttatcattataactattcacataatg

SEQ ID NO: 632068 - DNA, 231 bp, Homo sapiens
tcatcgcgtatgagcatgttgtttcataatgggcattccatccaagaaagtcctaaggagataaatgtatgtttcataagtaggcattctggtgatggaatgtcctgaggtagataacatgctggattcggtctgcagcacatctcagcttattcattctgaactcagtttggacaaagtgtagttacgtacagacacctcagtttggtaataaatgtaccagaaaatgct

SEQ ID NO: 632069 - DNA, 366 bp, Homo sapiens
aaagtacgagtgaggtataaatgggtgtggaagaggtacaaagtcaagggtagagttacttgatcctgacgcttcttactgtacaaggggttccacagtatacaaacatgaaattgggaggtactttgaaataaagttggagtcattgtggtaccgatgtaatggctcccaggactgaaaggcgggttactcgtgacttaatgtcagatgcagttccaaactcatccgctaacatttgtgccactcgtgaaatctggtcttggggaggaatgatcaatgatatcatgctggtgccaatggccgcgggccgcctccaagctcttaatgagcttctggatcttccagatctccacgttcctgtcggcc

SEQ ID NO: 632070 - DNA, 110 bp, Homo sapiens
gggcctggtgctggtttctctaatacaaacacactgggatgtctatgtgggcaggcttgggggaagatcaccaggcatggcttgcaaagcacaaatcacaaatgcattta

SEQ ID NO: 632071 - DNA, 884 bp, Homo sapiens
gctcaacgcacggagggtgaggtcggtacgcggtggtggcgtacggcgccccggagcctgcgcaaacccaggcccagccccagcccagcctgcgggcgccggaggggccggaacagacccgggatccgccagcacacgcaaagcaaaaaacaagattaaagaaaacgtaaataccactcaccaaaacaggtaagtaaccaaaaaaaaaccatacgcatccctcaacgtccacatcatcaagaccaatacacacatacatatacactaacacaacatactaataaccaataacaaaagaaaactcaaaaaacaaaaacatgaagcaaaacacacccaaaaatcacgaactaaactcaaaaaaactctaaacctctcacataacccacaccaacaacaaacaagaaacatacaaaggagaaaacacaaagagccaaacacaaaatagaaaaagacacatacagagaaaaaaacaacagaacacccacacacagaaaaagtagtaaggcaaaagaaagctagacacaacagacacagacaaaacacaaagacagacagaaagagacaacagaaagtcacaacaaaggaacaaaaacacataagagctgaacaaaactgtaggctgaccaaacaaacctaaacacgaaggagcaggagtcacctcagcccaacgtagaaccaaatcaagactctaataagcgatccaatacgcccagaaaaaacaaaaacagaagatcacaacagagggacgacacaaccccaagacaaacaacagcgtgacacacgaactatagtacagcccagcactaaaaggggggtaaaacaacgaccgcgcgaccacgcggacacacaacactcagaacagcccaggagaaaagcagacagcg

SEQ ID NO: 632072 - DNA, 364 bp, Homo sapiens
gggggtatctcccctctgccaccccaatggtgaataaagattgttgcttgtcaaaaaaaaaaaaaaaaaaaaaaaaaaaaatttgtgggggcgcacaagaaaaggttattatttaacaatccgttggggcgcggcgcgcgcccaagaggatacagtagaactggggccacaggtggtaccaaaaggaagaaaccggggcatgaaccaggggcgggggttcccaccaaaaaaaaaaaagcgcggggggacaaaccggaggtgttcggagaacaaccacagagggggtcccgaggccacaagaggggatctacacacggggaccccccaggggagcacgaatatcaaaataaggcacgcggggggt

SEQ ID NO: 632073 - DNA, 182 bp, Homo sapiens
  misc_feature (177)..(177): n is a, c, g, or t
ctcaggtaatccacccaccttggccacccaaagtgttgggattacaggtttgagccgccacacccagccttgtttttaaatggaattacagtaattaaataaaaactgttccatggtctacttttaaacttgaaggattttttttctttttcttttctgtctttttttttttttttnttttt

SEQ ID NO: 632074 - DNA, 801 bp, Homo sapiens
gcctacacccaggccttcctcacgcaggctgccgagggctgcgcacgccgctctggattgggctggctggcgaggagggctctcgggggtactcctgggtctcagaggagccgctgaactacgtggtgctggcaggacggggagccgctagcagccgagggggctgtacctacgtagatgtggactggggccatggtcggcaccacctagtctgtgacaccaaagctgcagggtggctgtgtgtggggttagcagtgggcaccccgtccctccgccgaagaataagcttacctatggcagctgtcccctaggggactggtcgagacatccgtcgggtggattcccttccgggtaggcacgtgcgtattctttccacatggtagctgctgctgggccacaaggaggctgcagacaagcgcgtgccgagagagcgggtggggccgtccatgtcgtatccgtggatgagatggagaatgtgttgtcatgggcagcagcatgcagagctatgaggggcaaagtcgcgggccgcctggctggggatgaaacgtcgaccctggggattgggctcttggtctggcagggcatcacagttgtggaactagtccaacgtgttgggcccccggggcttgggggacccagcgatgctgagccacaacagcgtgctactggattcagagcaaagctgggctatggcgcccggcgctttggggcaacatcacatgggtgtcgctgaaggcttcctcgtgtcgggacagagcagctcctcccatacaggcttccagagaaccagcggctggtgtg

SEQ ID NO: 632075 - DNA, 187 bp, Homo sapiens
ttgaatgtctggctattttgtatttagtggagatgtgcatctccactttagtggagaccgtgtggacaggctggtctcgaactcctgacctcaagtgatccgcccccttcagcctcccaaagtgctgggattacaggcgtgagccactgcgcccggcctaacttgatgtttcttaaacttgtttgat

SEQ ID NO: 632076 - DNA, 503 bp, Homo sapiens
agcggggaaaaaaaacttttttgttttaagcagtactttgtgagttacaagacagcagcagctccttagtgtgattgccgaggccttttgggtttgaaaactctggttccttgtgtgaattgggtgttaggagttcttatggtttattctgcacgcctttactatggtcctttatttcactgaacacagtgaataccaaggcactgtttgattagagggttagagacgtaggggcaggtgattaagaaagaacatagaaaagctaataatgctcgctcaagcaattttcatgggcctaagtacgaaacttgagtgagctgagcagcaagtgtggaacacgctaagttcgctaaaaaagcgcccccaagggggccagaaaacttccgataagaggggaaaaatactttttgggttggggccacgcgacgtggctcgagacccccgaaagtggtgtttcccccaattttccggggtccccttttggagaacggcagaaaacttta

SEQ ID NO: 632077 - DNA, 1060 bp, Homo sapiens
tggaaacgaagtctcgttttggtgtgcccaggttggattgcaggggcttgatctgtgctcactgcaaccgccaccttccagggtttcaagtgattctccttgccatcagcctcccaagcagctgggattacagacgccttgccaccacgcccggataacttggttgtattttaagtagagatggggtttcaccatatgggccagggtggtctcgaactcctgacctcaagtgatccgcatgcctcggaatcccaaagttgctgggattacaggcgtgagccattgggcccagcccaaatttatatttttcacataactaatacaagaggtgaagtggctcctcccaagttagcagtgctgccggggccttggcccaggcctagccagtgggctcacctcataatgctcccaagccaaccctgatgctccgggctccagggtagaccttttccctttagaaggtcacagtgtccaggaagctctagtgacacatggtgtgaatgaggttgagcgctgactccatgttcagtattctaaagggctcgggagtacaaagcaattagcctaagattgccacagggaaagaagtccatgtgtcaagggcccgttctccgagtagggccaaagtatctcaccaggtgatctgcagactataggaccgcagaactttcgctatattcatcagtaaatacacattctactgtccacatcactagactaagccaattcaatatacctggggcactagaaacacagctccgtatgatattaaaccccggaaaacatgtcaatatatgtccctatacacgcaggatggccgactggcactagacggggcgaacaaacctggcgtaggcccataccatcgaagaaagaggaggctagaggaacaccagggcccacaatggtagaccaccgacattcacaaaagaacattacccacgaggaaaccgaggagacataggactatggcagagctcgcgcaatgacgaccaagaggttgcacgcgccaaggccggaacaaccgtatgacagatcacaagcagcgtggagacaaact

SEQ ID NO: 632078 - DNA, 182 bp, Homo sapiens
atatagcacattgtaaaaccctgtactctactaatatacaaaaaaattacccgggtgtggtggtgtatgcctctactcccagctacttagtgagtgctgatgcagtagaattgcttgagccccagaggaaaaggttgcagtgagccgagattgtgccactgcaatccagcttgcctctggtg

SEQ ID NO: 632079 - DNA, 142 bp, Homo sapiens
cctgtatctggatcacaatgccagcgggtggcaaagtatagcgtcgcctatagaggagcgtgagaccagaacgctatggacgatctagcattttagaagtcacccaagcgaattcaccccgaaagcagcgagatgtacggcg

SEQ ID NO: 632080 - DNA, 492 bp, Homo sapiens
caacgtctgtgtcattagagagacgtgtgtcgctgcgctggctaatttatatataactaggtagacgtgtgtagtggataccgtattatagagcagaggtacaatccagatgtagattcattgacgggaaacatctttcgcgtgtgggatctgtggctgccaggcctggtgagacgaggattcaggagacggggtaagggagtgtatattttcagcagtcagcacctaggttactttgtgtactctacaaatacccagtgaggggagtatatgtttacccgtggctgctgagggctcgagatgagggtcagggtccggatcagtgtgcctgctgccttgggatcttggtcctcagtcagaggcacttcctctctctaaccaccccctaccccaagccagacaatctgttcacgggtagttggtacccagtgacccggtcagagtcgggggtctctcagcccttctcaggatatacccatgcacattttcagg

SEQ ID NO: 632081 - DNA, 518 bp, Homo sapiens
gacagaggacagggaagaaatgattccatagttttaaagtcttagggaactgatgcgaatctgatgggcatagtagcatatggaatcgaaatgacgagaatgatttcaaccagggttaggtcctaggtaacatacaacgttgtggaagcttattcattttagggtttacgactgcctctcagaggatcagactggccttgcccgttcttccttccctcttgctagctgctgtgatcacagctcttctgctgctctgcggagctgtccctcctaggttattcctgctgtttgctctctcctcaggattggagatacccagtacaccttgctccttcttttccttgaggctttataactttacataagggggacaagtttacctaacaacacagggaagagtctaatattaagaaatatgcaaagttcttttagtcgtggatgctggtctatcactcctgcaacccttttgagagtaacggaaagctctgttgagtctcaacttttctttcagtgggcag

SEQ ID NO: 632082 - DNA, 728 bp, Homo sapiens
gcttttccccactgttctggagggaaggggaaggagggggtcttcagcgctggagccaggctggtgtgtgctgggctgagatgagcatgagatattagggaggtgcctcatgggcgtggtgcatgtgccctgcgggctgagaactgaggaagagtgccgcagaacgttgcagggtctgcggacgcgggaacgtgtcctgatgctgatacggaggggagccctcagtcctgcggtgatgctgggagtgagtgagtgcgagtggctgagatgcgggttatggtgagcctgaggcttttatgggcctgtgtatccccttcgtcgccggccccagttctgcactcacctctcgtgcccggactggtccgcacatggtctccgctctggtcccatgtcgcgctctggtggttggggatggagcgggacgcaagtgggtgtaagtggaggctaggtgttcgtgttcttctatcagtgcctactcccgcaggtcctcagctggttgcctggggaggcggacggggctcctgaggggtagaggttgggtgggcacctcgcctgagggtctggtgtccggctttggcctctgttggatcgtcaatcaccaaagttaactccctctgaagactccaagtcccttctttgtactgtccttgtgagtcagcgtctgggcctgggtgtggtccctcctcatacttcttgttcctagggacaaggggtcaagccaggatgtg

SEQ ID NO: 632083 - DNA, 1083 bp, Homo sapiens
ggagcggtcagtgatcatgagggagagtgcgttggagccggtggcctgtgccctgaggcgccggcggggggtccctgtgcacgcctgtgacggtggtagaccctgctaggagaagctggcctccatgctaggagactctgctgtgtgagctgtgcagtggaggcctggctcgaagtgcagggaggcctggcagtggtccgtgcggccgcatccagagctggcctgtggctgctctgagtcgcagcacacgatcaccaccatgcaacaccttgagcagcagaatgctggccaatggccggagcgcgtgagctcggcacgccaaacggccgcccaagagcgcgcggtgcgcctgtggcagcccaggtgcagccggcctgcgagtgccaaacgcactggagcttgcttggattggacgcgcggggaacgcgtccagcggtatctgcgtcttcaagcgcaggagtggctgcaagtcccagtccatgcgcttttaccgagaacaggggcaacccaggagcgccgtatggggccccgggtcgggcaccaagatcgctgagccatggggccccgagaaggccagtgcgctgggagggcccgatacaggtatgggaacgacagcagcatcgggacgcgcaggggaggccagagggtgggacagtccacgtggagcccaaatacgtgtatattgcactagggagacaacgcgggaattggccaggtaccgtgggtaccagtgatgcccattcacgaaacgcggtgccccgtattacagcgacgccacgggaaaacagggtccgccgttgccaaggtgggcaccagcgctgacacacgaacgccccagtgggtcacaaatgcccagtggtctcgattcgggccaccttagtgggcaggcccggattgggccccgtgggcacttgccggccatggcacaaggccacacaaagaccctggagaaaaggccacgcaatgtcacgatggcagggcgatagaggcaggccaccaaagcgcggcactgtggaagcgacgccgaaaagaaggaccttacgccgcacaaggtgaaaacaacgccgcggagcggggaaaaga

SEQ ID NO: 632084 - DNA, 1067 bp, Homo sapiens
tgaaatcccagctacttgggaggctgaggcaggagaattgcttgaacccgggaggcggaggttgcagtaagccgagaccatgcttattgccctccagtctgggcaacaaaaatgaaactccgtctcaaaaaaaaaaaaagtaggtcaatttcgtaacagtttatttgggacacaccctgaagctttggtttggaatttaagaaatgagtttcagggatttggacaaaccatttggttaaccagctgtcctggggctatggaagaagatttcattttccggcgcatccacttgtggcagtccaagtcctctagtgcaacgccatagcaaatataaaggatttactatgcacggtgatacattttatgggagtggcctcaagccaagatagtggaatttatatgaaggggtgtgaactggtatttctttactactatagtagttaagttataacttggcatctataatggagctttctcatctggtcaaaggctagggtttccttaacaatggttacaattctagatctatccacctggtttttaatggtctacaaaccattaatggtaaatatggtcttaagagtcagtcatgggcttgtgtcaatttacccttggacgagttccacaaggggtagtagagtggttaaacgtcttgcctctagttactacccagtattcataattggtttaccctttactgtaattgggtcctcttagaaagtccgaatcatcgtgatctaatagacggcttagtaaaccagagtttgaacagggcgtatttactacatacggtattatattagagcaccaacggtgttacttaaggtggttatgtgaccagtattttacagttatatgttaccatggttccgcgaaacaaccttagcgcggacgccaggaccttcaagcctctcgccatcacaaattcacccgcgtcaacaccaccagtccaaggacacccacgaacaaccctcacaaacagcgcgccccactcaggatcacacctcgcccgaatcaagccacagacaggtgcacgtcgccaccacgccgtcttgtgtccccacggc

SEQ ID NO: 632085 - DNA, 118 bp, Homo sapiens
catcgatctgacgaccaagaaccttggatgcccatggcgcgaacatgtcgggctgtacaccgaaaatggcaaccaggaaagtttggagactgtctccatgcaccatgccttgagctag

SEQ ID NO: 632086 - DNA, 539 bp, Homo sapiens
aaaaaaaaaaaaaaaaaatttttatttttttggaaaaaaaaaatggccaacaaaaaaaaaaaagggccccccccaaaagggggaaaaatccggggacaaaaaaaaaaggggtctccccaaaaaaaaaaaaaaaaaaacctcacattttgggggggtgggaaaaaaaaaaaaaaaattccttcttttgaaaaaattttccccccaaaaaatgaaaaatatttttttttttttcccccctttttttaccaaaaacccccccttttttttcccacaggaaaaacgtttataaatttctcccccgggggggggcgaaatttaccccacccacttttttttttcaatcaacaaaccctctttcactaaaaaacataaacctactttctattttttatggcccaacacaaactccgcgcaaaaaaaaaaataacatttctttctgtgtaaaatatattaaaccgccaatacccaccaaataaaaacattaaaaatacaaaggtaaaattggggggtctttcaggaggcacacaaataaaattttc

SEQ ID NO: 632087 - DNA, 113 bp, Homo sapiens
  misc_feature (30)..(30): n is a, c, g, or t
  misc_feature (32)..(33): n is a, c, g, or t
  misc_feature (76)..(76): n is a, c, g, or t
gggatgaggaacgtcactgggatgaggacncnnctgggatgaggaacgtcactgggctgaagacaactcttgtgtngtccgttgctttgagtcctttgagtggctttcctcgt

SEQ ID NO: 632088 - DNA, 177 bp, Homo sapiens
ccctaacccctaaccctaacaccaaccttaaccctaggttcattactacatttgtattgactatgtcaatgttgattattatgatcgctgtcttaggactgcatggcagcgaggggattgtggatcttatattaatgtttttgtattgaggcagtgcattagcactacaggtgcttg

SEQ ID NO: 632089 - DNA, 840 bp, Homo sapiens
  misc_feature (221)..(222): n is a, c, g, or t
  misc_feature (295)..(296): n is a, c, g, or t
ggcggcggagccgactcgtcgcggcgaggcgcacgcggtccgcgccggcgtcagtctgggattggcggccgcgattcctccgccccctgccaatcgccggggacgacttccgtgggtttttccggctctcccgcgtcgctaaggagcgacgggctgtctggccagaccccgagttctctggtgctgctcagctggctgcgacgctaggaggccgcgctccnnccccgctaccatgaggccccggaaagccttcctgtcctgctgctcttggggctggtgcagctgctggccgtgnngggtgccgagggcccggactgaggattcttctaacaggagaaaatgccatttgaggaatgaagaggaggaggacgtgaggaatgactgatgatgacggaagaagacgagcttggaaggtaaggggaacgaaagattggagtcttggtcctaaaatgatgcaaactttgataatttttgtggctgagcaaagacacatgggctgcttggacgttttatggcgtccatggtgtagtgaccatatgcaacgcaggtttgctccgggaatatgaacaaattttgccgagcattattacaggataaagaatcctccgcatttcctgtttgccaaagactcgatggcaaccctcagcgtcttgtgcttgggcagcaagggtttgactgtgagttgtgctaccccaacgattaaggatcacttaagaaaggtggcagtgtgtagaactacacgagggggtccagaaccgggagaaatggtgccccggtctgagaagtctccagccgacgggagcatctcaacaaagtcacctgtgttgcccacggcattgg

SEQ ID NO: 632090 - DNA, 184 bp, Homo sapiens
  misc_feature (3)..(3): n is a, c, g, or t
ccnatctcggtcgaatattacatacttttaagtaagccgaatgtcagatatacaaagaacaaagtatagaatttgggaagaagtgtgggccagagtcaatgcttggaaacacttggatgcaatttactttgattccagtaggaagctgcatatgaataatggagaacaaaatctggacattcga

SEQ ID NO: 632091 - DNA, 446 bp, Homo sapiens
cctagcttgtccagcttgaggtactgcacatagagttccagcgtgagacaagccccaggtatcgctgcccaacaagcgcgtctgggtgcgttgttgatgatcataacggtcgttgtgctgcccgtgctgtggccgcaacagcatgccttcatgccagataactttctgagcctgcatgtcactgcgccaccaggccggcgcgtgagccagcaacgcgtataccggtcagatccaataccagatcagcacggtaacgtcgtagcacggtcagcggaatcagcagccgccactggacattgggcaggtctcgctaagccgccagcacccccacgaaacgacggtcaggtccgatacgaagcatgagccccaggcggaccccagggcgcaaaccacgttcgtcgctgataacccagtccttggacagcgtcagctgcgcatagccatac

SEQ ID NO: 632092 - DNA, 101 bp, Homo sapiens
attggcatcttcttctgccccctgctgccctttatccaaatgattatgcttttcatcatgttctactccaaaaatattgaagccttcagctgactgtggcc

SEQ ID NO: 632093 - DNA, 880 bp, Homo sapiens
  misc_feature (30)..(30): n is a, c, g, or t
  misc_feature (64)..(64): n is a, c, g, or t
  misc_feature (74)..(74): n is a, c, g, or t
  misc_feature (76)..(76): n is a, c, g, or t
  misc_feature (81)..(81): n is a, c, g, or t
  misc_feature (86)..(86): n is a, c, g, or t
  misc_feature (92)..(93): n is a, c, g, or t
  misc_feature (127)..(127): n is a, c, g, or t
  misc_feature (146)..(146): n is a, c, g, or t
  misc_feature (151)..(151): n is a, c, g, or t
  misc_feature (160)..(160): n is a, c, g, or t
  misc_feature (165)..(165): n is a, c, g, or t
  misc_feature (168)..(168): n is a, c, g, or t
  misc_feature (170)..(170): n is a, c, g, or t
  misc_feature (178)..(178): n is a, c, g, or t
  misc_feature (189)..(189): n is a, c, g, or t
  misc_feature (196)..(196): n is a, c, g, or t
  misc_feature (209)..(209): n is a, c, g, or t
  misc_feature (213)..(213): n is a, c, g, or t
  misc_feature (219)..(219): n is a, c, g, or t
  misc_feature (280)..(280): n is a, c, g, or t
  misc_feature (283)..(283): n is a, c, g, or t
  misc_feature (290)..(290): n is a, c, g, or t
  misc_feature (298)..(298): n is a, c, g, or t
  misc_feature (300)..(300): n is a, c, g, or t
  misc_feature (302)..(302): n is a, c, g, or t
  misc_feature (304)..(304): n is a, c, g, or t
  misc_feature (306)..(307): n is a, c, g, or t
  misc_feature (309)..(309): n is a, c, g, or t
  misc_feature (312)..(312): n is a, c, g, or t
  misc_feature (320)..(320): n is a, c, g, or t
  misc_feature (336)..(336): n is a, c, g, or t
  misc_feature (347)..(347): n is a, c, g, or t
  misc_feature (357)..(357): n is a, c, g, or t
  misc_feature (374)..(374): n is a, c, g, or t
  misc_feature (402)..(402): n is a, c, g, or t
  misc_feature (424)..(424): n is a, c, g, or t
  misc_feature (452)..(452): n is a, c, g, or t
  misc_feature (454)..(454): n is a, c, g, or t
  misc_feature (576)..(576): n is a, c, g, or t
  misc_feature (607)..(607): n is a, c, g, or t
  misc_feature (619)..(619): n is a, c, g, or t
  misc_feature (874)..(874): n is a, c, g, or t
gttaaaaaaaaaaaaactccagtgataaangtccgtaaccgatggtcagcataaaaaaccaatngcaataaaangnccggntcttngaaggnngatccctcgaagtgtcgcggaaggaaaggccggnacccctggagaccccaggnccgangaccccgtnccgcnatnanaaaaccgnaacccacggcngcaagcngagctgcaagaanaaanaggggnatgccccgcggtccctagggcaggaggctgaagcagatacagggattacacttttgcaggntcnggggganggggaagnanangnannangangagggaanagccagtgctaagganttcgttgcctntcctctctcnattcactctccgcagtnagagttaaaagcttatatggtcaaaganaaaaataaaaaaaaaaaagtanaaaaaaaaaatagaaaaaaaaatacttntnggagaggcgccgctgcggctccgcggagctttcgttctttttttaatgcagtttcccttccgccacgtgagttccgccttttggccaagagtttagccgcgtcctaggggagcagcaggganggtcggggtcggggccccgggcggggctctnaaatgccgcgtncacaaaggacccaggggacaattgttggagaggtggaaggtcccgagcgagcgcctctcccgctgcccgccagagtcaggcttctggtccctatggaggagagggccgctgggcctagggtccttgtgacccacaggttctatttagcatttgatcttggaggttttgagctccttcacctgtgagtgtagcgccttgtggacagcgagagtcctggactggcagaatcctttcccacactcttgacacttgaangggctt

SEQ ID NO: 632094 - DNA, 734 bp, Homo sapiens
gccatgtgatgccccgcggtgtgttcccccgggtgtcccagccgcccgtggtgttggtgctcccggccaagatcggcagctccgtcgggaagaagaggctcctcttctccccctatcgccaccatcagctggtggaggggaaaacattttgtggcggcccctctcgtctgggggtgcccccaccaagagcggcaagttgaagtctgccctcacgccactaggtgggcgccgacaacgaggtgtggtggcgcgacgtcacgcgtcagcttgtggaggtctcccccaacaaattctggtgtgcgtgcgctccctgcgggacataccagtccagaccccaggtgcgcggggcgccatatatccgtgcggggagggcccccccgcctttgcgcgtgggtgaaactatccaggaggcgcgtctcctcccgccgccgctggcccactgtggtgtgcacacgacacgcagttcttcgcactggagagccgtgcccctatgtacaccagatccatgcctcaccgtgcacggcctccgacaccccgcggtctggagcgcgcgggaccctggtgctgtgtatcgagaatggacgccaccgaaaatggccccacgccgaggaggcccttgccgcccctcgatcaccccgtcccgacgccccccctcgtcctctgtacaagccgccctcctactactcccctccgcgtgtaacaaacagacgacgcaggctcgcccacaaaacaaa

SEQ ID NO: 632095 - DNA, 149 bp, Homo sapiens
tagtttagaagttcaatagcaaagaaaaaaagaaaagaaaaccacagtgaagaggccgaatttaccccgaccttggcaaaggctcacccaaaaagcaaaagggaaaagtaattttctttagtgtattttaaacacggcattcagttttt

SEQ ID NO: 632096 - DNA, 425 bp, Homo sapiens
tttttaaccaatcaaattttgtgacaaaggcaattatactcttatttcccagggtgtgcccagacacataagccaacaacacccacaggcattcacgcaaatatatgcatagatgcccagaatgtccacatagacagtcacagggaggtgcacacaaggatagtgggtttatacatggacacatggacccagaaacagatacctccctgggctgtgcacacatcataccccacccttgctgacatcactgcctttgctcagagctcctggctctgcagtttgggctcagttccttcaggctggaacccagcaggacccagcctgggctggctgggctgagctgtactggacaagatggggcagggcagggccagccagggcgccacagatgagctcaggtgtcagactccgcccgtggggcttcc

SEQ ID NO: 632097 - DNA, 952 bp, Homo sapiens
gcggctgcggtggcgtgagcgggaccattctggctgttgtctggacaagcaagtcgtaatgaggtggtgagaggatggaagctgggccaacccacgagaagcaatcacactagatttacatcttcttggtgaccccacttctcgactgttcagtgccagtcctgcgcggacttggcgaggtcggcgagaaatatggcggccccctctagtgaaacctgcggaggctgaccctccgctgtggagggctgagcgtcgggggagccagggtcttctgcgagtcgggacgcgtgcgctcggggtgccctatgctgtgtgtagcctagggacttggtgccttgtattccagccactccagccatggctgaaaggggccaatgtagagctcgggctgtggcttcagagggtggaagccccaagctgtggcagcttccatgtggtgttcagctgcaggtgcacagaagtcaagaattgaggtttgggaacctccacctagatttcagaggagtatggaaatgcttggatgcccaggccagaacgtttgcctgcagagacagaggccctcaggataacctctgctagggccgtgcagcaacgggcccatgtgcggatcacgcacgcctgccacagactccccactgcgctctgcctcgtggagatctgaaacagacggcaccatggctccagatccccggaatggtggatcccaccggcagcctagatccgtgcacctggaccaacgcgcacagccgcacggacggccgcccgtgaatgcggcccgaggcaggctacactgcaacgcacggcggcggtgcaacccagaccatgggaacccctggtgcagcctcgccgctgtacactgcgcgcagcgcacctccggcacctccacaagccgcccgcacgctccaatcgcggcgtgaaccttggggcaatccaatgacaatccatacgacca

SEQ ID NO: 632098 - DNA, 232 bp, Homo sapiens
  misc_feature (64)..(64): n is a, c, g, or t
  misc_feature (135)..(136): n is a, c, g, or t
  misc_feature (229)..(229): n is a, c, g, or t
aaatgtatgatcagaaaataggtacgcttttaaaatatttgaacagaaaagctacaaataaatngagcaatgcttttaaaatcatctttgttttatagactttttctcgcatgaattacattttacaatttcatnnggcatattcgcactttaagtactgacgaagaagactaaaacaatcattttttaacaatatttaaaaggatcatatagtcgacttttaaaacanccc

SEQ ID NO: 632099 - DNA, 368 bp, Homo sapiens
aagctatccccagaaagattcgggttctgctcctaccacttgaagttcacggcacacgcaggcaaacagctcctgaacatgtccaccaccttcatgggcaggtccaggccactggaggacgtgtgcagacagacacccaggtccgccgaccctgctaggcaagaggggtgggtcagagcgctggtctgtgccctgggaacacaaatcctcccagcacagtgagacaacatcccccgaggggagtgagaattggataaagcccccgacagccccaagcacaagtggcttaagctggccaagcagccacacggcctggctgggacatctgaaaatgtaagctgacacttcttatacataaccacaagaaa

SEQ ID NO: 632100 - DNA, 646 bp, Homo sapiens
  misc_feature (583)..(583): n is a, c, g, or t
  misc_feature (585)..(586): n is a, c, g, or t
  misc_feature (590)..(590): n is a, c, g, or t
  misc_feature (622)..(622): n is a, c, g, or t
  misc_feature (627)..(628): n is a, c, g, or t
  misc_feature (632)..(632): n is a, c, g, or t
  misc_feature (636)..(636): n is a, c, g, or t
ccccccccctcctccccacctgggggggggggggggggggggtttttttttttttttttttttctaaaaccaaaaaaaaaaaaaaaaaagaaaaaaaaaaaaaccccccccattgaaaccggggggggggggggggggggaaaaaaaaagaggcggtggtgggtaaaaaaaaaaaaaaaaaaggggggcgggcgcccaaaaaaaaaaaggaggggccgcgccccccccctttggggggggggggggggggggggggcggagaaaaaaaaaaatttttcccccccccccccgccggagagaaggagacccccccccacctttcttggggttgggggggggggaaaaaaaaaaccccccccttttttttttaaaaaccgccgggccaaaaattgggggggggggggttttttttaaaaaaaaaagggggggccccggggtgttaaaaacctcctcttgagggaaaaaaaaaagaatttgtttttaaaaaaggggggctttttaggggggtttaaacggggtttaacccttttttggggcgcaagtgcccctctccaaggttgggggggtaaggcgctaaggctgnannttgnaaaaaggctcaagaaaaaattcttggggaagnaaaannaacnttcntgctcgtggc

SEQ ID NO: 632101 - DNA, 259 bp, Homo sapiens
  misc_feature (74)..(74): n is a, c, g, or t
  misc_feature (118)..(118): n is a, c, g, or t
  misc_feature (123)..(123): n is a, c, g, or t
  misc_feature (135)..(135): n is a, c, g, or t
  misc_feature (174)..(174): n is a, c, g, or t
  misc_feature (176)..(176): n is a, c, g, or t
  misc_feature (204)..(204): n is a, c, g, or t
  misc_feature (233)..(234): n is a, c, g, or t
  misc_feature (241)..(241): n is a, c, g, or t
  misc_feature (250)..(250): n is a, c, g, or t
aaaaccctgccccgccttcccctccaattgccgtgcccactgtctcttttaaatagactctgtcctcatcaagnctgttctctgtcccccaaatatgccgtatcttccttatgcatgnatttnttcccagttccntacaatcttataattagtggttacgctaatctatatgtntntttaaactcatagaattgtatacaaaangtcaactgtactgtgtacacacatttaanngataaantgtgttctnttaacgctt

SEQ ID NO: 632102 - DNA, 287 bp, Homo sapiens
  misc_feature (58)..(58): n is a, c, g, or t
  misc_feature (168)..(168): n is a, c, g, or t
taagagcctgcacgtcgcctatgccggatatgcaataggtcgattataaaaaagagtntgtatatggataatctgcaaacaaatattgctgtagtgactcagcaaagagccaagcatacaaaaactcgctactacattctatgcgatgatttttttggtcacggcatntaattgcggtgatcgtgcaagtctctcaatggcagcaacgccaatgtctcatgaactgggaattgactcaatcactatggaatatatttactcggactttgcatggacctatgtaatta

SEQ ID NO: 632103 - DNA, 522 bp, Homo sapiens
tggagcctggttctccttagtaggaaactttgggggacagctgaagtagtcaaaggcagtggagtagatcttctcgcgaaacacattgcggatggttgcattttggacccacatcggcatgcaggagggacagccccagggtcagcagcttgaagcggggcccgatggccgacacatgccggttcatgctccccttggcccacaacgatgttcagggacatggagcgctgcagcaggctggagacagatctccacttggtcagagctgcagtacttggcgatctcaaaacgctgcaccaggaagtcgatccagatgtagtgaggggtcacttcgcagggacaagggtttgcgtagacttgcttacgaggcagacagggaggtctgcttcctttatctcagcagaacccaggccaaattactgctccactgtcatgtgccagaccctgccatctcccgaatgaactacaggtacagaaggactgtcagctcctcagagtgccaagggccagaaaccgacaaaa

SEQ ID NO: 632104 - DNA, 122 bp, Homo sapiens
  misc_feature (77)..(77): n is a, c, g, or t
  misc_feature (107)..(107): n is a, c, g, or t
  misc_feature (112)..(112): n is a, c, g, or t
ctcactgcagcctccgcctctgggttcaaaagattctcctgcacacctgtagtcccaactattcgggaagctgaggnaggagaatcttttgaacccagagcggagtnatccngaattctttg

SEQ ID NO: 632105 - DNA, 411 bp, Homo sapiens
tatccaaagatctgtaaaatcttctctccatctaatgactagtcaccatttggagctggggagggacgctcattattcccatcaatattacatttggctgctgtggatttgatagtcctcgctatcagatcactgacaaagcaagtacgcgcttgactgtcctctaatacaccttccggaactgaacccatcactgagggaaggctctgtgctttagcaacacttgtgtcaacagtacattgttccaatagttgagtttccaactctttgtgaagagcttttcctcctaggggtagtgctccccaacaatttagaactgggattccttcatatatctatagagtagtctaggatactactattttaggagatcaaatgtggtttccttgatattttcctcaacttctgcag

SEQ ID NO: 632106 - DNA, 159 bp, Homo sapiens
taatacaaacacggtctcacatacttgaactcctgtatgtaagcaatcctcctgctttggcctcccaatttttttggattataggcatgaaccaccacgcccagcctattactgaagtcgacgcggccgcgattttagttggtgttgttggcccgccct

SEQ ID NO: 632107 - DNA, 256 bp, Homo sapiens
catcactcattcgctctgtattctcagagtggcattcattcattcattcattcatttactcatttgctccacacattccgtcactcattggctgtgcattctcagagtggcattcattcattcactcatttactcatttgctccacacttgtcaggaactagtgggcatcatgcattcactctttcatttattcactccacttttagggagaaaaccctacacgtcattgatttatgtattcagccattcgtttat

SEQ ID NO: 632108 - DNA, 298 bp, Homo sapiens
agaggctgagaacgggtagggagagagtgagagtaagagaataatgacttaatgggtacaaatatatggtttgacagaagaaataggagagtacataaagacaattagacaaaatctggaaaacaattcatgatttgaatgagaaaatcaacagagacagatataaaaaagaaccaaacagaagttctagagctcaataattcaatgaataaatgtaaaaaatacatgactagatctaaatgagacagactagaccacggggaaggaacgaatttcttggagacaggtctgtttgtag

SEQ ID NO: 632109 - DNA, 104 bp, Homo sapiens
tgactaccaagctgtcgatgatgaatcgaggccaatcttgagggtgcgacatcagcgaggatgacattgatgatggattcaggagactgtttgcccagtggcag

SEQ ID NO: 632110 - DNA, 191 bp, Homo sapiens
gagaagtgtacttaccctactgataatgtgttgttgccatgtctaatcctgctcagtactgaaggacccgcacggatacagacttttggtgtatgtgcttggctgaggagccaatggggcgaagctaccatctgtgggattatgactgaccgcctctaagtcagaatcccgcccaggtggcattcggccat

SEQ ID NO: 632111 - DNA, 728 bp, Homo sapiens
gctccggcatagacgtgtgtgggttgtcaaggcaggtcactctgcccctctgagcctcagtcttcctgccagtgacgcagtggagactggcactgactgcctcccaggagcgtcgtgtggccttgacagtgagagaggtggtgtcatgtgcctgtgttcagcattgcctggtgggtgccctcagtgcaccctgcaccttgtggggctcctgtgccccctgttgatttggcccctattctcaatggttacctggtgctgggcttgggtggggacttgcttgtactaggatatagtgggggtggggccaatgaccaggctatgtggttggttgtgttggcacccatgtgaataggaacccagttgggcctagaggcaccttgtgtagagacaagtgtagttgttacaccacttacaggtttggagacttgcaacacctatactaccttagactttactatatagcggtgttacttactttaacttggtgagacgcctttgcatgttacttatgtgtggagctaacccccccgtttgcatatgctatttgccgtaaatgataaaaacttggagggtgtaaagaaaaacggtctcgagaatgattctgacaatgggtatggaagcgcacattaacttatcataaagaggggaactgtatggcgaatttcgcctatgttttcagattgtttatgactaaaaaacgggcacaaacatgtaccttatgaccaata

SEQ ID NO: 632112 - DNA, 149 bp, Homo sapiens
agagcaagactatggttagaatagggtggatggagagcgcgtgtatatgcgggtggcactgcccacggtgggcagggcggtctctctactcgaaggtgaccacgtatagatactgagacggtgaagtggagggtgaataggtcacggcg

SEQ ID NO: 632113 - DNA, 402 bp, Homo sapiens
  misc_feature (63)..(64): n is a, c, g, or t
gggctggcatggtggctcacgctggtaatcccagcactttgggaggaggattgcttgatccannaagtttgagactggcctgggcaacataatgagacccctgtgtctgtagaaaagaaatagaatgggtgcagtggctcatgcctgtaatcctagcactttggaaggcctacatgggtggatcgtttgaggccaggagtttgagaccagcttgggaaactctgtctctgcaaaaaatagaaaaattagctgggtgtggtagtgcatgcctgtagtcccagctactctggaggctgaggcacgagaatcgctggaacccgggaggcagatgttgtagtgagccaagatggtgccattgcactccagcctgggtgacaaagggagactgactgtgtctcttaa

SEQ ID NO: 632114 - DNA, 545 bp, Homo sapiens
  misc_feature (200)..(200): n is a, c, g, or t
  misc_feature (351)..(351): n is a, c, g, or t
taatcgagctcggtaccagttcgacggagactctcgtcattgtcctattatagacaatgacgagagtgaattaatttttagttagcatctacaggtgcaaagctgaagcagagttcccaccatcatactgtgagctccctcgaaggctatatgtaccctaatcttcccagtccccagttgtctctcccacgagaaggaanggctgcgcttactatatgacagtatcaggcatcagatctgtcatgcctcatgtcttatgcatttaggcacctaggcatagtagcaaaacgagctcatggaaacatgcccagccagggagacaggccgctcaggaagagagaactgcccagngtctgtggcagcgcatgacgggcagtggctattgccaccaacatgaggaatcccgttattggaactccaacctgagaggtagtgagcttggagggtttctttgtttgtctgtttgtctgtatgtctgtttgagaattgcacacaattacgacagtcatttttcccagaagtcctctctaagagcctgtgctcat

SEQ ID NO: 632115 - DNA, 456 bp, Homo sapiens
cggatccactgcaacatccgctcccacattaaagtaattcttctgctcagcctccctcgcagccggaactacaggtgcccgctaccatgctcagactatgtttgtatttttagtagagaaggggtttcgccatgttggccaggctggtctcgaactcctgacctcatgatccgcccgccttggcctcccaaagtgctgggattacaggggtgaaccaccgtgcccagcagcagtgtgaatttcattaccttttttcctgggtgtttttatcaagaagggcttgtgtgtgtgcgcacatatgtgtctttaaactcatttgttaatcttgcccatgtataaattaagatcacagatcttgtttatgttaagagctgtgagattttggtgagctgctgcttctggaatgtatacctagtgaagaggcagcattgcgtaccagaaagagctcacgtttcg

SEQ ID NO: 632116 - DNA, 280 bp, Homo sapiens
tgtcttgctttgtcgctaaaaaattaagacaggtcctgctttgttgcccatgctggagtgcagtggtacgatcttggctcaacgcagcctcgacctcccgggcccaagtgattctcccacctcagcctcccaagtagctgggattacaggtacaggtgatgaccaccatgctttggccattgtaaccattttatctttttttttttttttttttttttttttttttaaaaaaaaacccccccctttcgccaaggggggggtgtgcgggccatatttcctt

SEQ ID NO: 632117 - DNA, 118 bp, Homo sapiens
acaaatatagggtaccgcataactattctctaaagatattactcagttctagctagtgcccagttgtctccaccaccacctctgcctccctaacaagaagaaaaaatgggcaatgacg

SEQ ID NO: 632118 - DNA, 247 bp, Homo sapiens
tgtggcatgttccctgagaaggaggtgattccttccagctgagcttggatgcgagcaccttgtgggcacctgggagtgacatgcttggtcttacctgactggccttgacttttagccgtggtgagaccccgagtcatataaatttgctgtgctatgccacacttctcacctacagaaacttagtttaaagccactaagtttgtggtaatttagttggctttaggccctctgaagggtacacgattta

SEQ ID NO: 632119 - DNA, 792 bp, Homo sapiens
  misc_feature (772)..(772): n is a, c, g, or t
tagttttatttaagtagatctttgttgttctttcaacccatctgtacttgcattttgcttgactccagcaatccattgccgtcttgcgatcaggctctaataactggcaatttctgtgtagtctagtagatacactgtccacaatggcatcttttccaggcaacacaactttctcagccactttggattaatatgattggcctaatctaagcactctgcgaagatctatccccttgaccatcccactatatgttgtgaggacgtctgtcggcatgaaaagtgtctctacgtctttgacaatgaattgataaggacaagttaatggacctgtgtggtagctagctgtttgaaaccgccctgcatatcttctggcattttcccattgaggatccccagacccatctccaaactcgcatctatcgcaatgatcaagcataggtactatggtacttgactgaagatgaatgctggcagcagaggaacccaatgctgcagttccatgatagagatcccccctctcgatgggccatgaggatgcgtctcgtcactgcgaacgaacgtcgattaggttacggagttcatagttaggaaaacttgtgcccttgtatagtgtcccaatgggctccccaatgcagcctctgagtgcaccctgtcccactctggcatccccctgctggtgtctagtgttttatttccctctcctcgtccttgtgattgaaaggcagtaaactaagggtgtcaagccccattccctctctactcttgacagcantaacgacgggtgtattgtgg

SEQ ID NO: 632120 - DNA, 370 bp, Homo sapiens
  misc_feature (14)..(14): n is a, c, g, or t
acgctcgctctgtnggggggcagatacaattcttcaggatttaggcaagatgggttaaagactaaaaatacaatcaatgggttaaaaaacaaaatctggctgggcgcagtggctcacacgtgtaatcccagcactttgggaggccaggagggtggatcacgaggtcaagagatcaagtccatcctggccaacatggtgaaaccctgtctctactaaaaatacaaaaaattagctgggcctggtggtaggcgcctgtaatcccagctacttgggaggctgaagtaggagaatggtttgaaccctggaggcagaggttgcagtgaaccgagattgggccactgcactccagcttgggcaacagagagagcgt

SEQ ID NO: 632121 - DNA, 252 bp, Homo sapiens
cctccatggtgcagttgttcaacaaatgtaaattttattcccccttcaaagttaagaaattagtgaattatggacaaaatgagtctagttaaaagaaaaccagttaaacaaacaaaataaaactatagacaaattaaagttttcagagtttaactgaccaaagaacaatttgagaattggccagccccctgaactagaataggttcagagtgactcttgggttgtcacatggtcagataatatttatggaca

SEQ ID NO: 632122 - DNA, 809 bp, Homo sapiens
agggttgtctacatagcgggcaagtgtggtctggtgcctgtcttggcagaaaactacaataagagcgataattgtgaggatacacctagaggcagggtatttctgctgtacgcagtggtgaagaagatcagcttctgacctcacctgggacaatctgaaaggcaagaagtcctggcatacggcgagttggcagaaccgctggctggaactatcactccatggtgcctgctctacaataagatcaatcactgcagatttgatggaattgtgtgcatgtgaaggttgtgcccctgggtctagagaaagactccagtctctgtagagctgtgtattgggctcaggcctaaatcctgtgtgaaccccaaccaacaaagagggatatctacggctacacaggcgcttctcaggtgtctggttgagaacgggatgatgtggcctattgtgaaacacgcagacgtgttccacagaatcactggggggagaatgaccctgtatccatggggctaggaattcttgaatgactcaggactatgagtaggtggtgccttgatggtaccaggaaaatctgtggaggagtatgcgaacttgccacctggcccagagtccccgaatcaggctgtgtgatcaacacggaagagataagggaagcttgcgtccaaaaagatcattacgtcaacaggaggcgtctgattggaaagcaagcgtactgactggatcgggcaattgaggtatgttccgggtcggaaaccaggagcttctgtcagagatgaccaggttgtgcgggccgaattcatgagtgaaacaatatg

SEQ ID NO: 632123 - DNA, 126 bp, Homo sapiens
  misc_feature (29)..(29): n is a, c, g, or t
  misc_feature (52)..(52): n is a, c, g, or t
ttccatggagacgagagcaggtggaagantatgtaagatctgaaacactganattgtctgcttctcatcttcagtgagattccaaaggatagtacagtgacagaacaagaataggcactctctaca

SEQ ID NO: 632124 - DNA, 664 bp, Homo sapiens
gcggcaggaggaaaaatgtttattttcaacgggggggatcgcaacagtggcttattaccaacaaatttttatagaacacccgctgggtgcaaaatggcttctaataactacaaaaaatattccccccggtaggaaatgctgcccacttgttgctcctggttgcttttgtggggggccttcctacaaaggtggccggggcaacaaattttgtggtttataataacaaaagttggataagttgttctcatacttaatacccaacagggtggtaatttacctactgggggcgccttatttgttattacccgccccaaccgccgcccctgtggaaaaagccttatgtaaaaaaaaaaaaaaagatttttttctccccaccaaaaactctttatttttttttgggaacaacacctgaatcccggggggggctttttggagaaaacaacttgtgttttaaaacgtaaaagggggggttccttcgttggaaataaaaaaaaaaaatcttagagggggggccccctctctcttttttaccgggccccataataggaaaaaaaccctactttgttttttaaaaaaaaaattttttacccccacaccccccccacccgggggggggggccaaaaaaaaaattttgtttagaaaaatttttcttttaaaccccag

SEQ ID NO: 632125 - DNA, 302 bp, Homo sapiens
taagaaagatgcctccttgtgtctcactgttttctagcactgaaacatgatacactttgtatccacctgcagaataaaacaatccagacaggcgctctgtaacttacacatcacttgattaaaattatagcctccaaatatagtgttttagaaaaggcactgtacatttttagaggcattgtaatgtcatttcccacctttaacccatttaacattgtttatattttaaaaaaatttcccaattttacttgttaattaaaaaacccctgaaattaaatcgtaaccatctcaacccatgtcgt

SEQ ID NO: 632126 - DNA, 715 bp, Homo sapiens
  misc_feature (336)..(336): n is a, c, g, or t
  misc_feature (511)..(511): n is a, c, g, or t
  misc_feature (574)..(574): n is a, c, g, or t
ggtgtgagatggtatctcattgcggttttgatttgcatttctctgatggccagtgatgatgagcattttttcatgtgttttttggctgcataaatgtcttcttttgagaagtgtctgttcatgtcctttgcccactttttgatggggttgtttgtttttttctttcattgctcgtgcttttactgtctgccttttcgattatagctgtctttgtagacgtgattttgatttgcatttccataatgaatagtgatgttgagccaattttcatatgtttgtggatatttgtacatcttctttggagagatgcctatttaaatcctttgcctatattgnatttggtttatttgccttgctactattgagagtggtatgattcctttatattctggatataagacccttatcagatatatggcatgcaaatattttattcattgctgcaagttttgtctctttttgatggtatccgttggagcacgaaactttaaaattttgatgaagtcgaatntattttttctttcattgctcgcgcttttgctggtgcaccctaaaaatctttgcctaaaccccngggtcaggaaaattcactcctctattttccttctagttgtacagaattttatgcctataccttaggtttttaatcttttgaatgctttttgtgttcggcgtgaggatagggcattgagttttcttacccctttgtgggttt

SEQ ID NO: 632127 - DNA, 163 bp, Homo sapiens
ggctgggattacaggcaagagccaccgaacccagccaatattggactttaaataatagccattctgagggtggtgaaatggtactccatgggtggttgtgatttgcatttctctaatgatcagggatgagcttttttttatacatttcttggccaggtgtatg

SEQ ID NO: 632128 - DNA, 383 bp, Homo sapiens
ctggaattctgcacgcgcacagctgtgtgtacacaagagaagagctctctgtgctcttgggagctctataaaaataccttgtggcgctgctcctgcgttgagaggcgagccaacacctgtggcgcggggcacggctctgcacaggcccgagtctcaacggacttgtgcaccccgagttgagtccgagtggcgagctctgcctaccggctcttgagcaatttggcactgtggtggagggccagctggtcacaagaaggggattgtgaatgagacaagttctgttgtaacggctgtgagacagggccacttacctctatgtcacgtggggggttctctctagggcctcaagaaccctgagtgaggggcaccccaccggcccatgg

SEQ ID NO: 632129 - DNA, 140 bp, Homo sapiens
ctagaaagctcttaagactcctccaaaagactacagattattaatcaatgtacacaaatcagtagcactcctatacaccaccgatgcccaaccattggatcaaatcaaggatctaaattcccctttacaatagctgccaa

SEQ ID NO: 632130 - DNA, 273 bp, Homo sapiens
  misc_feature (131)..(131): n is a, c, g, or t
cgaggatccgggtaccatggcaagtctcatgaggctatttaccgaatttatcctctgtctgaccatgattttttccctcaaatacaaccactcctcgacttttcaccctcaaagtataaaaagtatgaaanataaacaagctcttgcactgtacacttagaagtgtacaattaaagcattatagagctatctacacaccgataaatcccatcgaatcttgaataatccatcaatacgtagaacgcaagggtgcagacagaactaaaaccaact

SEQ ID NO: 632131 - DNA, 82 bp, Homo sapiens
acaaagatacttttaatactttgcggtgagaggctggagagtgctacaacggataagaagaaataaaatataaattctaaag

SEQ ID NO: 632132 - DNA, 208 bp, Homo sapiens
agtattcatgaagatacagtgagtcccaggtagataaccctgtcccagggtgtcagcaggatgtgtggtccacaatctccctcaatgcacagcatgagtcacaaatgtccatccacccacaggcctgtgcttgccgtgtgtgtctcctgcagtttgcactgttccttgttataaaacaagactatgccaataatgttatctctgttca

SEQ ID NO: 632133 - DNA, 136 bp, Homo sapiens
ttacagctaataccagacactgccgcactgtctatctcagctcagtgtctggccatattcttttttttctcttctttttggaaaggcacccccagggggctttcagggtacccgagctcaattcggaaccctgggc

SEQ ID NO: 632134 - DNA, 423 bp, Homo sapiens
cattctgatacagtcataagtagtgtgatgcacacatataatgagtgtacatacagctgaccgcaatgaactatacgacgcatatctcggcacatatcctatatgatataagcaacacatgattgatactttatatcatctctggattacttaataccaagatacagtgtaaatgccatgcaaactacctgtaacactatattatttagggaataatgaccaaaatagtctgtacagatgcagtgcttacaaatattaatagacccaaggttggtcgacatccatgtggatgtggaacctgtggttacagaggctgactctttgagccatactaggttcgtagccctttattgacattcaggatttagtcagaactgtatgaggaacagagatcattttatgaataaagtaagtcaggaaggt

SEQ ID NO: 632135 - DNA, 1005 bp, Homo sapiens
gagtgggggccagctatcagttttggctggtggtgcatggcgtgtgtggacaatagggcgcgtcttgtccgtgactggttgtggcgccaaggggtcttcctctggtgggggcaccagggagctcagaacgttttttttgtagcgcgcgggtgtccccttcgtgggggcgtgtctacagttgcttcttggcgcccccgcgttgtctttgccaccgcccgttgggtgttgttgtcccaagacgctggcgcccgcgttgtttgacgtgggcgttctccgttgtggggttcaatacgcttttggcgggccgtcggcgtacgactcaattgcttgggggctcccccgctggatgagggggcccccctgttgctccgcccccccagtttggtgtagtggccgcccaccctgggggttatggttgttttttgcctccccggcgttcgcagaatatctgggccccaagtgctgattccccttctcttcgggggttagagccccccctgcgataaaccacaggcttccggtgctcgcccttataagccagcacgcgtgcagtcaataggctttatgggaggggaccgccctcaacaaatgctggtgcgcgtgggcgaaatgacgcggttgacccccagaggtccgtattgtgtccccgccccggtcccacaaaatcgtttgtcgttctcccccccggcgggcaaagggattggtgtggttgtctgccgccccctcgcccgggagcccaattgcggtgagaaagtctggtcgggccacgggttttcggaccgctagtgaggtacacttggttttgtttgccccggcatgtcgcccgactccggcccgccggtatttttggacgcacaactcgctcccgttggagcctcgtcgttgccatcgcctccccgcggccgtcctcgctaggatcccacccgtctcccactattcctcttctcgcatttggcggacggagtatttcccccctttgggggccttccccccctaaacataaca

SEQ ID NO: 632136 - DNA, 908 bp, Homo sapiens
  misc_feature (152)..(152): n is a, c, g, or t
ggtgtcccccttaagccccccgcggggatgttgtttttgggtgacacaccaacgtgggtgtgtttgccgacgggccctcctcggcgggtatttgttctggtgcgacgacgtgccgcccgttcgttgcgccaccggtggtgaggggtgccganccgcctgctgccgcctcactggggcgaagtatttccattccgtagggggcgctttgttaagaagtgctgctgagcgcgcggtaggttacgcacttctgcactcgaaaaggggtgttattctgggtaagactacgtatgctcgtgtctatttcaatagatgattatttgttcaacacatgcgcttataactacatggggccaacatttcttccccccacttccctctcggacaaacaccattggccctgtactaccttcgtattcctactcagacatacccacaggttgagaaagattttgactccctgtgccgtgttcttctactcccaggaagctctttttatttgtagttctagttatggatattaataaaatgtgtcccccgctatgccatggcaattaatctccacacacacgaacgccgcatttgttttagagcacccacacatcaacgtgctcgccttttggagtcattcccgccatccaacaattcatctcggcgactctctccaataatcccatccccaagccggcctatctttcgtctaatccaccactctgagtccttccacggggagtgctttctcttctttacaccctatttattctttctgtttatatgcagtgcttcctaagaacacgcccaaaagttctgttagtattaccaccgtgctagatataataaacgctatgtctattccctttctcgcaaatttttttccctatactcatcaccccccccggccacaaaacaaa

SEQ ID NO: 632137 - DNA, 331 bp, Homo sapiens
ccttcctagagggtggggccgcctggctgtcccgcctgtggctcggtgccttctcggagccagcatccgctagaccgaactaggactggtaggaggggtgatcggcccaacctcaggccccagccgcgggctgggaagtgttccccatggacgaggggcaagcccctcgcatgtcagggtgtcgtctatgtagacggggaatctgcctcctctcaaaggggaattctttcagcgagtcaagccccgtctgatacggggctgactcaagggcagagccccaaagaggacctggataggttgcgagaagtcggagatcaaggggggtccgggg

SEQ ID NO: 632138 - DNA, 367 bp, Homo sapiens
  misc_feature (171)..(171): n is a, c, g, or t
  misc_feature (212)..(212): n is a, c, g, or t
  misc_feature (224)..(224): n is a, c, g, or t
agtaaaaagaaagaaaaaatattataaatgtacctccgcaggctcagccacaaactggggctgtgtcagggccacatgaggaacgggttttggaaggcgcccatggcatgtgggcccggtctcatctgctctcctctacccccagtgtgtgcatacaccttctgaccaggnccaaactgtaccggtcaaagctgccaagatggaatacgaanttcaaagttccnccaacccgcctcaacctggaggcgcatcacactacatggcaagctgacctgtgacttcaaagattaaatgtgtggcctttgtactgaaatcaagccagccaatgtgcccccacataaaggcacgctgcctttgctccctttga

SEQ ID NO: 632139 - DNA, 224 bp, Homo sapiens
aaggatcccgctcgtaatagcgggcatggggctcacgctgtatcagcacttggaggcagagtgcaatcaagtcaggattctgacagcggcatgtgacggcactgtatctcagctatcggagctgaggcaaaagaattgttgaaccccgggaggcagagggttggcagtggagcccgagatcgtgccattgcactccaggcctacaagtttcgaatcacatcagt

SEQ ID NO: 632140 - DNA, 492 bp, Homo sapiens
cgagtttctggtgcttgtaatcgggtcgtgtttcgagatttacttgatggcggttctcagcctcgggcttgtggtgtcgatcgtggaggagaggctcggctgggatgccattcgtgttgggtcgggtataatggcgggcgggagattgtccgggtgggcgctgtcgggtctgttcgtgttggtatcgggcgcgatcgcgagggatctgcagagaatgatggacagtctggatttgtctttagagtcaacgacatcgacggtgatgatggtagcgacgggggttaaagataaagtggggttaatctttttgtttgggatagttgtggtttggagttacattgttaccacagttttttactgcgagtgtagaaagcgacacgtaggtaggggtgaagatgagagcgttacagtttagaaatgtaatgttttttcaattctttttaagccaatggaacattttgttgctttcaatgataaaaaaaaagtcgacgc

SEQ ID NO: 632141 - DNA, 223 bp, Homo sapiens
gagaaaatgaccagtgccttcagtcgcagcaatcaccttgggagactgtacagtaacattattcagtgagagatcagaagaacaaatggcatcttttcagaacgctgtcaactgttccacacccaagtctgttttccagttgcacagtcttggatactctgaacattctctcagagttaaggctcaggttagtgatgctccaaccagagcttataactcacat

SEQ ID NO: 632142 - DNA, 103 bp, Homo sapiens
gcgtcgacggggaggtggtccttgagcccaggaggtcaagcctgccatgagtcaagatcatgtcactgcactccagcgtggctgacagagtgagcccgtctcc

SEQ ID NO: 632143 - DNA, 200 bp, Homo sapiens
tcgataagggccaagcatagtggggtatctaatcccagttgggtcttagctattgtgtgttcagatatgttaaatgccactttcgtagtctatttgtgtcaactggagttttttacaactcaggtgagttgtagctttgttggggaggaggtgatctaaaacaccctttacgccggcttctattgacttggcttatcgag

SEQ ID NO: 632144 - DNA, 188 bp, Homo sapiens
tgtcggacttactctcctacctaagtgcgtgcggacacccgatggaagattcgatggacatggacatgaccccgctcagaggccgcagaactatctattcggtggtgaactaaaggccgacaaggatgatcgcattgaggtggataatgatgaaaatgagcaccagatgatctctgaagaagcggaca

SEQ ID NO: 632145 - DNA, 237 bp, Homo sapiens
catagctgactctagaggatacacccaccgccagtgagactggaagcatgactggagacgccttaggaatcaaaacgcaagctgaagggcacgcagcacttcttacatgcctgcagaaggaggaagagagagcagatggaggtcccacacacttttaaacacgaagatcacatgagagctcactatcatgagaacagcaaggggtaaatctgcccccatgatccaatcacctcccac

SEQ ID NO: 632146 - DNA, 667 bp, Homo sapiens
  misc_feature (106)..(107): n is a, c, g, or t
  misc_feature (122)..(122): n is a, c, g, or t
gaggtggcagagctaggatttgaacccagacaatctgacttcatgattttgcatccaattcgtgtctgtgccttttaaagggtgaggtctgtgtcactttgggtgnngagggggagcatggngggccatgctctgggcagctgttccaagacagagctgacccttccattaccaatggcctgtccctcaccaacaagccaactgccacagatgacccacttcataccacattcacatctttccacctgaaatggctaacaggtattaaatccttggttggtgtttaaagccaacccaagaacagggtgttaggtactgttttaagcacctagataggttagcataggggactgcaaatggtgttccgcaaagcaaatcctgtttttgaccatgaactaagaattttattttattttattttttattttttgtagaaataggatctcactatgttgcccaggctgttcttgaactcctggcctcaaatgatcttcccacttcagcctcccaaagtgcagggattacaggcacaagccaccgtgcccagccaagaatttttatttttgcttttaaatagcaaaagaagaagattctgtgactcatgaaaatgatatgagattcgaattccagtgtctataaataaagttttattggtacacagccacaa

SEQ ID NO: 632147 - DNA, 630 bp, Homo sapiens
gatgccacctactattggattcgactcccactactaggtatctacccagaggaaaagaagtcattatacaaaaaagatactggcaaaggcaggtccatagcagcacaattggcaatggcaaaaatatggaacggcccacatgcacatcaatcaaggagtaaagaaaatacggtatatgtataccagggaatactactcagccataaaaagatcagccagcggatcttggacaaagcaaccaaaaccatagggggggggacgcacaccctatccaaaaaagggggcggggataattagcaagccacatgtagaagaaggaaacgggatcttcctctttcaccttatgcaaaaatcaactccagcaacatccaggaaccgggagggaatgggagactattattctaagtgaaatatttaggattggaaaaccaaacatggtatgtcctcactcatatgtgtgagctaagctatgaggacaccaaggcataagaatgatacatcagtcttgggggactcagggaaaagggtcggggagggtgatggatacgagactacacacggggtacaggctacactactcaggtgatggtggcccagagtccagcaatcataataagagaattgtcatgt

SEQ ID NO: 632148 - DNA, 820 bp, Homo sapiens
  misc_feature (634)..(634): n is a, c, g, or t
  misc_feature (711)..(711): n is a, c, g, or t
gcgtgaaacttggtggaagacgcgttgaccagtcgtgtggaatcgaaagacagcggggtaccctgcgcctatgtcggacgactgatcggtgaagtaatctcccgaatgggatgaaggaggagcgtgatcaggcagctgtttgccgccttcggcagcgactgacgagacgtgcgagcctgaagttcaccaaagatggcaagttggccgcgaagttaggttttatggggttcaggagtccgaggaagaggcccagaaggcacagaagcatttcagcaagagcttcatcgacacatcccggatcacagtggagttctgcaagtcattcggggacccggccaaagccagagcctggagcaaacgtgcccagaaaccaagccaggcccaagcaggctccaaaagactctactactccagaaattaggaaagatgagaacgaggaaaaaggtggcaggtcaactggagaagctgaaggaggatacagagttccaggagttgtctgtcagttcatcagaggcgggcgtcaggcgagccacttgggcgaagtgatggccgtggatgctgagccctcgaaagggaagagcaagccggcagtgactacctgaagttcgactcccgatactgggcggagagtgangaggagggagccgggggaggcctggaagaagaggcaagcctagaagcaagcagtgtgaaaaggggcggggacatggntaccgaaaccacagggaggcggcgccctcccgggaaaagaagagaaacggcagggaaggcgggcccgaaaagaccgacactagagaacgggggcacaagcgcggaaccc

SEQ ID NO: 632149 - DNA, 216 bp, Homo sapiens
  misc_feature (43)..(43): n is a, c, g, or t
  misc_feature (76)..(76): n is a, c, g, or t
  misc_feature (124)..(124): n is a, c, g, or t
  misc_feature (151)..(151): n is a, c, g, or t
ttggatttagggtccttttggtctgtcctgcgggacacacacntaagaccatggaaacttctcccagaggacagcntgagggtaaagtataaattgctctgggaaggagagagggagagaacangctgtgtctgcagttcatgttgtgtgnagttagaagtcattcttgtctgtagtaaggtgcaataggtagggttttgccttgttttgtaagtc

SEQ ID NO: 632150 - DNA, 584 bp, Homo sapiens
cggagtctcgctctttttgcccaggctggtgtgcagtggtgcagtcttggctcactgcaacctctgcctcctgcgttcaagtgattctcttgcctcagcctcccaagtagctgggattacaggcacctgccaccacgcccagctaattttgtatttttagtagagatggggtttcaccatgttggccaggcggtcctgaactcctgacctcaggcgatccgcctgcctcggcctcccaaagtgctgggatcacaggcatgagctattgtgcccactcagaacaatatattcataaaaataaatacatattataaactggcaattccatttctcagtttatcctagataaaaagttgcactgcagcaatttttaagataaaaattggaaacaatttaaacattcatcagaaagaaatatatatattccatagtataatctccacactatggaatattatgtgatatgatttgtcactgtgctccacccaaatctcatctcaaattgtaatccccacatgctgggggaggggcctggtgggaggtgactgaatcatggggggcagacttctcccttgctgttcttg

SEQ ID NO: 632151 - DNA, 1141 bp, Homo sapiens
tctcttgaaaaaaaacatgtcataaattttaaagtggttaggtccccatttacagcattccgtgaattcaacaagcagaacaccaaagggagttcaaataattccaattaaacattctcatttaaataagtggcgcttatattgtgatataaagaaattgtgcctttcttgtggtattacacaccgtggaatgtgttatatattctcccatatgtgttattttacaccaggggtttacaaaaatgtgtcctcctcatttataaaaggtattaccccccaaaggagataactcgtacaaaacaaacaagagggtttctgagaaattatacaaacaaacacaaacaaaaacacacaaacaagacaaaaacacacaaccacacacaacacaaagcaaaacaacaagaacaagcacacaaacgaacgagaccagacaaaaacaaccaaaaaccacacaccgcaccaaccaacagaaagcccaaaaacaaaacacccggaaaacagaagggagaagcagagcagagaaggtaccacaaaacagagcagcgcgggcagagacgacacgaagggggcgcagcaagacaagagagcagaacgaaaaaagaacgaacgcacgacggcgagaggaagagagagagaaagaggagcaagaacgagacggacagggagaaagacaggagaagaaatacaagaaggagagaaggaaggcgaggagagggagaagaagcacgaaacgaggagacggaggagaccaaaagcgcagaacaacaaggaagaaagagcaaagcaaagaaagaagaaaagcagaacgagaacgaacaaggaagcgagagagatgaggacgcccgagagaggacaaaagaagagacgcaggagaaagaagaaaaaaaggcaagacaacggacagcagagagaacgaggagaggcaacggggtatgcagcacgaacgagagaaaggacgcggcactcgcacggaagcgagaaaaaaaagaagacagaagagagaaggaaaaaaaaacgagaaagaaacgcagaggagacgaacagaaacaacagcacgaaaagagagagatgggaaacaagaagacaaacaaaacccagaacaagaagcaagcaaaaaaccgcgaggaaggacggagagacg

SEQ ID NO: 632152 - DNA, 153 bp, Homo sapiens
acagtcagctcgggcccgaaatcctaattacggtcatatggttatgagttatacagtatatagacttttatagattttctttctttttttttttggcaccacactcacagcaggcagaagttcggggggccaggaatctaatctggggccaca

SEQ ID NO: 632153 - DNA, 275 bp, Homo sapiens
  misc_feature (193)..(193): n is a, c, g, or t
  misc_feature (208)..(208): n is a, c, g, or t
  misc_feature (261)..(261): n is a, c, g, or t
ctctagaggatcccccaacgcatgtgccgctcccaacgcatgtgccgctcccaaccatgtgccgctcccaacgcatgtgccgctcccaacgcatgtgccgctcccaacgcatgtgccgctcccaacgcatgtgccgctcccaacgcatgtgccgctcccaacgcatgtgccgctcccaacgcatgtgccgctnccagccaggcccatnagattattactatatccacaaaatgattaatcaatcattaaatgggccatttncaccttgaatttca

SEQ ID NO: 632154 - DNA, 919 bp, Homo sapiens
  misc_feature (10)..(10): n is a, c, g, or t
  misc_feature (71)..(71): n is a, c, g, or t
  misc_feature (76)..(76): n is a, c, g, or t
  misc_feature (80)..(80): n is a, c, g, or t
  misc_feature (83)..(83): n is a, c, g, or t
  misc_feature (113)..(113): n is a, c, g, or t
  misc_feature (120)..(121): n is a, c, g, or t
  misc_feature (131)..(131): n is a, c, g, or t
  misc_feature (136)..(136): n is a, c, g, or t
  misc_feature (140)..(140): n is a, c, g, or t
  misc_feature (143)..(144): n is a, c, g, or t
  misc_feature (151)..(151): n is a, c, g, or t
  misc_feature (157)..(157): n is a, c, g, or t
  misc_feature (162)..(162): n is a, c, g, or t
  misc_feature (165)..(165): n is a, c, g, or t
  misc_feature (188)..(188): n is a, c, g, or t
  misc_feature (202)..(202): n is a, c, g, or t
  misc_feature (207)..(207): n is a, c, g, or t
  misc_feature (224)..(225): n is a, c, g, or t
  misc_feature (233)..(233): n is a, c, g, or t
  misc_feature (235)..(236): n is a, c, g, or t
  misc_feature (248)..(249): n is a, c, g, or t
  misc_feature (271)..(271): n is a, c, g, or t
  misc_feature (283)..(283): n is a, c, g, or t
  misc_feature (290)..(290): n is a, c, g, or t
  misc_feature (300)..(300): n is a, c, g, or t
  misc_feature (313)..(313): n is a, c, g, or t
  misc_feature (320)..(320): n is a, c, g, or t
  misc_feature (323)..(324): n is a, c, g, or t
  misc_feature (347)..(347): n is a, c, g, or t
  misc_feature (356)..(357): n is a, c, g, or t
  misc_feature (366)..(367): n is a, c, g, or t
  misc_feature (369)..(369): n is a, c, g, or t
  misc_feature (374)..(377): n is a, c, g, or t
  misc_feature (382)..(382): n is a, c, g, or t
  misc_feature (384)..(384): n is a, c, g, or t
  misc_feature (392)..(392): n is a, c, g, or t
  misc_feature (399)..(399): n is a, c, g, or t
  misc_feature (414)..(414): n is a, c, g, or t
  misc_feature (416)..(416): n is a, c, g, or t
  misc_feature (418)..(418): n is a, c, g, or t
  misc_feature (424)..(424): n is a, c, g, or t
  misc_feature (426)..(426): n is a, c, g, or t
  misc_feature (430)..(430): n is a, c, g, or t
  misc_feature (432)..(432): n is a, c, g, or t
  misc_feature (434)..(434): n is a, c, g, or t
  misc_feature (440)..(440): n is a, c, g, or t
  misc_feature (444)..(444): n is a, c, g, or t
  misc_feature (446)..(446): n is a, c, g, or t
  misc_feature (463)..(463): n is a, c, g, or t
  misc_feature (475)..(475): n is a, c, g, or t
  misc_feature (492)..(492): n is a, c, g, or t
  misc_feature (502)..(502): n is a, c, g, or t
  misc_feature (510)..(510): n is a, c, g, or t
  misc_feature (517)..(517): n is a, c, g, or t
  misc_feature (538)..(538): n is a, c, g, or t
  misc_feature (541)..(541): n is a, c, g, or t
  misc_feature (549)..(549): n is a, c, g, or t
  misc_feature (551)..(552): n is a, c, g, or t
  misc_feature (554)..(554): n is a, c, g, or t
  misc_feature (559)..(560): n is a, c, g, or t
  misc_feature (564)..(564): n is a, c, g, or t
  misc_feature (570)..(571): n is a, c, g, or t
  misc_feature (576)..(576): n is a, c, g, or t
  misc_feature (578)..(578): n is a, c, g, or t
  misc_feature (881)..(881): n is a, c, g, or t
ggggtgaggngagggtgttgggatggtgggtgggtgggtaggattgagtgaagaggagggtattgggaggngtggntgtnggnatgaggtgattgataggaaggggatctagntagggannaggggaatgntgggnatgnatnnatggttntgtttntatanaanttgatgatgtgagatattggagntgtgaaagaggaanagtanagaaatgtgggagtgannttgggtgntnnattgagatggtnnaggggtttagagtgtgaagagngaaggggaaaanaggaggngaagtgtggngtggggataattnaagatgnagnnaaatgtggaactaaggtgggttnagtggggannagggaaggnntnatggnnnnagtgnanaattgtgncccaacnccgggaatgaaactnangnatatgngnaaangnanatgaanaaananacaaaaacacacagagnaaataacattantgaaagaacctggaggntattaaatanaaaatggnagttttntttcaaagtgaaaatatttgnttntttgatantnntnagtgnnttgnagtgtnncaatnanagaagagtagatatgggaagggccaagaggagtatgttgcgagtggccctacaagtccatgtgtgctgaagtccctatagcaaccaccttactcttcagcccagtagctgcctcccatgtgaccattcacccgattggcaccattgctggagctactgtcacagggactttttgtgcaggtggtcacatcttcttcctctgagctgctctccacatcactgcgatcatccttcgataccagaatggatagattcctagtcgtgtaaccataaaaacagcactgaagatcacaaaaagggtgtnacagagccgctgatacttggcataattggccagtttgg

SEQ ID NO: 632155 - DNA, 349 bp, Homo sapiens
  misc_feature (47)..(47): n is a, c, g, or t
ttacccattatatgatatacttaatctagcactaaaccaagtgtttngcacctaattaaaaagggccaggcatggtggctcatgcctataatcccagtgctttgggaggttgaggcaggaggatcaattgagcccaggagttcaagaccagcctgggcaacatagcaagacccctcatctctacaaaaaatttaaaaattagctggacatggtggtttgtgcttgtagttccagctactcgggaggctgaggtaggaggattacttgagaccaggagtttaaggctgcattgagttgtgattgcaccactgcactccagcctgggtgacagagcaagactctgtctcca

SEQ ID NO: 632156 - DNA, 564 bp, Homo sapiens
ctttatggtaccattgaggttacagttatgtggcgtgctcttagtgtatttcaggaaaaagctgatggactaagaccgagcttacagacgtgggtttctacactgagcgcaagggctgactacgctgtatttcacaaccgagccctagcgccagctcagcaccctacgctcaggaagcggattttgcacacacactactgcattcatacagagttcactgaagtctattaccaagtgtcttttatgaataaacaagtacaaagtccaatttggatggctgctataaaatacttaggaatctctgcaatactttactacaaatacaaatgcccaagaggtcagggaaatcagcctgaagaactgggtacaggttctattctttgtggaaatttcagcctaggaatgttattcccggtacagatgtacacagtcaaaaaggcttatcgagctgtttgacgagttcttgaagtgttctggatcagtgatctgcctgtgaactttagttcacgctgaagacagtcttctcagttttcatgactgtgaagtgtgaaaatggaacgcatc

SEQ ID NO: 632157 - DNA, 189 bp, Homo sapiens
cactctaaggaccctctgctcctcttcatctgagggatgacagaaattacacaggctcatagatctgtacactctaccttcctgtggcagtgatatgggattcattatgaatcatttgtttacaattgacgtccactgtggcattggaaagaccagtggggtctgactacaagtttaaacattttcttt

SEQ ID NO: 632158 - DNA, 225 bp, Homo sapiens
ttgaaattgactttgtccccccaaaaacgtgtgccccctttggggaaaaacttcgtcccaaccaaaaggacaaaatgtgggttattctggaaacccccgtttcccaaatttttttgcatattcatttgcccaattttgttttggttggacaagcgtgtgggcttcaatgttaggctttttatatgtatatcctgttatcaataaaaccattatcccagtggttta

SEQ ID NO: 632159 - DNA, 610 bp, Homo sapiens
  misc_feature (177)..(177): n is a, c, g, or t
gcccagtgaatggttccaagccacgaggcacacctgggtgtgtgaacacagtttgttagccccgcgttaacactaagctgggaggttttctttggcgcccaattggttgtttcccccctcgctgagatttctgtgggtgaattctgctgtttgagataataagagaaataaggtatncacacgcggctgttcttctggtcctcccagagaacttggaatttaaaggtgtatggaagggaactgtttgcccgcgatcactcactgaattgggaaccccgagctgcacactaccacgctgggttatctatgaactccgctgaaggttctaacttcacgaactttcctcggccctccctcccaaccccgcagatgccacgagttcttctgaagaaagagaggctctgtggtgtataactccacgctagttagatccaagcccaatgtggactgaattctgcttgttgatccgtgttgaagaaagtgccaaagggacttttatatatttgaccgctgtagggaattgtctattcctgatataattaccgtagtgactcttgcttaaggccagagtttcagatttactgtttggaataaaccccacttcttcatg

SEQ ID NO: 632160 - DNA, 101 bp, Homo sapiens
gcacgcaggatgccaagaagtcctagagcgcccggagcccccccccggcctccggaagatcagggatcaggaggggagaagaaggagcctctgctgcctcc

SEQ ID NO: 632161 - DNA, 754 bp, Homo sapiens
  misc_feature (279)..(279): n is a, c, g, or t
tgtgcccttgtcaggagggtggtgtttgtcggtcgcccttcccggtgttggtcccctcttggggaaaacacccgttgtcttggcgcggtatgttccccacaggaggtagatttccccccccttggggggcgcgctctttatctgtcccgatcggggtggcgccctctatttttctcggtgttgcacgaccacagcgcggcatgctcatcgttgccgcgacacgcgcgtgctgatccgcaagtgtctccgcacattgaagagtaaggttccactatcacnctcagtcacatccacagtgagaggtggggcccaaatagagtttgttcctttttaccctctccacaccccagctgcccctctgctgttgtgtaggtgtcgcccgtcccacccgctcatatagggctgtggcggagttagtgcattgtacccagcacactagtagaggtgtgtgtcaccgctcagatgtggcctctcagtgacgacgtctcacacaaatagtctgtcaccccacacacagaggagagcgaatacgccgcgcacactgtgtgtcacctgacacagtaaagataaggagggcagggggcaatagtgaggatcctgcgttcacaccacgtttcacggacacctaatggtgcttgggagagactgaagtctctcttataaagggcaattgttcatttatcttctacggggagcacccctcgatagagtggtgagacactctcttctgtccccatcaatagtacagaacaaa

SEQ ID NO: 632162 - DNA, 942 bp, Homo sapiens
  misc_feature (680)..(680): n is a, c, g, or t
ggcgctcgggggcggaacgcggggatcatggaagctgataaagatgacacacaacaaatcttaaggagcatcgccagatgaattataaacgatgaccaaaatagggacctaattgatgaaattacaacaggaaaaatattcagctaaggaaggagatccaaaagcttgaaacggaagtacaaggaggctaccaagagatccagatacagaggattatcctgaaacaaagaggatgaacttctcaatcagtggaaacctcccgtgagaatgacagccagttgggtcaaaattattctcctgtccggatccaaggtgaagctcgaaaagttcctttatgagatacacaaaagggaccagcactttatccactcttggaaaagcgaaggaaggtgggctccacaactggtggtcagggcattgcagtaaccttccatggtacaggattaaagattgtaaattctggaggtacgggcccaagccagttcccattaacaattcaggagtccagcatccaggtcacattgtacgaaagttctaaaacttgaacaatccaattgttactggaaatgcctgaacacgtggggtggagactcaaatgaaagaacaactaagagtgaagctttaaaagtcccgaatctggaggcggcgaggtgaaccgcgtggactaatgacggacagtncgggaggtgaggccatcagttggtggcatggagtgctgcacaacattttggacagaacgataccctctttattaaatcacactggccatgaggttctggtccataccggattcctgacagtatcgatttcggaactcaaaggcgggctcgggagggcgccagggtgagcatgtgggtaaacacccttcggcaatggggcgcagtgcgttcagcactcactgatgtgatataatccgcgggaattcacaacctctctatcttt

SEQ ID NO: 632163 - DNA, 883 bp, Homo sapiens
  misc_feature (1)..(1): n is a, c, g, or t
  misc_feature (56)..(56): n is a, c, g, or t
naatgtcaggctggtactggtcctggagttatggatactcgctcgccttcatgcangacatgtacctcctaaatggctctactttgaaccttgctgggcaaggaatgagattttcaatgtgaaagccatctacctgtgtgcaagctcctgccggccaaccccagaccccagcactggagccagtgcgcctgtgcccgccgaccctcagcatcctcctcagaaatggctggtgagcatcagtgaagcccctgtgccatgcctccacctgagcctcagtgatgctcatgctttaatgtgatggagtcatgtgcacgggtgtgtcctcaacccctccagtgacccattgctgccctagggtgatgccagacactggtgcctggcagtttcctccctaggtgaagcttcagtgctgctcccatgttggagcccagagcccactgttgggtgaccctgtcatgcctggcttgcagcaggggactggctctccagacataggccccactgggacagctgagtggtagctttatatgatccccaaccggggacagcgggatctgacagtccctcctccagtgtggcttgcagagaactttaccctgcgaggagggctcggaatggctgtgccaagccccaatgtacttgagggtcgccacgcacagacttgaccctgagacatgccatggtccctgaaaggtcaacaccaccaaggatgtacggcgagtcaacgcggacggtgggatgacggcatccttgacttcctgcaggaaccaacagccccccaagaatgctcgaccaattgatgccctgcttggcccaacgactcctggccccccagtaagccttctcacgcttgccccaggaggctcctgcccacctgcgtcga

SEQ ID NO: 632164 - DNA, 594 bp, Homo sapiens
  misc_feature (3)..(3): n is a, c, g, or t
  misc_feature (71)..(71): n is a, c, g, or t
  misc_feature (74)..(74): n is a, c, g, or t
  misc_feature (93)..(93): n is a, c, g, or t
  misc_feature (113)..(113): n is a, c, g, or t
  misc_feature (121)..(121): n is a, c, g, or t
  misc_feature (124)..(124): n is a, c, g, or t
  misc_feature (132)..(132): n is a, c, g, or t
  misc_feature (134)..(135): n is a, c, g, or t
  misc_feature (137)..(137): n is a, c, g, or t
  misc_feature (139)..(139): n is a, c, g, or t
  misc_feature (141)..(145): n is a, c, g, or t
  misc_feature (148)..(149): n is a, c, g, or t
  misc_feature (151)..(151): n is a, c, g, or t
  misc_feature (154)..(154): n is a, c, g, or t
  misc_feature (159)..(163): n is a, c, g, or t
  misc_feature (169)..(169): n is a, c, g, or t
  misc_feature (174)..(175): n is a, c, g, or t
  misc_feature (183)..(183): n is a, c, g, or t
  misc_feature (198)..(198): n is a, c, g, or t
  misc_feature (200)..(200): n is a, c, g, or t
  misc_feature (207)..(207): n is a, c, g, or t
  misc_feature (214)..(215): n is a, c, g, or t
  misc_feature (229)..(229): n is a, c, g, or t
  misc_feature (238)..(238): n is a, c, g, or t
  misc_feature (245)..(245): n is a, c, g, or t
  misc_feature (266)..(266): n is a, c, g, or t
  misc_feature (272)..(272): n is a, c, g, or t
  misc_feature (274)..(274): n is a, c, g, or t
  misc_feature (278)..(278): n is a, c, g, or t
  misc_feature (281)..(281): n is a, c, g, or t
  misc_feature (287)..(287): n is a, c, g, or t
  misc_feature (289)..(290): n is a, c, g, or t
  misc_feature (297)..(297): n is a, c, g, or t
  misc_feature (301)..(302): n is a, c, g, or t
  misc_feature (307)..(307): n is a, c, g, or t
  misc_feature (310)..(310): n is a, c, g, or t
  misc_feature (312)..(312): n is a, c, g, or t
  misc_feature (318)..(318): n is a, c, g, or t
  misc_feature (323)..(324): n is a, c, g, or t
  misc_feature (346)..(346): n is a, c, g, or t
  misc_feature (359)..(360): n is a, c, g, or t
  misc_feature (379)..(379): n is a, c, g, or t
  misc_feature (396)..(396): n is a, c, g, or t
  misc_feature (407)..(407): n is a, c, g, or t
  misc_feature (415)..(415): n is a, c, g, or t
  misc_feature (449)..(449): n is a, c, g, or t
  misc_feature (491)..(491): n is a, c, g, or t
  misc_feature (495)..(495): n is a, c, g, or t
  misc_feature (499)..(499): n is a, c, g, or t
  misc_feature (521)..(521): n is a, c, g, or t
  misc_feature (541)..(541): n is a, c, g, or t
ctnttcaatcatggtgagagtttgtatgattaataagatgctgctttttcatgaaatgcttggcggtgaanganttcttagcctgtgagatgngaccatcccattaactttgncgtttctnttnattaatanannangncnnnnnatnntnaanaaaannnnnaagatnttaanntttttatnataattatttaaatntnaggtaantttaatnnatttattaattttnttttttttnttttttnattttttatattttatttttnattttngntttnttngttganannggttggnagtnnttagnggntntgagangagtnntggttgttgaaaagatagaggnggagaagagttgnnggatgggttgattatttgntagagaattgatagttngtgtttttaanagtttganttaaaagtttaatgtgaaaagaaattgtactganaggtaaaggaggaaatggtgatgaagtggggttatgtgagantgtntatntttttataagataggtgcagantgtttgtgttagttataggnttaggtaaagtatgttgtggttggtgggttgtgcagggatctctcccaccact

SEQ ID NO: 632165 - DNA, 287 bp, Homo sapiens
ggagttcctttgtcttaaaatctcctgatgactaaaacttaacaccaactggtcttcatttaccaatggtcttctccttaccattagagcactcagtaactgtacaaactgtgtgagcgtgtgtttgtttggctgaactgtttttattggtggcttctgtttttatggtttcagtctttttcccacttgggtagatcaactctacctgacttggtcaaatccgagggaacgttccaaattatagggaaacaaggcctctgaatgggctaaattcccatagctggggg

SEQ ID NO: 632166 - DNA, 363 bp, Homo sapiens
tctgtctggagatcaccacctggactggttcctcggcccatctccctgtggaagtctacgtatcagtgtgtgttatttcgcaaagttcactttgatgtgacgaacagtgactgatattcaggtgccccgatggatgggggcggctggactgggcagacttagatgctgtccattgctttgaactcgcgtgagggctgcaccgggttcacgtgcttcttctgagatgcccgtttaatcgttggtctgtgtctcgatcctgtttctctctcttcaccaatggcttaactctggtgccttcatcttccatgacacagcaggaaggttgagggaagccataccctgtgactttaggtatttggtaga

SEQ ID NO: 632167 - DNA, 214 bp, Homo sapiens
tagtctgggtgatgaggaactagtgtaggagtatcggggtaattatagtaacaacaacatattaggatactagtatcagagatcaggtcgtccttcagtgttgtgtatggctatcatttgttttgaggttagtttgattcgtcattgttgggtggtgattagtcggtagttgctgagatatttggaggtggggatcaatctagaaggaaaataa

SEQ ID NO: 632168 - DNA, 178 bp, Homo sapiens
acgaataacactccccacttcacattttacagtataagaaaagcctacggggtatcaggctataccaccatgataactttgaagaaacaataaactgtagaccctaacagtgtgatatttgggggttcctgtggtaatgtacttttctgtttaattaccgtactttttacaggcacgg

SEQ ID NO: 632169 - DNA, 1498 bp, Homo sapiens
taggtttgagggggaatgctggaaatggtaaggggtatggagacatgtcatataagtaatggctagggtgaggtggtaggaagttttttctcataggagggtgtatgagttgtggctcgtagcggaactcgggggtatgcgtgtctcgaattctcataaaaacgaggggaggtttaaaagttagggctctggggtgacaaaatagtgttgtggtggtagaagttctcagggggaagaaggtgcgctccaatatgtgtgtgtggtccccataggaaagaactgggtaggtgggtgagaggggtggttctacttataactacagtggttgaggtgttattctcgggcttaatgaaaagaaactagtgtgcgcagacagtgtgtgcgcccttggcgagagcggagataattctccagaattgtgtaagaaacccccatagagagcatctttaagttctcgagaggaactctccccccttttcgagggcaaaagtgggctccagaagtggtgggggtgtctccggcgattgtgagctcactcgtgggcgccatagagatgtggtggggcagaaacattacagaacactccaaaatatcatataaggtggggcgccccaaaaggcgggggtgcctcctacggatggaaaacgatggggcgccgacggggagaagacaataaacacttccacggagaaggacggcgtggagatccccccgatggaggctgacgatggcaggcgggacgaacaacataaacgaagagggggtggtgcggatgcagcagaagggggagatctccacacacgagaggagggaacgacccccaccaccataataataatattattaacggcgtacaaatgcttggtgtatgacggcacacatcacggtctctactagcaacatacgtggtatatgtgggggccccataaagggcgagggagtggcagcacctatctccacagataatgcttgtcaacagacaaactatgcgggcttagggtggggagaccatacacaagtggggctacctcgcacaaagatggtgtgtcctccccccggaacataccaacggggggagagcggataaaaacttactggcagcgacaagacatcaagatggcaacgagagtctaacaccaataccccccgctgagagaaattcccaacgaagaaggagaacaactatcgcgcagggcatacaaccaccacagggggcgcataaggcgggccccaacataagaaaggagggctggcgcgcgccctaacagcgaacatactattaacaaacactaatatgaggagagagcgcccccccaaccaggaacgataagagcaagagacggagtactggaacaccccaccggggggggaggcaatcagggggggacacatatgtgaggacgaccaaagcagcgggagagagggccaccacacaccagcgcgagtacgcaacaacagagacagcggccgccagatcgacgctgggcgaccgacaggc

SEQ ID NO: 632170 - DNA, 238 bp, Homo sapiens
gctgtcccaagagaaacaaacaaacaattaccaggcttggtggccgcacctgtagtcccagctactggggagagggagtggcaagggtctaggatgcaaggatcatttgagcccgggaagtcgaggctatagtgagccatgttttatgccactgcactctagcctgggtgacagactgagatccagtctcaaaaaaataaaacaaaataagacaaatcaattcacagacaacatttac

SEQ ID NO: 632171 - DNA, 212 bp, Homo sapiens
tatcacattgtgtacggaaaactcaaggtgttagtaagaagtaccctataggtagtcaccacggtggtaaaggaagatagttgtagcaggatacaggcccctactcttgcttcactagtatacataccagcagcagcttcacttttactctagggcttctagcacagttttcactacaaagggcttcatggtccacataagcctttgggaaa

SEQ ID NO: 632172 - DNA, 620 bp, Homo sapiens
  misc_feature (11)..(11): n is a, c, g, or t
  misc_feature (74)..(74): n is a, c, g, or t
  misc_feature (91)..(91): n is a, c, g, or t
  misc_feature (99)..(99): n is a, c, g, or t
  misc_feature (160)..(160): n is a, c, g, or t
  misc_feature (286)..(286): n is a, c, g, or t
  misc_feature (319)..(319): n is a, c, g, or t
  misc_feature (340)..(341): n is a, c, g, or t
  misc_feature (402)..(402): n is a, c, g, or t
  misc_feature (451)..(451): n is a, c, g, or t
  misc_feature (475)..(475): n is a, c, g, or t
  misc_feature (483)..(483): n is a, c, g, or t
  misc_feature (530)..(530): n is a, c, g, or t
  misc_feature (539)..(539): n is a, c, g, or t
  misc_feature (582)..(582): n is a, c, g, or t
gtgtttgggtnaaatcgttttccttaccaactctatacagattgtgtatttaaatatgactaatttggtaaggntctatttcttaacaggnagcatggnaaaatttcaaaatgacaagccaatgctaaacatgtaccacttaaccaaaaatatttagttntacgacagctagctagaacacccaagtccttctgaccaagccaattcaggtacttgaacaacagccaaataaataagcaccattctaatcaataggttcaaatgaaaacagaatgttttgataatnttttgggtttaacacataacacacaaaattttnaaaagtggtttggctggtaannatagtgggctttttaaacgttttattgggtgggtgtggggggtcgcgcctgtgatcccggngctttggggttaccggcggggaccccccccccccggggcccctcctgcntctttacaaataggcatctggggntaagagtnaccatttgggattttaggtgaacggctgggtaagacactactcttgnttttgggcngggggggatgtctacacatggtcttggttttggtcaaactttnaatttcggggggatggggatttgttttcttttcattgc

SEQ ID NO: 632173 - DNA, 916 bp, Homo sapiens
  misc_feature (730)..(730): n is a, c, g, or t
cagtgagatgcttaaatctgcagtggagggcaagagacacgaccccaggagacagcaactggtctctgaggcggtggaaccagctccctgttggagtctgaggccttggtcctactcccagtttcactcctggtttgctgaatgatctggagatctctgggccccacggctttccatctgcagagcggaaagagtggatgggaagtttctaggttccctccacttctcatcattgccggcattcgcttataacaggggtcggactcctctctgtgcacctgtcctgcgggcagacctaggaaggatgccaggaccatgcccggtagagggctcagttggagtttcagggatgagcacctgcctcgggggcctgaaggaagcccatggaaggccatggccaaagaagctcatcgccctggggccagaagaatctgcccatcagatggtcctgtggaggatccaggagctttctgactgagtatggagggaggaccagcaagaccccttcatactggctgacctggacatactggccagccgccatcaggccttctgccaagccctgccacaggtctcgcccttctatgcagtgaagtgcaacagtagcccttgggtgctgcgtgtcctggccgccctgggcaccggctttgactgtgccagccaggtggaactggagcaggtgctgggcctgcgtgtggccccctcgcgcatcgtctatgccaacccctgnaaacctgcctcccacatccggtatgctgcccagcacggggtgcagtcctgacctttgacagcgaggaggagctcaccaaggtggcccagaccacccaggccaggacagtcagagcacctttcctctgagcacaagttcggggccaggctggaagctgttgggacctggtcacgtctgcaaaaactg

SEQ ID NO: 632174 - DNA, 556 bp, Homo sapiens
  misc_feature (539)..(539): n is a, c, g, or t
gtttatcgtctcttcggttcggttgccactgttgctctgtctcgctgttcttgtggtctggtcgtcccctctttctgattcctttggcttcctccccccgtaccgtgttctccatccccggtgttattctcaccatttccgctgtagttcgtctgagcgctccccgtttgtctctccggatcccattggttccggtttcttggggtttcccttggtttcgtaccatccctcttcatgaaccctgtctgcctgtggcttcatagcattcgcctactccgtgaagtctacgggacatggaagatggttggcgacgtgaccggggcccatggcctatgcctccaccgctcaagtgctctgaacatctgggtccctgattctgggcatcctcagtgaccattctgctcatcgtcatctccagtgctgatcttccaggcctatggatagatcaggaggcatcactgaggccacgagctctgcccatgacctgtatccaccgtactccaacttccattcctcgcctgcccccgagcatactcgangggggccccctcttatt

SEQ ID NO: 632175 - DNA, 879 bp, Homo sapiens
  misc_feature (876)..(877): n is a, c, g, or t
gttttttcccttcggtgtgccactgaagatcctggtgtcgccatgggccgccgcccgccgtttgtaccgtatgtaagaacaagccgtacccaaagtctcgcttctgccgaggtgtccactgatgccaagattcgcatttttgacctggggcggaaaaacggcaaaagtgatgagttccgctttgtgccacatggtgtcagatgaatatgagcagttgtcctctgaagccttgaggttgcccgaatttgtgccaataagtactgtaaaaagttgtggcaaagatggttccatatcggtttgcggtccacccccttcaaggtatccgatcaacaagattgttgtccttgtgctggggctgaaaaggctccaaaacaggcttgcgagggtgccttgtggaaaagccccatgggcacactgtgcccagtggttcacatttgcccaaagttaatcatgtccatccggcaccaagttgcaagacaaagggagcattgttgatgaaggccccctgcgcagggccaaagttcagtttcctgacgccagaagatccaatctcaagaagtggggttcaccaaggttcatgctgatgatttggcgacttgtgctgaaagggctcatccaagatgttgggcgtcaatgacttcccaggtgtggctctgaaaatgggggggcctgaataatggggttccagggttgggccctttatattacataattattctggcaaagaaaaacaaaaaaaatttggggccgcaagtttaaactttgtgggggccaataaattgttgtcaagaccgcagtggtccacaaccggggcgggcaaaccgttttgtttctacgtgtctcaccgccggaaaaaaagagaagaaacaaaacagnncg

SEQ ID NO: 632176 - DNA, 355 bp, Homo sapiens
gaacccctttttttgccgggccgggattcccaagctccggggggataaggcagtttttcccccacgggccctccaacccaaatcaaattaaaaggggggggttgccggcaaaaaccctttggtaggtaaaaaagaaaaaaaggcttctgttggttttaaaaaccaaaaaaaccctttggtgggaaaaaaggccccagtccccaagaaaccgccccccttaaaaaagccccgcaaaaaaaaacccttctccaggggggaagaagcccggggcataaatttttaaattttttttttccataaagggcaaatctttttgggcggcttttttttaataaagccctgtttttccgggcca

SEQ ID NO: 632177 - DNA, 545 bp, Homo sapiens
  misc_feature (461)..(461): n is a, c, g, or t
tttgttactaaatcgatctcaatgttactagttacttctaaccctaaactgatcccctcgatgtctctctgattcatccctgtcatctgattttggtttattatcatggtcacgtcttattgactcataaactgatcgctcattaggtctctgctttaaggcttcagctcgttctgattttaaccgaggtgattcatcattgagtatcttgtttatgtttatcacacttcaggttttgtctctgtagatcgcttttcagaatccctcctattgtcttgcctgtttctttgattttacaggtcgcccttcatttttttgctttggagtttcagggcggctctcacctttttgctttggagtttccaggccttccatcacccttctgttttggggtttcaggatgcccatcactcttttgttttggagtctcaggccggctttcacccttttgctttggggtntcaggccttgattttgttgtttctgatctgccattattttgtttgttgtcatttggttttgtgtcagacagtctattttcactt

SEQ ID NO: 632178 - DNA, 122 bp, Homo sapiens
tgtataacttaacacattgggctgtccaacttctgtaatatcatttttgtattgctttgttttgttttcactttctctgaaactacctcatatctctttcctcaatgaacagagtataactg

SEQ ID NO: 632179 - DNA, 439 bp, Homo sapiens
ggaatgcacgagtgtgagagagagggcacttgtctcccttcaaggctgatggaaggtaggatatgtgagtccttcctcttaagtggcaggaaacagatattattactctttatctttatttatcccctgagatactcagaacatgaggaaacacatattttactcatcattactggatttttgcgaccacccactctattccattttacacaacacctcacagacattttaacacagaaaggccaggcagcgatggctcacgccatgtcatcacagcactttgggatcacttgaggttaggagctcgtgaccaacctgaccaacatggtgaaaccccatctctactaaaaatactaaattagctgagtgtggtggcacaggcatgtaatcccagctatttgggaggctgcggcaggagaactgcttgacaccaggaggc

SEQ ID NO: 632180 - DNA, 244 bp, Homo sapiens
atgtgccctcttgcccattcaaggaccttggcttgtccttcaagtcagggctccatgggcttgtactgccgccgcccaaagctcccagcaggttgtaatagttggtggtcaggaccatggcgcccctgtccatcaggctgtagtccgactgcagaaccacaggagttccggatgtgctgctccaggtcgtcaaacacctccatcaggcagtcctggaagaagctgggcttggcatcgctgctgg

SEQ ID NO: 632181 - DNA, 320 bp, Homo sapiens
ataagcgggtgcagcactaattaagaggactataacaacgccactgtacactttgtttgacactcgtctgatgaaaagtctttcgtaacttaacattccacacttacatttaaaaagtcccagaacatataaactatccaatttacaactaaggtgggtatctgtcaaaaccttaagaatagttactcttcccaagagacttacagcgtctaaggggggggaaagacagcatctgagcagtacaagtcaagctgataaaatccaatacagaatatctaatacaccatcagttattttactgagaatagattctgctgccc

SEQ ID NO: 632182 - DNA, 381 bp, Homo sapiens
  misc_feature (11)..(11): n is a, c, g, or t
  misc_feature (135)..(135): n is a, c, g, or t
  misc_feature (176)..(176): n is a, c, g, or t
  misc_feature (179)..(179): n is a, c, g, or t
  misc_feature (183)..(183): n is a, c, g, or t
  misc_feature (190)..(190): n is a, c, g, or t
  misc_feature (194)..(194): n is a, c, g, or t
  misc_feature (217)..(217): n is a, c, g, or t
  misc_feature (247)..(247): n is a, c, g, or t
  misc_feature (270)..(270): n is a, c, g, or t
  misc_feature (299)..(299): n is a, c, g, or t
  misc_feature (302)..(302): n is a, c, g, or t
  misc_feature (309)..(309): n is a, c, g, or t
  misc_feature (322)..(322): n is a, c, g, or t
  misc_feature (330)..(330): n is a, c, g, or t
  misc_feature (338)..(338): n is a, c, g, or t
  misc_feature (350)..(350): n is a, c, g, or t
  misc_feature (373)..(373): n is a, c, g, or t
cttttcccgcnccgtcgggaggtcctcccggaattgggccggagcccaaaaaacccagtgtgaaaagggcccatgggttttaggtcccctccttcgcgctggacgcgggcagagcggggtccctttctgtttctnccaaaaaacgtggagggagggaaaagggaggatggcttgtnctnaaanaaccaanaatnaagtcgggcacccgggatttganaaatgggaaatccatggcccttgttcgggnccccaggctttgccgacggggtntttcctagttccgaaattgcccaggcccnccnccccccnctttgcaagcagngggaacgncttccccntcgcttaatttntttattaaacttttcccctattnttttttta

SEQ ID NO: 632183 - DNA, 99 bp, Homo sapiens
ctagaagattcagcaaagtacttttgtgctcttggggagccgagcccctttcctacccgtttactgggggatggcttaaccgcgtacaccgataaactc

SEQ ID NO: 632184 - DNA, 243 bp, Homo sapiens
cgatctagaggatcttccgctctcacccaccccaaccagtgcaattacttagtgcaacttaaattcagaagggacggggaacacagagtcgtggagagttttgaatctctcagcaaacaggaccaagacaggaaagctcagaaacaaagagacagaaggatgcaacagaagacgagggcggtggtggggacggcgtcatcccgctggacggcgctcagctctgggatgatgtggtggctggtg

SEQ ID NO: 632185 - DNA, 482 bp, Homo sapiens
  misc_feature (437)..(437): n is a, c, g, or t
  misc_feature (441)..(441): n is a, c, g, or t
  misc_feature (443)..(443): n is a, c, g, or t
  misc_feature (447)..(448): n is a, c, g, or t
  misc_feature (450)..(450): n is a, c, g, or t
gctgagacttactggcctgcattctcagaaagttaggcattcctaccctctaggattgaattgggacccctttcctgtaacatatttctggtgaccacagaagggactaagtgcagaaacgttgacccaacggctacctttgcgtaagtgttggggtcctgtaacatatttctggcaaaccacagaaaggatgatactgaagaaatccccccaaccccaaagaaatagactgcagcactgattggacgactttgggtaagtgatggggtacccgagtaacaaatgggattgggttagaggcccaacttaggggagttggagtttctcctaagacagagtgagttagaggcccctcttaataaaaggcaaggacacttgactgacctcaggttagaggttactccatcctactctatggagtagctgtcctttcaccncttnantttnntnataaacttgtttttgctttgcaaaaaaaaaaa

SEQ ID NO: 632186 - DNA, 465 bp, Homo sapiens
  misc_feature (124)..(125): n is a, c, g, or t
  misc_feature (319)..(319): n is a, c, g, or t
  misc_feature (403)..(403): n is a, c, g, or t
  misc_feature (441)..(441): n is a, c, g, or t
ggatgcgagctaaattccattatttaggacataagccggaaaaaggcgacccccggcggcgttactaaatatctttcattatccgaggaccatcttctcgccacctgccccctcacgatcaacnnaggatacatcctaccgaaactttcgatactatcggaggaccaacattagaccataaataacaaaaccacgaatgaaaaaaactaacgccctcaagaaaagttctctagcataaagacgaggcgagaaagccccgatcccactctcagctagcctcaccaatatacccattcaaaaccatgaaagaaagagtccncatactgataaaacttagttatatatagattcagctgagattacacctactcccatcaccaatctagccctataaccattagcntagaaagcaataaaacccaaaaaatttaacagaagatntacaaaagatatcgacagaatcct

SEQ ID NO: 632187 - DNA, 833 bp, Homo sapiens
  misc_feature (6)..(6): n is a, c, g, or t
  misc_feature (21)..(21): n is a, c, g, or t
  misc_feature (32)..(32): n is a, c, g, or t
  misc_feature (42)..(43): n is a, c, g, or t
  misc_feature (52)..(52): n is a, c, g, or t
  misc_feature (63)..(63): n is a, c, g, or t
  misc_feature (67)..(67): n is a, c, g, or t
  misc_feature (79)..(79): n is a, c, g, or t
  misc_feature (89)..(89): n is a, c, g, or t
  misc_feature (114)..(114): n is a, c, g, or t
  misc_feature (132)..(132): n is a, c, g, or t
  misc_feature (163)..(163): n is a, c, g, or t
  misc_feature (211)..(211): n is a, c, g, or t
  misc_feature (218)..(218): n is a, c, g, or t
  misc_feature (266)..(266): n is a, c, g, or t
  misc_feature (340)..(340): n is a, c, g, or t
  misc_feature (385)..(385): n is a, c, g, or t
  misc_feature (459)..(459): n is a, c, g, or t
  misc_feature (502)..(502): n is a, c, g, or t
  misc_feature (514)..(514): n is a, c, g, or t
  misc_feature (588)..(588): n is a, c, g, or t
  misc_feature (593)..(593): n is a, c, g, or t
  misc_feature (597)..(597): n is a, c, g, or t
  misc_feature (612)..(612): n is a, c, g, or t
  misc_feature (631)..(631): n is a, c, g, or t
  misc_feature (692)..(692): n is a, c, g, or t
  misc_feature (701)..(701): n is a, c, g, or t
  misc_feature (727)..(727): n is a, c, g, or t
  misc_feature (821)..(821): n is a, c, g, or t
ctctgntcgtcctgttgctcntggggcccggnggactggtgnnttgcagaanccccacgcganagcntgcgggaggaanttgtcatcancccgctgccttccggggacgtagcngccacattccagttccgnacgcgctgggattcggagcttcagcgggaangagtgtgccattacaggctctttcccgagaagcgcgcgtggggcagcngatctcnaagtattctctacgggagcagcacctgttattcacacgaaggcttttngaggacccgatactgggggccacccttcctgcaggccccatcaggtgcagatgctgtgggtctggttccaaganactgttaatgatgtggataaatcttggaaggagctcagtaatgtnctctcagtggatcttctgcgccttttttaacttcatcgactgccaccaacacagttactcccactgcctccttnaaacccctgggtttggccaatgatactgaacactactttctgngcgatgctgtgntggcgcgggaggtggtctgcaccgaaaacctcaccccctggaagaagctcttgccctgtagttccaaggcaggnctctntgtnctgctgaaggcagancgcttgttccacaccagcnaccactcccaggcagtgcatatccgccctgtttgcagaaatgcacgctgtactagcatctnctgggagcngaggcagaccctgttagttgtatttnatgccttcatcacggggcagggaaagaaagactggtccctcttccggatgttctcccgaaccctcacggagccctgccccctggcttcagaganccgagtttatgt

SEQ ID NO: 632188 - DNA, 225 bp, Homo sapiens
acaatccctctaatacccacttaatgtcctcagaaacacagctgagggatccatcttcatatgactcctcagagacacataacatgatattaaaacactcttacccacaaaaaacgcacagacgagggattcttcaaataataggaataagcaatgtgaaataccttagaataaaccaatgcagctcttttcaacatcattatacatcctggcaaaactagtaag

SEQ ID NO: 632189 - DNA, 150 bp, Homo sapiens
cggctcacgacggtccggagatcgagagtatcctggctaacacggtaagagcctgtctctagtacagtacaaaattagctggtgtggtggtgcctgcctataatcccagctactcggaagtgcaggaaacaggacgcgggatcctctaga

SEQ ID NO: 632190 - DNA, 371 bp, Homo sapiens
gtacgcattgacgtcatcaggtcttacataaagttctgactggaatcaggtcaaaagtttattcccttccttttcaacttgcccaatcaagaagctgttcctattagaggggaaaaagaacaatcatcagagtaacacttgtgccattttaaacaagtcatgctccccaaagagcaccattccactaatgctagttttattgatgatggcaccaaaaaaaaccatcctatatacccttattcatccctttcttgagaagttggttacaaaccaagaaaataaagcctcaaggaactgtatttgaagacaaagcatcttgggattaacttgcaggtagcttcatactcttcttcagagaactaaccaggact

SEQ ID NO: 632191 - DNA, 1195 bp, Homo sapiens
tggacaagacaaaggagttttatatttattcaagcagtaaatttccaggggtaaaaagaggccacaagttaatgtggttaaaaaaaaaaataaaccatcgtgcctacccaaggggcggcattaaaggaacccaccataagaacagaaaaaagagaacagtgagaacaaccaccgggcagaacaccagccaccgcgggagcctcagattcacgggatacagaagcaccctcccctatacaacgcgaaatccacgcgggaatatcccagtggggagaagcacaagtctccaccgggtgggtgagaacgccagacagaagctcggggagggtggcgtgcacaaaaagttcctcagaacaaaccctcagtgggccagaaggccccgcgcacacctccacagggaggcgcacctataacacgcagtgaagaaaacgagatcgcgggtacgcgggggaatattctccacagagacagaacaagagaatctgtggtgcattgggtggcccactcccgtgaagagttgtggcacatctccacaccccacacccagaggtatctttataacgcagggggtatttatatccgcgcttttttctcacaacgtgggggtcacgttttatatctccaaagtgtacacgctactataaagggcctctggggcacttaagaggggggtatacaagggcgcacagttaatatctccccaactttctttaccccacacccgctatacacgagggccctcaaagagacaaaagggggcgaccaagagggctgcaccagggggcgcaacgcgcgccacactcacaggggacgatcgcccccaagggcgacacccaaagggcgccctctagtggccaggcggcaatatacaaaaaaacctgggcgaacaaaatcggggacctgggggcgcagaaaaaggggcgcacaccatgtagaccgacgctcaagaacaaaaccaccatggggacaccatattggggcgcacacaccacgaggcgaacagagagaataaggagcaggcggcgaacaccatatggcggggcaccacaaacaaataccacacaatcaacctactattaaataaaacgcacccccaatccagaaaaaaaaagaacacacaccaggaaagctcccttcaggacacacatggagcccacggaggagaacagggcccctgggggacacacaacagggg

SEQ ID NO: 632192 - DNA, 1027 bp, Homo sapiens
  misc_feature (18)..(18): n is a, c, g, or t
  misc_feature (90)..(90): n is a, c, g, or t
  misc_feature (198)..(198): n is a, c, g, or t
  misc_feature (201)..(201): n is a, c, g, or t
  misc_feature (205)..(205): n is a, c, g, or t
  misc_feature (211)..(211): n is a, c, g, or t
  misc_feature (213)..(213): n is a, c, g, or t
  misc_feature (227)..(227): n is a, c, g, or t
  misc_feature (232)..(232): n is a, c, g, or t
  misc_feature (240)..(240): n is a, c, g, or t
  misc_feature (257)..(257): n is a, c, g, or t
  misc_feature (265)..(265): n is a, c, g, or t
  misc_feature (269)..(270): n is a, c, g, or t
  misc_feature (304)..(304): n is a, c, g, or t
  misc_feature (341)..(341): n is a, c, g, or t
  misc_feature (352)..(352): n is a, c, g, or t
  misc_feature (378)..(378): n is a, c, g, or t
  misc_feature (402)..(402): n is a, c, g, or t
  misc_feature (431)..(431): n is a, c, g, or t
  misc_feature (433)..(433): n is a, c, g, or t
  misc_feature (447)..(447): n is a, c, g, or t
  misc_feature (454)..(454): n is a, c, g, or t
  misc_feature (456)..(456): n is a, c, g, or t
  misc_feature (514)..(514): n is a, c, g, or t
  misc_feature (526)..(526): n is a, c, g, or t
  misc_feature (535)..(535): n is a, c, g, or t
  misc_feature (564)..(564): n is a, c, g, or t
  misc_feature (566)..(566): n is a, c, g, or t
  misc_feature (568)..(568): n is a, c, g, or t
  misc_feature (572)..(572): n is a, c, g, or t
  misc_feature (638)..(638): n is a, c, g, or t
  misc_feature (650)..(650): n is a, c, g, or t
  misc_feature (673)..(673): n is a, c, g, or t
  misc_feature (778)..(778): n is a, c, g, or t
  misc_feature (826)..(826): n is a, c, g, or t
  misc_feature (840)..(840): n is a, c, g, or t
  misc_feature (857)..(857): n is a, c, g, or t
  misc_feature (870)..(870): n is a, c, g, or t
  misc_feature (910)..(910): n is a, c, g, or t
  misc_feature (912)..(912): n is a, c, g, or t
  misc_feature (924)..(924): n is a, c, g, or t
  misc_feature (930)..(930): n is a, c, g, or t
  misc_feature (932)..(932): n is a, c, g, or t
  misc_feature (941)..(941): n is a, c, g, or t
  misc_feature (1019)..(1019): n is a, c, g, or t
tatagtgggaagtgattnaataccaggagctgagtgcactgggcagcaggccagcagacggggcctgcaggggcgaaggcacggctggcngcccgtgcgcaccgccactctcctggaaccgctgctggccgagccacagccctgcggaaattctactgcgtgtggcagagaccgatgtgcaaaaagtttctggtgaangtnttanggaaantnctccaagcactaangaaancaggaccntgcctgtcctgaccgtngccttgcncganncctccctggcggtgctctctggctctctccaaanaggacgcttccttctctgattctaaggaaggcctganacagccctganggcttaatgtacagtgcggccaggtnctggcactgcacgcaggatctttngttagctgcatccatatcgtttgcacgananctgacggcacagangcgtaanangcgtgcacggcggggagctggggacagcagccaaagcatggggccaccaaggccaaanagttctggaganaaagtgtanaatcaggagacccgctccatccctcacananancaangagcccgagcgccgcgtcagcttggcgtacgtcctgctggagctcttgctcaatccgcccttcggngtggggatcttncttccggcctttgaccccaaggngcctgatgcggccacagctgagcttttccctggctgcagtgccggggccttctgcagaatgtgtgtcttgcgcaggttcatcgtgcagccggctgggcccatcangtgagctttccatgcctcttctccagggctgaagttctcatgacacangggacaccggtttnccagcttctccggtttngcagggttgcaanccttgtgttttatgtgtctgggcagctcttccttgaaaanancctcactgcaanggtaanantttccaaanccgtctttttttgtcacattccgtcagcaagtgctccgtcagactggatatctcgacaactgtttgcagtggtcacancttgtcag

SEQ ID NO: 632193 - DNA, 759 bp, Homo sapiens
  misc_feature (79)..(79): n is a, c, g, or t
  misc_feature (87)..(87): n is a, c, g, or t
  misc_feature (90)..(90): n is a, c, g, or t
  misc_feature (464)..(464): n is a, c, g, or t
  misc_feature (604)..(604): n is a, c, g, or t
  misc_feature (607)..(607): n is a, c, g, or t
gcttggaggttggcggtgcggggctgaaggctagcaaaccgagcgatcatgtcgcacaaacaaatttactattcggacnaatacgangangaggagtttgagtatcgacatgtcatgctgcccaaggacatagccaagctggtccctaaagacccatctgatgtctgaatctgaatggaggaatcttggcgttcagcagagtcagggatgggtccattatattgatccatgaaccaggaacctcacatcttgctgttccggcgcccactacccaagaaaccaaagaaatgaagctggcaagctacttttcagcctcaagctttacacagctgtccttacttcctaacatctttctgataacattattatgttgccttcttgtttctcactttgagtatttaaaagatgttcaatacactgtttgaatgtgctggtaactgctttgcttcttgagtagagccacncaccaccatagcccagccagatgagtgctctgtggacccacagcctaagctgagtgtgaccccagaagccacgatgtgctctgtatccagaacacacttggcagatggaggaagcatctgagtttgagaccatggctgtnacngggatcatgtaaacttgcgtttttgttttttcctccgggtgttgtaagtgtggtgacttcggatttatagtttcagggtactgggaactttccattttattccaagaaatctgttcatgttaaagccttgattaaagaggaagtttttatta

SEQ ID NO: 632194 - DNA, 934 bp, Homo sapiens
aatactacacataaagtcaaccaacatcacgtaataaactatgtttgtacgacaactacacatactgtaactccccatcgcccgcattttactccatatggtctctcccaccacctgccctttattggagcccccccaatttgacaacctaaagtccgtccgttccgcaatcaccgtttccctcccccgcgcaatgttgtataaccccaacctgggcagggccacattcccaaagacaactgtttaccccaacccacgtggttggcccaaaattctggcgtttttgtggcacttgtaacacgcgcggcaaattattttcctttcctggccaagttaaagcctcccccccaagggcgccttcaattaagaaatctttttcacaccccacccttgtgggtatgtcaaaagatacccctcttgctcgcggccccgaataaaagttcgcttttttttaaaaatctcgtcctaccaagtatggttcacactcctcctcaccaccacctctgttggtaaatttccccccccgctgggacaattgtaagatattccctctctccgcggatgaaccaccccgctttctaattttggaacataataacacacccccgctggctggaaaaacaacattttgctctagggagccccctgggggggtagacctgaacccgagaagagtactactggtgaaccccagaaggttcccaccccttaacggcggtttcccccgcccaaaatctctgggagtggcgtttagtaaaaacgatgtgggtcggcgaccactccacctagtcggccgcagaaatattcttaagaccgagtacaactagtgacccccgaagatcaaactaacaaagtcgggcggattgaacctgggagaccccaacaccggggacccaaaaaaggtctccaattttttgaaaaacaaaccaaaaca

SEQ ID NO: 632195 - DNA, 186 bp, Homo sapiens
cattcataataaaactgttcataaaaacaaattccaggaaccatctaaatgttcagaagaacacggataaacaagctgtggtaatacagtcatctctatttgttgtttgagatcggttccagacctcccttggatactgaaatttgcagttgctcaagtccctgctaccaaatggtgtagtatttg

SEQ ID NO: 632196 - DNA, 727 bp, Homo sapiens
  misc_feature (8)..(8): n is a, c, g, or t
  misc_feature (70)..(71): n is a, c, g, or t
  misc_feature (94)..(94): n is a, c, g, or t
  misc_feature (100)..(100): n is a, c, g, or t
  misc_feature (146)..(146): n is a, c, g, or t
  misc_feature (157)..(157): n is a, c, g, or t
  misc_feature (164)..(164): n is a, c, g, or t
  misc_feature (169)..(169): n is a, c, g, or t
  misc_feature (172)..(172): n is a, c, g, or t
  misc_feature (184)..(184): n is a, c, g, or t
  misc_feature (191)..(192): n is a, c, g, or t
  misc_feature (231)..(231): n is a, c, g, or t
  misc_feature (239)..(239): n is a, c, g, or t
  misc_feature (249)..(249): n is a, c, g, or t
  misc_feature (258)..(258): n is a, c, g, or t
  misc_feature (287)..(287): n is a, c, g, or t
  misc_feature (306)..(306): n is a, c, g, or t
  misc_feature (408)..(408): n is a, c, g, or t
  misc_feature (448)..(448): n is a, c, g, or t
  misc_feature (450)..(451): n is a, c, g, or t
  misc_feature (458)..(458): n is a, c, g, or t
  misc_feature (460)..(460): n is a, c, g, or t
  misc_feature (470)..(470): n is a, c, g, or t
  misc_feature (496)..(496): n is a, c, g, or t
  misc_feature (515)..(515): n is a, c, g, or t
  misc_feature (525)..(525): n is a, c, g, or t
  misc_feature (695)..(695): n is a, c, g, or t
gtcaaganaaaaatcaaatttaaaatcactatctgatggaagcttatatgccttatgaatatatacatgnntgcatatatacatctctgtatgnatcacncaaagcaattttaaacatcattcttttttgtatttaaaattgcccntttaaacattnagaagtnccagnggnggaggctttaanggaattnntccctagagtaaatttcttggattgaaattgttccagtncttctacnggtagtttanctctgggcngtgaataacacattatctgttgcaatgangctgcttgaggctgacagngaagtggatatgctgtctatttccaaaagtagtcagctcgtgatagtgactatagaaaaagcagtgctgagaatgtgagcccggactacgcaaaaccagccncagaactgccacctccaaaggcgggggccactggagcccngnnaggaccngntgccaaggangctggaagtcctgaaaatccaggtgntccaaaactggaagctgcngggcttttgnatgaaaatgatgcagccgatgtgacttcaggcttcccaaatccaaaagctggagcagaagtagagatacctgaactggtagaggctgcagctccaaatgctggggaactcccaaaaccagcagggcttccagaagaggcagcagcaaatccagagtttgttttaaaactnaagttctgagcattatcactgctgctgttatt

SEQ ID NO: 632197 - DNA, 162 bp, Homo sapiens
cgtcagtgaaatcaggattagtcttagctatatctgtggctcaagtggtagtcggcagagggcatcaatttttttcatagacaagaacaacttgccatgtatggtcaatatatcacaaagacacttgcccagtttagtgccatcctgatttccaccttgcct

SEQ ID NO: 632198 - DNA, 1115 bp, Homo sapiens
  misc_feature (1108)..(1108): n is a, c, g, or t
ggttagagtctctcttcacccggtcggcatgtctatagtcacgagtctgctgaatggagtccgagactagatgacgggagctgcttctttgtgagcggttggcgcttgtgaaagcccctgatggaagcgccttctcgcatggaccctactctgtgacgcgcagtgttggagagattgctcgaacggacatgctgtggttcatttgagtagtattcgacatgcaccaaagttgctctcgaggatggccaattagtgggttggtcgagcaaatagtgctcatctgctgtgtccgtattgggtggtagtgccagactatgatgtgcgatggggccaccatcacattcgttgcatgagtagaaaggatgtgtggcacaccgaattgatcagacatgaccttcatgtcacagatttctcagagaactgggtggtccaccataacctggtgcctgtgatctttggtcggtgcctgtcaaagtaagactgccatgaatgaacatcactgtaacaagatctattgtgaattctgtggtacctgttggagtgaatgagagacttgtaaattggtggctgcactgaagatgcaccgaagaagaaaagtgtgcttgagggcttgtgctacatccctgtgtctaaggacacgatgagtggtggaaatggtgacgcatgtggggagtgtataagatatgcgatactgtgaatgggcgaatgtgaaggttagaaataagtcctgttgaagacagccatggtagtgcttgaattcagcctaaaggtcgaaggtggtcttggaaactgtggtgcgcgcgtgcaacgtggttactcggtggcgagtgatatgttcgcctcgggggggaacctcttggtcgtcgttggctttggggcccccgtggggtggtgccctcggcggcagtgggcgttgctgcctggttgtcttgcggggcgccttgggacagtcgcctgttgcttccctgcatctctggacttgccgtcgttcgctggccgttgggggcctaatggtcccccgagcctggcggtggactcaacccgttttggcaccggctcgtttctcgggcacacgcgcccccccggtctccggtgccctttcttattnttcgttt

SEQ ID NO: 632199 - DNA, 397 bp, Homo sapiens
  misc_feature (45)..(45): n is a, c, g, or t
  misc_feature (57)..(57): n is a, c, g, or t
  misc_feature (66)..(66): n is a, c, g, or t
  misc_feature (68)..(69): n is a, c, g, or t
  misc_feature (125)..(126): n is a, c, g, or t
  misc_feature (131)..(134): n is a, c, g, or t
  misc_feature (139)..(140): n is a, c, g, or t
  misc_feature (151)..(151): n is a, c, g, or t
  misc_feature (153)..(153): n is a, c, g, or t
  misc_feature (170)..(170): n is a, c, g, or t
  misc_feature (179)..(182): n is a, c, g, or t
  misc_feature (203)..(203): n is a, c, g, or t
  misc_feature (225)..(226): n is a, c, g, or t
  misc_feature (293)..(293): n is a, c, g, or t
  misc_feature (309)..(309): n is a, c, g, or t
cctttggtggcggcggcggcccgggaccgagacccggccccggcncccctctccgcnaccccgcgngnncccaaccccccggcgccgcggggaacatgcggctccggctcccggaggccggcgcnngagtnnnncccgnnccccgcctcancntgcccgcacgctggcgnggccgcaannnnacgcctcgcccaggcaatganagcggctccggcgtctccgcannaagatcagggaccggctgctgcaggccatcgacccccagagcaacatccggaaaatggtggcggtgntggaagtcatctccancctggagaaataccctattaccaaagaggcacttgaagaaaaaaaaattgggaaaactcataaaaaaaagtacgaaaaaaaaaaaaaa

SEQ ID NO: 632200 - DNA, 864 bp, Homo sapiens
gaaattcagaagcccactcaaatgtcccactttggctacaggcatcagaatttcagaaccagcaaaacccaaaggggcaagagtcccaagtagaggcaatgattcaaaaccaggcactgaccataattcatggaagcaaagggaatgttttttgatgttttttagtttcagggacaagcacgaaaattcaaaagcatacacttacagcagacaacctcgcggatcttctctgtggttcgtccttcaccttggctttatctcccttagcatccccttcagcctataagaaacaagaacaaaaaactgcagattttgaggtggttcttaattacttcccaaactttagagtgctaaaaatgaaaattaaagcagtcgtccacacaacttttctaggacataaatgagtgagcccgacgttcgtataagaacgaagcgcgcgcaggagctccggctcgccgaccccgagaagcgagggctggaccggagcgcagccggggagggcagcggagcccgaccaccgcgacaggcaggagcaacagctgcagatggcgcaaacaaaccccctccggaggcggagcccagcgccgttgctatggcagccggtcgagggcgggagagggaggcgcgcgcagcccggggaactcgtgggcggcgacagcgcgcgtctcgtgcgcggggaacgtgggccgagcgcggggccataccgcacatacgcccgcccatcacggcggcggttttttggcggcagcgctttcccccgcccgccaaccccgagcgccgccatgcaggcatccggggagtcaattgcccgcccgcagggaggggagggaaggggccctcgcgatgggggagggggcacggggc

SEQ ID NO: 632201 - DNA, 242 bp, Homo sapiens
aggaggtatgcaggaatgaatacttctggtcctttgggatataggtggcttcaaactcctggtaggtgtcaatagtgcacagctggtgcgcgcgatgggcttgtgagcatagcgtggtcaaataagcctggactgactggaacggattcggacaggcaccagacctcttgagtaccagtggcaggcagagcagggcaaaccgccacggagcaggagacgtcctgggagcctgcgagccattg

SEQ ID NO: 632202 - DNA, 121 bp, Homo sapiens
  misc_feature (106)..(106): n is a, c, g, or t
tatgagcggtcttaaacacactacatatacacatgtaacaacacagacacccaggaatagctgagaggtggtactaatggagaggaatgtggaaggtaacagttcntcataaactcctttt

SEQ ID NO: 632203 - DNA, 655 bp, Homo sapiens
ttacccatgtcgaaaaacttggagtcactttatttctctaacaacaagctcgaatccttaccagtggcagtatttagtttacagaaactcagatgcttagatgtgagctacaacaacatttcaatgattccaatagaaataggattgcttcagaacctgcagcatttgcgtatcactgggaacaaagtggacattctgccaaaacaagttgtttaaatgcgataaagttgaggactttgaatctgggacagaagctgcatcacctcactcccagagacacagttggtcagctctcccagctcactcagctggagctgagaggggaacgtgcgttggaggccggctgccagctccagctgggccaggtgtcaggagtgcgtcattgcaacaagcgggcgttgtcgtggaatgatcaccattattcgataccactgccatcgtcgaatgtcaagagcaggcatgtgaatcaagacataaatattcccttctgcaaatgggatttaaactaagataatatatgcacagtgatgtgcaggaacaacttcctagatggcaagtgctcacgtacaagttattacaagataatgcatcttaggagtagatacatcttcttaaatataacagagaggatgcgtcagaagtggtagaagacata

SEQ ID NO: 632204 - DNA, 217 bp, Homo sapiens
tgatcgcgtcggccaatcagtccttcaggcttggagtcacccgagtcttatcttctgtccccttccagcaatgtaccggcaataaacgggcagggctgggcaaaggtctggccgcggctggtcggcctctgctcttcaaacctcgagctcactgttggctgctctgggccccagtgtgggcaggagctgcgcttttttccctgcttgcctttctcca

SEQ ID NO: 632205 - DNA, 182 bp, Homo sapiens
tggcggtcccttcaacattcatggcaggggttttatattgataattgtgtgatgagatgttggaaggaatgagacgttggaaggggcaatgagatgttggaagggggaatgagatgttggagggagtgatgagatgttggaaggggcaatgagatgttggaaggagatgagatgttggaagg

SEQ ID NO: 632206 - DNA, 122 bp, Homo sapiens
tcctcgtacgaggccccgcagagttatcggtaagcgaatatagaggtcttggggcgacagatctctactatctcaaacttacatggggtagaagccggtcgctgcgtgcagcggggttgaat

SEQ ID NO: 632207 - DNA, 427 bp, Homo sapiens
  misc_feature (363)..(363): n is a, c, g, or t
  misc_feature (387)..(387): n is a, c, g, or t
gttacccctacatacgtgttaagcaaaagtagccatccacaaaaaggtatacaagctatatggttactgtattagtccactttcatgctgctgatgaagactgaacaatttacaaaagaaagaggtttaatggatttatagttccacatggctggagaaacctcacaatcatggtggaaggcaaggaggagcaagtcatgtcttacgtggatggcagcaggcaaagagagcttgttcagggaaattcctctttataaaaccatcagatctcgtgaggcttattcgctatcatgagaacagcacaggaaagacttgcccccatgatccagttacctcccactgggtcccttccacaacacgtgngaattcaagatgagatttgagtgngaacacaaccaaaccatatgagtatgtgtaactcttcaca

SEQ ID NO: 632208 - DNA, 412 bp, Homo sapiens
  misc_feature (349)..(349): n is a, c, g, or t
  misc_feature (383)..(383): n is a, c, g, or t
gtttcaccatgttggccaggtcaggctcaaacttctgacctcaagtgatccgccggctttggcctccccaagtgatagaattacaggcgtgagacaccgcaaagcaggagtacactctaaaataacaatgaaaaatataggatagtaaatacataagccaataacatacccctttattatcaagcctttcattatgtgctgtgcatgattgtatgtgctatacttttagatgaccggcagttctgtaggtttctttacaccaacatcttcacaaacacgtgagtagtgcattgcgttatgatggctatgatagcactaggtgataggagtttttcagctccattataantcttatggggaccaccatggtattacatggtccnttgttaccaaaacatcgtcctgccggcac

SEQ ID NO: 632209 - DNA, 420 bp, Homo sapiens
  misc_feature (25)..(25): n is a, c, g, or t
  misc_feature (50)..(50): n is a, c, g, or t
  misc_feature (334)..(334): n is a, c, g, or t
  misc_feature (343)..(343): n is a, c, g, or t
  misc_feature (376)..(376): n is a, c, g, or t
  misc_feature (402)..(402): n is a, c, g, or t
  misc_feature (409)..(409): n is a, c, g, or t
gtaacaatactggtatgcaataagnggtgtaatatgagttgttatggacngaatgtttatgtccctcccaaaactaattatgttaaaatcctcaccatcaatgtgatgttacttggaaatgaggcatttgggaggcaattaggattagatgaggtcatgagggtggagccctcgtgatgggattagtgcctttataagaagagacatcaggctgagcccggtggctcatgcctgtaatcccagcactttgggaggccaaggcgagtggatcatgaggtcaggagattgagacaatcctggctaacacggtgaaaccccgtctccactgaaaaanaatacaaanaattagccaggcacagtggcatgtgcctgtagncccagctactcgggaggctgaagganaagaatngcttgaaccca

SEQ ID NO: 632210 - DNA, 1312 bp, Homo sapiens
  misc_feature (328)..(328): n is a, c, g, or t
  misc_feature (769)..(769): n is a, c, g, or t
  misc_feature (925)..(925): n is a, c, g, or t
ttatgttggggggcggcccccaacaatacccccccgaagaggagatatgtctttgctctgcaaggatagtgtttgtgggccccctcttgttctctccacttcttcgtttgggaacacagaaacaccgcggcgccgcagagaatattgtgttgtcttcctcgtcggggggggattattctcttcggcgaaggagagtagttatagaacacctccccctcttcggctagagaggcatcataattaggggggaaattatgaaccccccctcggcggggtgtggttgtgttgcgtgccccgaaaataaataaccacagcctgctgttgtccnccccggcggagaatttagtgtaggagagcccctccccccttctccgacggagatgattggtggggtggttattctcctcaggtggtgttgtccccgcgcgtgctttttttgtggcggcgccgccttcacatacaacgaggccacgtagcgtcaatcgcccctctagtatcattattcggctgtgttctcctctcctgttgagtgagtctggggggaagacaaaacaatagtgcgtgggtgtcaaacaacagagtgtattatgtggagaaaccactcctggggcggttatgtaaaacgctggcacacaacgctttgatagagctctccacccctcacacattggtggggcgcacgacacacacagaggagttattctgtgtgaacaacacacggggtggaacactgtgtctctctctctctcacgagaatggggggatctcncccctctctgtgctgcactttctctgtggagaagcacacagaagggatagtgccccctgccgcgcccactaggtttttatagagggagtcttctctactcgagagagcgcaaaaccacaccgcttttacacacacgcgctagaaatgtggtgtggngacacaatctattctatacacgcccccctgtgtgtgtttctataactccctatacccgcgtatcactgtgcgctgttgtgtgcgctgcgccacacacggcgcccccacgaccactctaaaaaatattgggatatttagaaggggaagaatacattgttagaatagaactcgaagccagaaagatttatccagtgacccgccagtcaagagctcagagacaccacccccgtggcaccttccctggcctggtttgctggaaggcccagaacattctgtttgctgggttacacggacaacctggggggaatttggcaggggacccatggcacaccgcttaaagtttttggcagagcttttccaaattaaaaaaaaactggcttttttgga

SEQ ID NO: 632211 - DNA, 202 bp, Homo sapiens
gcccttatgtgtctgctatcttcattgccggcgcattctacgtattttggacatactggtgtaggttctcgcccattggacaggttgctggtcgctagcggtgaggtgtcgaagccctcagaccgcaggttgcgctgtaccaaagagacgtgtgacgagtccatgctctgaagtatacaccgctgtagctaatatcccagtc

SEQ ID NO: 632212 - DNA, 527 bp, Homo sapiens
tactaacgaagctcgacaaggttcttgacattaacgagattataatatccgaaaggcttcaaaagaagagataccagaaacccatctcaactagattgtgaatgcagacagctgtgagttacgtggtaacaatcacttcttcctcttcttaaaatgaggaatgagataatttaaattcagatcaagccagcaccataaaaactaaggattatctatattttcttatattctataatgaatacatattcttctataacagttaacaaaaaatacctgatagttgctaaattactcctcaaaattcatcctactatgtccatctcaaggatttactcaaacttagtaaaaactgtaacttagaattgaaattgaaagcacaaacataatactgttaaaatgcttttatttatttttttttgagatggagtatcactttgtcacccaggctgaagtgcagtggcacaatctctgcaacccccgcctcctgggtttaagcaattctctgtcctcggcctcctgagtacctg

SEQ ID NO: 632213 - DNA, 301 bp, Homo sapiens
ctgctcagatcaagatcagaattatcagagacaggacatcgaactcagtactggtacttcccgtatatagccatgttattacctggtacttcctgtatatcgccatgttattacctggtactccctgtatatagccatgttattacctggtactccctgtatatagccatgttattacctccctgtatatagtcatgttattacctggtactccctgtatatagtcatgttattacctggtactccctgtatataaccatgttattacctccctgtatatagccatgttattagtcgacgc

SEQ ID NO: 632214 - DNA, 204 bp, Homo sapiens
ctgggatacaggtgcgtgcgcatgcccagctaatttattgtatttttagtagagacaggctttcaccgtgttggccaggatggtctccatctcctgaccttgtgatccgcctgcctccgcctcccaaagtgctgggattacaggcatgagccaccgcgcctggcctcatttttttattgtagtataaggcctgccttagtctct

SEQ ID NO: 632215 - DNA, 723 bp, Homo sapiens
  misc_feature (26)..(26): n is a, c, g, or t
  misc_feature (133)..(133): n is a, c, g, or t
  misc_feature (147)..(148): n is a, c, g, or t
  misc_feature (242)..(242): n is a, c, g, or t
ggacctccttgaagaaaaagattgcnggggggcgcctgcggcaaagcgcccggccgcaagggcaagggtccgtcgcgcttgcaccgtcaagggcggcactgcgctggtcagcaacaccacggcgtggtaggcnccgggcagcagcgnnccgcggagctcggcgtgggcacgatgtgctcaggcccatggcgcccttggccggcgccgcacgatggtgctgaagcgcacgttgacagagccgncgatgtgggttgctcggcactgttgggtaatgtggttgccctgtccactacatggttctatcagtagtgtaatccattttcaatgtaaagctcttttagtttttgtcatagacataaattaatattttgagaggcatccctcacctgttcatttcttctgtgttgaaatgaagtacttaaaattaccgttatacatgaactttgtggactgtaagatttgttatatatgttcaaatgccttttagctggctttttaattaatatgcctgttttgagtgcttaatacaatgtaatgtgattgtaaatcatacctattttaaatcattccttcctgtatatttgtactcagagagccttattttattcttccagcagaattactacttgtgatagttcatttacattccccagaatgtgcctctagtgtgaattttgtattcttattaaacgtgtttgctgcagtaaaaaaaagaaataaaga

SEQ ID NO: 632216 - DNA, 720 bp, Homo sapiens
  misc_feature (384)..(384): n is a, c, g, or t
  misc_feature (442)..(442): n is a, c, g, or t
  misc_feature (455)..(455): n is a, c, g, or t
  misc_feature (464)..(464): n is a, c, g, or t
  misc_feature (476)..(476): n is a, c, g, or t
  misc_feature (491)..(491): n is a, c, g, or t
agcggacttccggcttcgctgcttttggttctggttctggaggctgggttgagaggtcgccggtccgactgtcctcggcggttggtcagtgtgaatttgtgacagctgcagttgctccccgcccccgagcagccgaggtgcgtgggggaaggggaagaaggaaaaggtccgggtcgcgtttccgctcagtttttgccagggttgaggcgattccagagagcggcggaaaggataagcctcgacttagaagctaccgagttaccctaagaaaggagtctaccatggctcaagaatctcccaaaaattcagcagcagaaattccagtgactagtaatggagaagttgatgactctcgtgaacatagctttaatagggtaagaacanttttctttctcttaatgcaaagaatcatgataagtctttaaatgttgagatgaaagtnatagacaaatttnatataggantgtttcttagantggcttcagtcaggnatctaatgttattatatagggatgacaaggaaggccattttagtagtttgtcaagattaagctccaggccagtaaactattaggctatggtttattttcagtaatcgatcagcacaaaagtatgtctgatgattctggtatctaactttataagactattaattctgttagtaataaacaagattatccttttaaaattggcactaataactttgtctatatatatgtc

SEQ ID NO: 632217 - DNA, 2880 bp, Homo sapiens
agcggacttccggcttcgctgcttttggttctggttctggaggctgggttgagaggtcgccggtccgactgtcctcggcggttggtcagtgtgaatttgtgacagctgcagttgctccccgcccccgagcagccgaggagtctaccatggctcaagaatctcccaaaaattcagcagcagaaattccagtgactagtaatggagaagttgatgactctcgtgaacatagctttaatagggatttgaagcattcattaccatctggacttggtctctcagaaacccaaattacatctcatggctttgacaataccaaagagggtgttattgaagcaggagcatttcaaggtggccagagaacacagacaaaaagtggaccagttattctagcagatgaaattaaaaatcctgcaatggaaaagttagaacttgttagaaaatggagtctaaacacctataagtgtactcgacagattatctctgagaagctaggccgtggctcaagaactgtggaccttgaacttgaagctcagattgatatattaagggataacaagaaaaaatatgaaaatattttaaaactggctcaaacattgtcgacccagcttttccagatggtacatacccaaaggcaacttggagatgcatttgctgacctgagtttgaagtcactagaacttcatgaagaatttggctataatgccgatacccagaaactgctggctaaaaatggagagactcttcttggggccattaattttttcattgctagtgtgaacactttggtgaataaaaccattgaagatacattaatgactgtgaaacagtatgaaagtgccaggattgaatatgatgcatatcgcactgatttggaagaactgaatcttggaccacgtgacgcaaacactctgccaaagattgagcagtcacagcatctcttccaagcacataaggaaaaatatgataaaatgcgcaatgatgtttctgtcaaattgaaatttctagaagaaaataaggttaaagtattgcacaatcagctggtccttttccacaatgccattgccgcttactttgctgggaatcagaagcagcttgaacagacacttaaacagttccatatcaaattgaaaacccctggagtggatgccccatcttggcttgaagaacagtaaaatcacagcggaaaataaaaagaaagtcgcgttgttatatttctaaaccaacctaacaagaattaagcagagttgggggaagtgggaggggtgacaagcattatagtgattcttgcacaaacagctttaatttttccctttttcatactttaacaattgaactgttaagggtggttttaatgtaaacatagtttctataatctgaacacaataattttcctttttgagaaatccttttgtattgtgagggttgatggctatttctgtagtttgaaaacatctaatagagatttgcactgacaagataaaaattcaaggtttttggtcctggaaatgagggccgattgtaacttttccaaagggaggtttacatgatttgtatcaacatcagatattttatatgtgaatatattaaacatctttaagagattcattttcatgtattaaagaaaaaagaaactattttgcagagtaaagttatatggtgttcctgcagcgtccacacagaggcagcagctctaatgaatgattagcttgtggagttgtggcaaatacctttttaaaaatgaatctgtaccactgtaattttatttagacttttttttaaagacacagaaatcacactgtcatttctgtgaggcttttaagcttatgaatttgcttcacccgaagtcattggacagttacatttgcaatttcttttggttcataacaaaacctgcttaagagaatttttttttttgacaggtggacgtgggaatggaaattcttaatggtttctggagtagaaatctgtacttagaaaactagtttttgggtcagttccattttgatagaagtgaatacatagacagcttttattgacttccatatgtaacaataccgtttaagccttaaatcacagatatgtgccttctcagatacagtaattcttgttcaaccaatgtacaaaatccataaagaaacccctgttggataatgtttgatgtgtctattccttccatggaatggagcactatgtatgaatgttgggtttctttgtacttgttaagccacatttgaggtttatggtaaaaatcatcttttgagtttgctctttggtttttcttcattccttttgaggattgggaaaacagaaagattctttgatttgggtaatgaagaggtaatttgggacagtgtggtggtaccaggaagaaagaggattggaaaggccagtactgttttagttgctcggcactgttggttttgttttaatgtggttgccctgtccactacatggttctatcagtagtgtaatccattttcaatgtaaagctcttttagtttttgtcatagacataaattaatattttgagaggcatccctcacctgttcatttcttctgtgttgaaatgaagtacttaaaattaccgttatacatgaactttgtggactgtaagatttgttatatatgttcaaatgccttttagctggctttttaattaatatgcctgttttgagtgcttaatacaatgtaatgtgattgtaaatcatacctattttaaatcattccttcctgtatatttgtactcagagagccttattttattcttccagcagaattactacttgtgatagttcatttacattccccagaatgtgcctctagtgtgaattttgtattcttattaaacgtgtttgctgcagtaaaaaaaagaaataaaga

SEQ ID NO: 632218 - DNA, 3111 bp, Homo sapiens
agcggacttccggcttcgctgcttttggttctggttctggaggctgggttgagaggtcgccggtccgactgtcctcggcggttggtcagtgtgaatttgtgacagctgcagttgctccccgcccccgagcagccgaggtgcgtgggggaaggggaagaaggaaaaggtccgggtcgcgtttccgctcagtttttgccagggttgaggcgattccagagagcggcggaaaggataagcctcgacttagaagctaccgagttaccctaagaaaggagtctaccatggctcaagaatctcccaaaaattcagcagcagaaattccagtgactagtaatggagaagttgatgactctcgtgaacatagctttaatagggatttgaagcattcattaccatctggacttggtctctcagaaacccaaattacatctcatggctttgacaataccaaagagggtgttattgaagcaggagcatttcaaggttccccagcaccgccactgccatctgttatgtctcctagcagggttgcagctagtcgactggctcagcaaggaagtgatttaattgttcctgcaggtggccagagaacacagacaaaaagtggaccagttattctagcagatgaaattaaaaatcctgcaatggaaaagttagaacttgttagaaaatggagtctaaacacctataagtgtactcgacagattatctctgagaagctaggccgtggctcaagaactgtggaccttgaacttgaagctcagattgatatattaagggataacaagaaaaaatatgaaaatattttaaaactggctcaaacattgtcgacccagcttttccagatggtacatacccaaaggcaacttggagatgcatttgctgacctgagtttgaagtcactagaacttcatgaagaatttggctataatgccgatacccagaaactgctggctaaaaatggagagactcttcttggggccattaattttttcattgctagtgtgaacactttggtgaataaaaccattgaagatacattaatgactgtgaaacagtatgaaagtgccaggattgaatatgatgcatatcgcactgatttggaagaactgaatcttggaccacgtgacgcaaacactctgccaaagattgagcagtcacagcatctcttccaagcacataaggaaaaatatgataaaatgcgcaatgatgtttctgtcaaattgaaatttctagaagaaaataaggttaaagtattgcacaatcagctggtccttttccacaatgccattgccgcttactttgctgggaatcagaagcagcttgaacagacacttaaacagttccatatcaaattgaaaacccctggagtggatgccccatcttggcttgaagaacagtaaaatcacagcggaaaataaaaagaaagtcgcgttgttatatttctaaaccaacctaacaagaattaagcagagttgggggaagtgggaggggtgacaagcattatagtgattcttgcacaaacagctttaatttttccctttttcatactttaacaattgaactgttaagggtggttttaatgtaaacatagtttctataatctgaacacaataattttcctttttgagaaatccttttgtattgtgagggttgatggctatttctgtagtttgaaaacatctaatagagatttgcactgacaagataaaaattcaaggtttttggtcctggaaatgagggccgattgtaacttttccaaagggaggtttacatgatttgtatcaacatcagatattttatatgtgaatatattaaacatctttaagagattcattttcatgtattaaagaaaaaagaaactattttgcagagtaaagttatatggtgttcctgcagcgtccacacagaggcagcagctctaatgaatgattagcttgtggagttgtggcaaatacctttttaaaaatgaatctgtaccactgtaattttatttagacttttttttaaagacacagaaatcacactgtcatttctgtgaggcttttaagcttatgaatttgcttcacccgaagtcattggacagttacatttgcaatttcttttggttcataacaaaacctgcttaagagaatttttttttttgacaggtggacgtgggaatggaaattcttaatggtttctggagtagaaatctgtacttagaaaactagtttttgggtcagttccattttgatagaagtgaatacatagacagcttttattgacttccatatgtaacaataccgtttaagccttaaatcacagatatgtgccttctcagatacagtaattcttgttcaaccaatgtacaaaatccataaagaaacccctgttggataatgtttgatgtgtctattccttccatggaatggagcactatgtatgaatgttgggtttctttgtacttgttaagccacatttgaggtttatggtaaaaatcatcttttgagtttgctctttggtttttcttcattccttttgaggattgggaaaacagaaagattctttgatttgggtaatgaagaggtaatttgggacagtgtggtggtaccaggaagaaagaggattggaaaggccagtactgttttagttgctcggcactgttggttttgttttaatgtggttgccctgtccactacatggttctatcagtagtgtaatccattttcaatgtaaagctcttttagtttttgtcatagacataaattaatattttgagaggcatccctcacctgttcatttcttctgtgttgaaatgaagtacttaaaattaccgttatacatgaactttgtggactgtaagatttgttatatatgttcaaatgccttttagctggctttttaattaatatgcctgttttgagtgcttaatacaatgtaatgtgattgtaaatcatacctattttaaatcattccttcctgtatatttgtactcagagagccttattttattcttccagcagaattactacttgtgatagttcatttacattccccagaatgtgcctctagtgtgaattttgtattcttattaaacgtgtttgctgcagtaaaaaaaagaaataaaga

SEQ ID NO: 632219 - DNA, 684 bp, Homo sapiens
agcggttcgaggagctgctgctgctgaggcggcggcaactgcattgaggtggtggcggcgctgccggccccgggccgctcgagcctcgtcggcgtcgccttccagacgtcggccttgagcccgccaggggcccagcgccggacacgcgccagtgccactatgagatgtgtcacatggagtagtgtactccagaatggggagcatcgaaggaacaacatcgcccatgtcccccgaacggcttcggcctgccagcagccgcgggcacggggaaaatgtctgagtgaggagataaaacaagacgacacgtgagcctcacgcgtgtagccctgatgtccagaacggcaagtcaccaaggagagaaagtagcagaggctatccatcaggcatcctccggccgtcgagaacatgaccaagatgtgatccattgagaccatgaaggtgccaaaggcgcagaatggaaacctagcaaacgtaacaacggctgcgcaagacaccgggagcgttctgccagaaacggcgcttcccacgatcatgtgcggccaacacgtaacgttaaaggcattcagcacggtcaaaggacactgccctaagaccggcgtgcaccccgggaatatctccgatgccccaagaacaaggctcttcccgaaaccacgaattgccatatcgttgcacgggggggcaacc

SEQ ID NO: 632220 - DNA, 3228 bp, Homo sapiens
agcggacttccggcttcgctgcttttggttctggttctggaggctgggttgagaggtcgccggtccgactgtcctcggcggttggtcagtgtgaatttgtgacagctgcagttgctccccgcccccgagcagccgaggtgcgtgggggaaggggaagaaggaaaaggtccgggtcgcgtttccgctcagtttttgccagggttgaggcgattccagagagcggcggaaaggataagcctcgacttagaagctaccgagttaccctaagaaaggatctcaatctgttgcccaggctggagtgtagtgtcacagtctcggcttactgcaacctctgcctcccaggttaagcgatcctcctacctcagcttcctgagtcactgggaccccaggagtctaccatggctcaagaatctcccaaaaattcagcagcagaaattccagtgactagtaatggagaagttgatgactctcgtgaacatagctttaatagggatttgaagcattcattaccatctggacttggtctctcagaaacccaaattacatctcatggctttgacaataccaaagagggtgttattgaagcaggagcatttcaaggttccccagcaccgccactgccatctgttatgtctcctagcagggttgcagctagtcgactggctcagcaaggaagtgatttaattgttcctgcaggtggccagagaacacagacaaaaagtggaccagttattctagcagatgaaattaaaaatcctgcaatggaaaagttagaacttgttagaaaatggagtctaaacacctataagtgtactcgacagattatctctgagaagctaggccgtggctcaagaactgtggaccttgaacttgaagctcagattgatatattaagggataacaagaaaaaatatgaaaatattttaaaactggctcaaacattgtcgacccagcttttccagatggtacatacccaaaggcaacttggagatgcatttgctgacctgagtttgaagtcactagaacttcatgaagaatttggctataatgccgatacccagaaactgctggctaaaaatggagagactcttcttggggccattaattttttcattgctagtgtgaacactttggtgaataaaaccattgaagatacattaatgactgtgaaacagtatgaaagtgccaggattgaatatgatgcatatcgcactgatttggaagaactgaatcttggaccacgtgacgcaaacactctgccaaagattgagcagtcacagcatctcttccaagcacataaggaaaaatatgataaaatgcgcaatgatgtttctgtcaaattgaaatttctagaagaaaataaggttaaagtattgcacaatcagctggtccttttccacaatgccattgccgcttactttgctgggaatcagaagcagcttgaacagacacttaaacagttccatatcaaattgaaaacccctggagtggatgccccatcttggcttgaagaacagtaaaatcacagcggaaaataaaaagaaagtcgcgttgttatatttctaaaccaacctaacaagaattaagcagagttgggggaagtgggaggggtgacaagcattatagtgattcttgcacaaacagctttaatttttccctttttcatactttaacaattgaactgttaagggtggttttaatgtaaacatagtttctataatctgaacacaataattttcctttttgagaaatccttttgtattgtgagggttgatggctatttctgtagtttgaaaacatctaatagagatttgcactgacaagataaaaattcaaggtttttggtcctggaaatgagggccgattgtaacttttccaaagggaggtttacatgatttgtatcaacatcagatattttatatgtgaatatattaaacatctttaagagattcattttcatgtattaaagaaaaaagaaactattttgcagagtaaagttatatggtgttcctgcagcgtccacacagaggcagcagctctaatgaatgattagcttgtggagttgtggcaaatacctttttaaaaatgaatctgtaccactgtaattttatttagacttttttttaaagacacagaaatcacactgtcatttctgtgaggcttttaagcttatgaatttgcttcacccgaagtcattggacagttacatttgcaatttcttttggttcataacaaaacctgcttaagagaatttttttttttgacaggtggacgtgggaatggaaattcttaatggtttctggagtagaaatctgtacttagaaaactagtttttgggtcagttccattttgatagaagtgaatacatagacagcttttattgacttccatatgtaacaataccgtttaagccttaaatcacagatatgtgccttctcagatacagtaattcttgttcaaccaatgtacaaaatccataaagaaacccctgttggataatgtttgatgtgtctattccttccatggaatggagcactatgtatgaatgttgggtttctttgtacttgttaagccacatttgaggtttatggtaaaaatcatcttttgagtttgctctttggtttttcttcattccttttgaggattgggaaaacagaaagattctttgatttgggtaatgaagaggtaatttgggacagtgtggtggtaccaggaagaaagaggattggaaaggccagtactgttttagttgctcggcactgttggttttgttttaatgtggttgccctgtccactacatggttctatcagtagtgtaatccattttcaatgtaaagctcttttagtttttgtcatagacataaattaatattttgagaggcatccctcacctgttcatttcttctgtgttgaaatgaagtacttaaaattaccgttatacatgaactttgtggactgtaagatttgttatatatgttcaaatgccttttagctggctttttaattaatatgcctgttttgagtgcttaatacaatgtaatgtgattgtaaatcatacctattttaaatcattccttcctgtatatttgtactcagagagccttattttattcttccagcagaattactacttgtgatagttcatttacattccccagaatgtgcctctagtgtgaattttgtattcttattaaacgtgtttgctgcagtaaaaaaaagaaataaaga

SEQ ID NO: 632221 - DNA, 254 bp, Homo sapiens
caaattcctgccctcaagtgatccgcccgcctcggcctcccaaagtgatgggattacaggcgtcgccagcgcgccggccttctccagtatttttgcatgcatcttacggcacacctttgcacgccatcttattaactatatcatactgccgcacgtccttttcgccaaggcatccagatggtgcgggtcctgcctgcctcgagaggtggcagcaaaggagccagtgccctcactggtgctgggcggggcggccg

SEQ ID NO: 632222 - DNA, 169 bp, Homo sapiens
gcaccgcacccacgctaatttaaaaatattttatagagacaggtctcactatgttgcccaggctcgtcttgaacccctgggcccaggcgctcctcccaccttgacctcccagagttctggaattacacatgtgagccaacacaccaggcccagacctgagcaagccaga

SEQ ID NO: 632223 - DNA, 3015 bp, Homo sapiens
agcggacttccggcttcgctgcttttggttctggttctggaggctgggttgagaggtcgccggtccgactgtcctcggcggttggtcagtgtgaatttgtgacagctgcagttgctccccgcccccgagcagccgaggtgcgtgggggaaggggaagaaggaaaaggtccgggtcgcgtttccgctcagtttttgccagggttgaggcgattccagagagcggcggaaaggataagcctcgacttagaagctaccgagttaccctaagaaaggagtctaccatggctcaagaatctcccaaaaattcagcagcagaaattccagtgactagtaatggagaagttgatgactctcgtgaacatagctttaatagggatttgaagcattcattaccatctggacttggtctctcagaaacccaaattacatctcatggctttgacaataccaaagagggtgttattgaagcaggagcatttcaaggtggccagagaacacagacaaaaagtggaccagttattctagcagatgaaattaaaaatcctgcaatggaaaagttagaacttgttagaaaatggagtctaaacacctataagtgtactcgacagattatctctgagaagctaggccgtggctcaagaactgtggaccttgaacttgaagctcagattgatatattaagggataacaagaaaaaatatgaaaatattttaaaactggctcaaacattgtcgacccagcttttccagatggtacatacccaaaggcaacttggagatgcatttgctgacctgagtttgaagtcactagaacttcatgaagaatttggctataatgccgatacccagaaactgctggctaaaaatggagagactcttcttggggccattaattttttcattgctagtgtgaacactttggtgaataaaaccattgaagatacattaatgactgtgaaacagtatgaaagtgccaggattgaatatgatgcatatcgcactgatttggaagaactgaatcttggaccacgtgacgcaaacactctgccaaagattgagcagtcacagcatctcttccaagcacataaggaaaaatatgataaaatgcgcaatgatgtttctgtcaaattgaaatttctagaagaaaataaggttaaagtattgcacaatcagctggtccttttccacaatgccattgccgcttactttgctgggaatcagaagcagcttgaacagacacttaaacagttccatatcaaattgaaaacccctggagtggatgccccatcttggcttgaagaacagtaaaatcacagcggaaaataaaaagaaagtcgcgttgttatatttctaaaccaacctaacaagaattaagcagagttgggggaagtgggaggggtgacaagcattatagtgattcttgcacaaacagctttaatttttccctttttcatactttaacaattgaactgttaagggtggttttaatgtaaacatagtttctataatctgaacacaataattttcctttttgagaaatccttttgtattgtgagggttgatggctatttctgtagtttgaaaacatctaatagagatttgcactgacaagataaaaattcaaggtttttggtcctggaaatgagggccgattgtaacttttccaaagggaggtttacatgatttgtatcaacatcagatattttatatgtgaatatattaaacatctttaagagattcattttcatgtattaaagaaaaaagaaactattttgcagagtaaagttatatggtgttcctgcagcgtccacacagaggcagcagctctaatgaatgattagcttgtggagttgtggcaaatacctttttaaaaatgaatctgtaccactgtaattttatttagacttttttttaaagacacagaaatcacactgtcatttctgtgaggcttttaagcttatgaatttgcttcacccgaagtcattggacagttacatttgcaatttcttttggttcataacaaaacctgcttaagagaatttttttttttgacaggtggacgtgggaatggaaattcttaatggtttctggagtagaaatctgtacttagaaaactagtttttgggtcagttccattttgatagaagtgaatacatagacagcttttattgacttccatatgtaacaataccgtttaagccttaaatcacagatatgtgccttctcagatacagtaattcttgttcaaccaatgtacaaaatccataaagaaacccctgttggataatgtttgatgtgtctattccttccatggaatggagcactatgtatgaatgttgggtttctttgtacttgttaagccacatttgaggtttatggtaaaaatcatcttttgagtttgctctttggtttttcttcattccttttgaggattgggaaaacagaaagattctttgatttgggtaatgaagaggtaatttgggacagtgtggtggtaccaggaagaaagaggattggaaaggccagtactgttttagttgctcggcactgttggttttgttttaatgtggttgccctgtccactacatggttctatcagtagtgtaatccattttcaatgtaaagctcttttagtttttgtcatagacataaattaatattttgagaggcatccctcacctgttcatttcttctgtgttgaaatgaagtacttaaaattaccgttatacatgaactttgtggactgtaagatttgttatatatgttcaaatgccttttagctggctttttaattaatatgcctgttttgagtgcttaatacaatgtaatgtgattgtaaatcatacctattttaaatcattccttcctgtatatttgtactcagagagccttattttattcttccagcagaattactacttgtgatagttcatttacattccccagaatgtgcctctagtgtgaattttgtattcttattaaacgtgtttgctgcagtaaaaaaaagaaataaaga

SEQ ID NO: 632224 - DNA, 2967 bp, Homo sapiens
agcggacttccggcttcgctgcttttggttctggttctggaggctgggttgagaggtcgccggtccgactgtcctcggcggttggtcagtgtgaatttgtgacagctgcagttgctccccgcccccgagcagccgaggtgcgtgggggaaggggaagaaggaaaaggtccgggtcgcgtttccgctcagtttttgccagggttgaggcgattccagagagcggcggaaaggataagcctcgacttagaagctaccgagttaccctaagaaaggagtctaccatggctcaagaatctcccaaaaattcagcagcagaaattccagtgactagtaatggagaagttgatgactctcgtgaacatagctttaatagggatttgaagcattcattaccatctggacttggtctctcagaaacccaaattacatctcatggctttgacaataccaaagagggtgttattgaagcaggagcatttcaaggttccccagcaccgccactgccatctgttatgtctcctagcagggttgcagctagtcgactggctcagcaaggaagtgatttaattgttcctgcaggtggccagagaacacagacaaaaagtggaccagttattctagcagatgaaattaaaaatcctgcaatggaaaagttagaacttgttagaaaatggagtctaaacacctataagcttttccagatggtacatacccaaaggcaacttggagatgcatttgctgacctgagtttgaagtcactagaacttcatgaagaatttggctataatgccgatacccagaaactgctggctaaaaatggagagactcttcttggggccattaattttttcattgctagtgtgaacactttggtgaataaaaccattgaagatacattaatgactgtgaaacagtatgaaagtgccaggattgaatatgatgcatatcgcactgatttggaagaactgaatcttggaccacgtgacgcaaacactctgccaaagattgagcagtcacagcatctcttccaagcacataaggaaaaatatgataaaatgcgcaatgatgtttctgtcaaattgaaatttctagaagaaaataaggttaaagtattgcacaatcagctggtccttttccacaatgccattgccgcttactttgctgggaatcagaagcagcttgaacagacacttaaacagttccatatcaaattgaaaacccctggagtggatgccccatcttggcttgaagaacagtaaaatcacagcggaaaataaaaagaaagtcgcgttgttatatttctaaaccaacctaacaagaattaagcagagttgggggaagtgggaggggtgacaagcattatagtgattcttgcacaaacagctttaatttttccctttttcatactttaacaattgaactgttaagggtggttttaatgtaaacatagtttctataatctgaacacaataattttcctttttgagaaatccttttgtattgtgagggttgatggctatttctgtagtttgaaaacatctaatagagatttgcactgacaagataaaaattcaaggtttttggtcctggaaatgagggccgattgtaacttttccaaagggaggtttacatgatttgtatcaacatcagatattttatatgtgaatatattaaacatctttaagagattcattttcatgtattaaagaaaaaagaaactattttgcagagtaaagttatatggtgttcctgcagcgtccacacagaggcagcagctctaatgaatgattagcttgtggagttgtggcaaatacctttttaaaaatgaatctgtaccactgtaattttatttagacttttttttaaagacacagaaatcacactgtcatttctgtgaggcttttaagcttatgaatttgcttcacccgaagtcattggacagttacatttgcaatttcttttggttcataacaaaacctgcttaagagaatttttttttttgacaggtggacgtgggaatggaaattcttaatggtttctggagtagaaatctgtacttagaaaactagtttttgggtcagttccattttgatagaagtgaatacatagacagcttttattgacttccatatgtaacaataccgtttaagccttaaatcacagatatgtgccttctcagatacagtaattcttgttcaaccaatgtacaaaatccataaagaaacccctgttggataatgtttgatgtgtctattccttccatggaatggagcactatgtatgaatgttgggtttctttgtacttgttaagccacatttgaggtttatggtaaaaatcatcttttgagtttgctctttggtttttcttcattccttttgaggattgggaaaacagaaagattctttgatttgggtaatgaagaggtaatttgggacagtgtggtggtaccaggaagaaagaggattggaaaggccagtactgttttagttgctcggcactgttggttttgttttaatgtggttgccctgtccactacatggttctatcagtagtgtaatccattttcaatgtaaagctcttttagtttttgtcatagacataaattaatattttgagaggcatccctcacctgttcatttcttctgtgttgaaatgaagtacttaaaattaccgttatacatgaactttgtggactgtaagatttgttatatatgttcaaatgccttttagctggctttttaattaatatgcctgttttgagtgcttaatacaatgtaatgtgattgtaaatcatacctattttaaatcattccttcctgtatatttgtactcagagagccttattttattcttccagcagaattactacttgtgatagttcatttacattccccagaatgtgcctctagtgtgaattttgtattcttattaaacgtgtttgctgcagtaaaaaaaagaaataaaga

SEQ ID NO: 632225 - DNA, 2553 bp, Homo sapiens
agcggacttccggcttcgctgcttttggttctggttctggaggctgggttgagaggtcgccggtccgactgtcctcggcggttggtcagtgtgaatttgtgacagctgcagttgctccccgcccccgagcagccgaggagtctaccatggctcaagaatctcccaaaaattcagcagcagaaattccagtgactagtaatggagaagttgatgactctcgtgaacatagctttaatagggatttgaagcattcattaccatctggacttggtctctcagaaacccaaattacatctcatggctttgacaataccaaagagggtgttattgaagcaggagcatttcaaggtggccagagaacacagacaaaaagtggaccagttattctagcagatgaaattaaaaatcctgcaatggaaaagttagaacttgttagaaaatggagtctaaacacctataagtgtactcgacagattatctctgagaagctaggccgtggctcaagaactgtggaccttgaacttgaagctcagattgatatattaagggataacaagaaaaaatatgaaaatattttaaaactggctcaaacattgtcgacccagcttttccagatggtacatacccaaaggcaacttggagatgcatttgctgacctgagtttgaagtcactagaacttcatgaagaatttggctataatgccgatacccagaaactgctggctaaaaatggagagactcttcttggggccattaattttttcattgctagtgtgaacactttggtgaataaaaccattgaagatacattaatgactgtgaaacagtatgaaagtgccaggattgaatatgatgcatatcgcactgatttggaagaactgaatcttggaccacgtgacgcaaacactctgccaaagattgagcagtcacagcatctcttccaagcacataaggaaaaatatgataaaatgcgcaatgatgtttctgtcaaattgaaatttctagaagaaaataaggttaaagtattgcacaatcagctggtccttttccacaatgccattgccgcttactttgctgggaatcagaagcagcttgaacagacacttaaacagttccatatcaaattgaaaacccctggagtggatgccccatcttggcttgaagaacagtaaaatcacagcggaaaataaaaagaaagtcgcgttgttatatttctaaaccaacctaacaagaattaagcagagttgggggaagtgggaggggtgacaagcattatagtgattcttgcacaaacagctttaatttttccctttttcatactttaacaattgaactgttaagggtggttttaatgtaaacatagtttctataatctgaacacaataattttcctttttgagaaatccttttgtattgtgagggttgatggctatttctgtagtttgaaaacatctaatagagatttgcactgacaagataaaaattcaaggtttttggtcctggaaatgagggccgattgtaacttttccaaagggaggtttacatgatttgtatcaacatcagatattttatatgtgaatatattaaacatctttaagagattcattttcatgtattaaagaaaaaagaaactattttgcagagtaaagttatatggtgttcctgcagcgtccacacagaggcagcagctctaatgaatgattagcttgtggagttgtggcaaatacctttttaaaaatgaatctgtaccactgtaattttatttagacttttttttaaagacacagaaatcacactgtcatttctgtgaggcttttaagcttatgaatttgcttcacccgaagtcattggacagttacatttgcaatttcttttggttcataacaaaacctgcttaagagaatttttttttttgacaggtggacgtgggaatggaaattcttaatggtttctggagtagaaatctgtacttagaaaactagtttttgggtcagttccattttgatagaagtgaatacatagacagcttttattgacttccatatgtaacaataccgtttaagccttaaatcacagatatgtgccttctcagatacagtaattcttgttcaaccaatgtacaaaatccataaagaaacccctgttggataatgtttgatgtgtctattccttccatggaatggagcactatgtatgaatgttgggtttctttgtacttgttaagccacatttgaggtttatggtaaaaatcatcttttgagtttgctctttggtttttcttcattccttttgaggattgggaaaacagaaagattctttgatttgggtaatgaagaggtaatttgggacagtgtggtggtaccaggaagaaagaggattggaaaggccagtactgttttagttgctcggcactgttggttttgttttaatgtctgggccctcaatggattggaagatgccagcccacattggtgagggtcatcttctttactcagtctactgattccaatgctaatctcttctagaaacacccttgcagacacactctggaaa

SEQ ID NO: 632226 - DNA, 188 bp, Homo sapiens
gtctagaggatcccagtgtcatgtatacgggcttgatgtgttccagcagctaaaacctgtgaaactggtgaaaaagaaaaaaatgaagtggggtggggatcttagagtagatccaattcagcagtagcacagaagactaaagtgtaaataacggagactctcacaaactccagtcagcctcaaggttc

SEQ ID NO: 632227 - DNA, 1857 bp, Homo sapiens
agcggacttccggcttcgctgcttttggttctggttctggaggctgggttgagaggtcgccggtccgactgtcctcggcggttggtcagtgtgaatttgtgacagctgcagttgctccccgcccccgagcagccgaggtgcgtgggggaaggggaagaaggaaaaggtccgggtcgcgtttccgctcagtttttgccagggttgaggcgattccagagagcggcggaaaggataagcctcgacttagaagctaccgagttaccctaagaaaggagtctaccatggctcaagaatctcccaaaaattcagcagcagaaattccagtgactagtaatggagaagttgatgactctcgtgaacatagctttaatagggatttgaagcattcattaccatctggacttggtctctcagaaacccaaattacatctcatggctttgacaataccaaagagggtgttattgaagcaggagcatttcaaggttccccagcaccgccactgccatctgttatgtctcctagcagggttgcagctagtcgactggctcagcaaggaagtgatttaattgttcctgcaggtggccagagaacacagacaaaaagtggaccagttattctagcagatgaaattaaaaatcctgcaatggaaaagttagaacttgttagaaaatggagtctaaacacctataagtgtactcgacagattatctctgagaagctaggccgtggctcaagaactgtggaccttgaacttgaagctcagattgatatattaagggataacaagaaaaaatatgaaaatattttaaaactggctcaaacattgtcgacccagcttttccagatggtacatacccaaaggcaacttggagatgcatttgctgacctgagtttgaagtcactagaacttcatgaagaatttggctataatgccgatacccagaaactgctggctaaaaatggagagactcttcttggggccattaattttttcattgctagtgtgaacactttggtgaataaaaccattgaagatacattaatgactgtgaaacagtatgaaagtgccaggattgaatatgatgcatatcgcactgatttggaagaactgaatcttggaccacgtgacgcaaacactctgccaaagattgagcagtcacagcatctcttccaagcacataaggaaaaatatgataaaatgcgcaatgatgtttctgtcaaattgaaatttctagaagaaaataaggttaaagtattgcacaatcagctggtccttttccacaatgccattgccgcttactttgctgggaatcagaagcagcttgaacagacacttaaacagttccatatcaaattgaaaacccctggagtggatgccccatcttggcttgccacagcacacagtcaaaatccaccagcggcacaacatcacacacacagcacaagtccgccgtagcttcatcatttcctcaaacccaacctcaaccaagcaattaagccagcagtctggggcgcacacgtgggcaggggtgcaccaaagccattcatcaggtgcattcattgcgacacaaccaggctttacattttctccgcgttttgtccagtacttgtaacacattgcaacctggttcaaagggtggatgtatctcaatggtaacacatcaggtgtcgtcatcaatcgtggcaaccacacatcaatttatccatatattgcagcaaatccatttaggtattagtgcagggttgataggctcattatctagtcagtttgcaaaaacatctcaatagcagatttgcgactggacgaagcatcaaaaaattccaaggtattttgggtcctggggaaaatggcaggt

SEQ ID NO: 632228 - DNA, 434 bp, Homo sapiens
  misc_feature (369)..(370): n is a, c, g, or t
agaacactgctaagaggttctgaatgtttgtccctcacatagcatttaagaacactgctacgagggtctgaatgttttccctcacataggatcgaagagcactgctgctgggatctgaatgtttttgggcacataggattccagaactctcctgatgtggtctttatgtttgtccctcacatagaattccagaacactgctgctgagttctgcttgtttgtccctcatttaggattcaagaacactcctgctgtgttctgaatgtgtgtctctcacataggattccagaacattgccacggagggtctaaaatgtttctctgtcacctaggattataagaacactcgctgctgcggttctgagtcgttnnctccctcactttgggattccaggaacaggagcttcggggggtctgaaatatcagtccctcacat

SEQ ID NO: 632229 - DNA, 764 bp, Homo sapiens
ctgtcgtggcaatccctgagcgcaccgccgtgatgcccaggaagacaggccgacctggaagtccaacctacttccttaagatcatccaactattggatgattatccgaaatgtttcacttgtgggatgcacgatcgaactggtggagcgtcccacagcaagttgcagcagtaatccagctagtgtccctgttcgtcgtggaaggctgatggctgctgactggtgcatagtaatcaccaatgtatgcgcaatggccatccgatgggtcacctggaaaacaacccagcttctggagaaactgctggcctcgacttagtacctgcgcgggtaattgtgggcgcctctctggtgcttcctacccataggggatgggtacctcccactcgtatggatcagtggaatcacttgctctagccttgcgccacaatagacgcgtgccagacttggctgcccgatggctggttgccacttgccccagtgtgcatggtcagcttggtcgccaacggcccaaggaaacgacgtggctctcgcgtgcccggaggcaaagaccatctcgtttttttcgcagtggctctatacgagtagttcagcccatcgtaaccctcgtccgatggggtctcctattgcaagagtccctgaagatgcactgtcgtcagcctgactcggagcattgggccgacaaccgtggcgggtccagccgatcgcctcggctgctgcaccattgctcaacactctgccccttctcctttgggctggcatcctgca

SEQ ID NO: 632230 - DNA, 685 bp, Homo sapiens
agcggacttccggcttcgctgcttttggttctggttctggaggctgggttgagaggtcgccggtccgactgtcctcggcggttggtcagtgtgaatttgtgacagctgcagttgctccccgcccccgagcagccgaggtgcgtgggggaaggggaagaaggaaaaggtccgggtcgcgtttccgctcagtttttgccagggttgaggcgattccagagagcggcggaaaggataagcctcgacttagaagctaccgagttaccctaagaaaggtttgggttcttataaggaaagctgctaggagtacatgtctacaagattcaagaagctagttcccagccttcacttttttggttgtacaatatactagctctctaggtttggtacatgacgatgcctttagatcatctccaaaaaagtaacatcataattggaatgtgacatccatatatattggatttttaaagattgtttccaaagattcagctgtacagagtgtgtgcctaatacttttctaacttggaaataattcagtggtggctaaagctggcttgtactgcctgcaaaagctgattggtaaattttcaagaatttgtaagccaactgttaaacacagccattattttaaaaattatgtaaagttattattaaatacatatattaaaaataaaagtaatacctcctc

SEQ ID NO: 632231 - DNA, 464 bp, Homo sapiens
  misc_feature (22)..(22): n is a, c, g, or t
ccttttcctggttttaatcttngcctgtcatataggttggtgttaattaatttccacattgaatcattattcacatgagaaaggggcatttatctgtttctttagtttaagtagtaccttctacttaggaagacatttttgctcttaatatacaaagcctttgcccaaggtggaaaccaccaaacttatgacctgtctgttaaaactgtctaggaactttgtatgttcacacaaagtgctaggaaatggattgtattattaacatctcattttagtctcttttgttatgggagaattttaggtgcttcaaaataataaatagagaattttgagaattgtaataattgttagtgctgcttatatccaggagcccatacaagtaatgtagttaacattgaaattttgtttcaatatggtgggaaacattttgataacccattagaagcacaagaattatctttctt

SEQ ID NO: 632232 - DNA, 345 bp, Homo sapiens
gtcgacttctgacttccgcatgtgttttgtggtacatattcaacttgcattcacatacattaaagtacagacacaaatttttatttatttacagtgttgctatgtggtcctggctattctggaactatgtggaccaggctggtctcaaattctaaagatcctcctgcatctcaagtgctgtcattaaaaggtatgtgccaccaatgcctagcctaacaattttcaaaataccattcctctaataagtaactagacaatacataagaaaaaaattagttctttcccaggatacatataatgtatagaataggaaggtactcaggaacaccgaacttacgtcgacgc

SEQ ID NO: 632233 - DNA, 140 bp, Homo sapiens
tcgatctagaggatcccggcgggtctcttcctggacctcattatccacccgctttggctcccaaagtgctgggattacaggtgtgagccaccgtgcctagccaacatcatctttaatgatgcagaaactagatgctttct

SEQ ID NO: 632234 - DNA, 343 bp, Homo sapiens
gcgagaactagcctcgagaatgtaaatttctgtattgctgtcagctctcagtcaagaagggctgaacaatgatgatacctatgaccactagaactcttctacatttgggtctgcagtagaactcatacctatcatataacccagctcaatgactatcacacaggttagataagaccaatggtaaacaggacagtgatagctatttcacgcagtactaagaccctacacttacagaatgtacaatacgcgaagatgcatctatactgctgctcatgtatcaatatatatacttgccactgagtagcttacctaggacacactgttactcatacatcatcagcct

SEQ ID NO: 632235 - DNA, 348 bp, Homo sapiens
aatcagtgtgttctttcttccttcatgaggcttcaggattccttttatcatttcctctgtttagaaaacttcttttagccattcttttagggtaaatctgctgatgacagattctcagtgttccttcatctaagaatgtcttcatttctcctttatttttgaaggtggcattttgctgagtctagggttctggggtggactgttcttttctttcagcgtttaaaaaatattgtgccacttccaggtagcctccatcgtttctaatgacaaatctcctgttattcagactgatttccccctatgggtaatgtgtcatttttttttttttcctggctgctttcaagattt

SEQ ID NO: 632236 - DNA, 395 bp, Homo sapiens
  misc_feature (64)..(64): n is a, c, g, or t
tcggccggtaccgcatgtgactgcatattccccaacagtgtgctttgatggcttctctccaggntggaagtggttggagcaaaggtcagactggccctttcatccctgtggctcatagcctggcactaggcatgctggcagaagaggaaacaggaaggctttgggctgcatgcagatccccaactcttaaaacctggagccaaacttgaccccaggttttaagagttggggtcaagtttggctctctcatacattctcatggtggagcaagcatgggtcaagtgtgggggtattggagcctcttaccagctgagtagattggggcaagttaattaaactcactgtgcctcagtatccccaactgtaaaataggagctcattagagcctgcctcac

SEQ ID NO: 632237 - DNA, 128 bp, Homo sapiens
ctcgtgagggtcgacgcggccgcgtcgacattggcgcgtgccaacaactccatgtcggttcaggtttctcaagggctcaatgctacggcggctaaggcttttgcatctgagatcgaacgcaacccgga

SEQ ID NO: 632238 - DNA, 524 bp, Homo sapiens
cgagctggtaccgcgatcgtgacttggctcactgcaacctccatctcccaggtcagccattcttgtgcctcagctccagagtagctgggatcacagggacgtgccaccatgcccagctaatttttgtgtttttagtagagacagagtttcacagcctgttacccaggctggtctcgaactccagatctcagaacccccacctcagcgtctcaaaatgctgggattacaggcgtgagccactactgccagcccactccctgctatttttagttctatttttatttttattttgagacggagtttcgctcttgttgcttaggctggatggagtgccaacgccccgtctcggctaactgcaacctccgcctcccagttcaagtgattctcctgcctcagcctcctgagtagctgtaattacaggcacctgccaccacgcccggctaatttttgtatttttagtagagacgaggtttcaccatgtcggtcaggctggcctcaaactccctacctcaggcaatccactc

SEQ ID NO: 632239 - DNA, 340 bp, Homo sapiens
gggtatctgctcctgtgttagtttgctaaggataacagcctcaagctccatccatgttcctgaaaaagacacgttctcattcttttttatagctgcatagtactccatggtgtatatgtaccacattttctttatccagtctatcactgatgggcatttaggttgattccatgcctttgctattgtgaatagtgctgcaggactggttgttgttgttgttgttttttaattacatttcttttttttttttttttttttttttttgaggaaaggaatccccggtgtggggccccgggggggacccccaaacggggacccccaataaagccaccctggaggc

SEQ ID NO: 632240 - DNA, 208 bp, Homo sapiens
gcgggagaccaaagcctgcaagaaagaccccagcctccattgactgtaagaagatgaaccacaggcaacaattaagatcaactttcaaatccctcccttgaacgggcttaggagagtctatgacaagaaacctctgcttctctgacacatggaaagaatgctggggaagagggtgagtttgtttttcattaaaagaagttgctgagcc

SEQ ID NO: 632241 - DNA, 288 bp, Homo sapiens
gtgaaaactacccctaaaaagccaaaaatgggaaaaggaaaaagaactcataatcaacattgtcgtcattggacaacgtagaattcgggcaagtccaccaactaactggccatctgatctaataaaatgcggtggcatcgacaaaaagaaccattgaaaaaatttgagaaggaggctgctgaaatgggaaagggctccttcaagtatgcctgggtcttggataaactaaaagctgagcgtgaacgtggttcacattgatatctccttgtgggaatttgagcccgcagt

SEQ ID NO: 632242 - DNA, 745 bp, Homo sapiens
gagcgggggcccgaggtggcggggcggtataaagccggcgactgggagcatgtaatgtcggaatgcggaggcgcggggcggagaagaagcagctgaggacgccgaggacgagcgagggcgcaggcggtgtgccccgcggggctcagacgtgcctcagcctcgagcccaggacccgtgtgccaacagcgtccctcgggtgggcccaggctccggccggccggggcttgcagttggccccttccttcatggcgcgcccagggcccgaaaacttggcatccatgaagagcgcccgagagcacccccccgcagctggacagcgcctggaccacctgcgcccctcaaagttccacacctggtcaaccacgacgaccaaacacgcgatggtgaatcaagtcaccaggcaaaaggccccacacctgggacaacagccgtaggacactaccccttaggacgcgctcgtccaaggtcccgttgaaacacatcttatcccacagggggcggccacgcccgtagacatcacgatggcccagcaagaatcaacgctccccgaacgcagacgcaaataccaacaacgcgcggcgcaacacgtggactgccggccactaccctaagcgccccccaccgtagggagaggggggaaacacagcccacaaaccgacggtgccaggcgcccccacaaaccgacgtgggccgccacaggacagccgccaacgcgtccggcgcgttgcagcaacatcccagacgg

SEQ ID NO: 632243 - DNA, 514 bp, Homo sapiens
ggtgtggcccaggctagagtgcaggggtgagatctgggtcacggcaacctccagggtgggtactttctggaccacctctctcatgggccgggggctcagctgggcaaatgacaggggcagcagggaacgcctgagcgggccagctccggcccccaggtcagagccattaacactggaggctggaggtgaaaatctggtggaccgtcacagggagagtcctttcacccagaaaaggggcgcaaagggatggcatcataccgggtacatagcaggcgcttaataaagtctggcatttatgatgtgaggagggcagaggggtcagcggctcagggggacagggcacccatgaagggtgccgtttaatgtcctactcatcttgggacacaaaggaccagggtcctagaagccgcaggcacgggtgatgtgcgagggcctcggcctgggtcagacagaattgcaggcatttaaaaaccacaaggcgggggacggcttccagagagtttgggactaagaa

SEQ ID NO: 632244 - DNA, 884 bp, Homo sapiens
  misc_feature (544)..(544): n is a, c, g, or t
gcctttctgtccgtggatggcgcggaaagaagcatcgtgaaagtctctgcttacactgctggccgtcaatgtcgaagtcagagtctccttaaagagcgccgaacagatgaggaagctctgcattggagggtagagcttggaaacaacggatgagagcctgaggagccatttggagctaatggggagatcgctcgacggtagcggtgtggtcaatgaggagatcgcaatagacctaagcgctccaggggctgtggcggttggtcacgatatgccacaggtgggaggatggtggcatgcagcctagtgacatgcatagggcgcaaaccacaggtgggatgcgaagagattgtggaacctaagagcaggagctggtgctgccaagaagtaacgatgctctaaacgacgcaaggtgacgcgacgtgtaagctggtagaagaagagtatattttgatagcgtggcgatgtgaagaggaagtgacgactggagaggaacatcaatccgtagacgaggattgtatctttggagacaaggtgagtggggaanagaaagtacgaatcgtagaattgggaaacatcatgaactgggacctgagtgcgaggtgggccaatgagagaaaggggggcgttatggcctttatggtagacctgtgtggactgacgcaatagacttccggtggcatagagaattggtcatttcaaagaaattaggcattaggtgttggaattggggcacaatactgttgcaaggtttaggaaataagccactggtcggatatgcaagagaatggttacgtggctttcattccaagccacaagagggttcgaaagtgggttcgtggaagagtttggtgggtgggtcgtgggaggttggttgtcggtgggga

SEQ ID NO: 632245 - DNA, 432 bp, Homo sapiens
agatggcggaggtgcacgtcatggtgcttgatggtcatggccatgtcatgggccgtctggcggccatcgatgctaaacaggtactgctggtccagacggtagtggtcgttcactgtgaaggcatcaacatttctggcaatttctacagaaacaagtagaagcacctgactttgctcagtaagcggatgagcaccaaccattcacgaggcccttacgactttcggacccgcacacacatcttatggcggactgtgcgacgtatgctgtatcactgaaccaaacgaggccaggccgatctggaccatctcaaagcgctggactgaatcgtaatgccctacgacaagaataagcagatggtggatcctgctaaccttgacgtgcgtctgaagactacgacagtctgtctatatggtgcacctgtgtcacgagttg

SEQ ID NO: 632246 - DNA, 510 bp, Homo sapiens
  misc_feature (136)..(136): n is a, c, g, or t
  misc_feature (153)..(153): n is a, c, g, or t
  misc_feature (157)..(157): n is a, c, g, or t
  misc_feature (160)..(160): n is a, c, g, or t
  misc_feature (172)..(172): n is a, c, g, or t
  misc_feature (188)..(188): n is a, c, g, or t
  misc_feature (190)..(190): n is a, c, g, or t
  misc_feature (222)..(222): n is a, c, g, or t
  misc_feature (237)..(237): n is a, c, g, or t
  misc_feature (260)..(260): n is a, c, g, or t
  misc_feature (286)..(287): n is a, c, g, or t
  misc_feature (302)..(302): n is a, c, g, or t
  misc_feature (345)..(345): n is a, c, g, or t
  misc_feature (376)..(376): n is a, c, g, or t
  misc_feature (432)..(432): n is a, c, g, or t
  misc_feature (442)..(442): n is a, c, g, or t
  misc_feature (456)..(456): n is a, c, g, or t
  misc_feature (458)..(458): n is a, c, g, or t
cttccttgctttggtgcctacccgagtcaaagaccccgttacccgcccccctctcaaaatccggaacacattcgggcccgaggtccacctgctcccccccccgtcggaggagctggcctttaacaagttggttacncttacgtgcctggcacncggnttnagccccaaggangtgttggtttgctggntncaggggtcacaggaattgccccccgaaaagtnccttatttgggcatnccggcaggagcccagccagggcncccccccctttgttgtgaccagcatnntgggggtggcaaccnaggattggaaaaagggggaccccttttcctgcatggtgggccncgaggcccttccgttggcctttacacaaaanaccattgaccgcttggggggtaaacccccccatgtcaatgtgtttgttgtcatggnggaggtgggnggcccctgtttttnanccgcccgcctgtccccccccctgaataaactccatgttcccccaagcagcca

SEQ ID NO: 632247 - DNA, 120 bp, Homo sapiens
gttgacatgatacgaatcgagcccggtaccagaagggtactaagctttgccatacatatcataaaattagacaaggtgattttggcacagtaatattgccaaacacaccaccactcagtg

SEQ ID NO: 632248 - DNA, 137 bp, Homo sapiens
  misc_feature (122)..(123): n is a, c, g, or t
  misc_feature (137)..(137): n is a, c, g, or t
gggcagagggtatccaaggccggacctggcgcgcaggcgctgacccgacctggcagtgagctggccgcggccttggctgatatttctcatccccgcggggcggccgcgccctgcatgcgagnngggcctttgtcggn

SEQ ID NO: 632249 - DNA, 348 bp, Homo sapiens
acgacgagaggatccccacgtcacagttagctagatgaacactagtcacgaataaaaacgtctacctctctagtactaatctccctacaaatctgccgttaagtgtattacattcacagccacataactaatcatattgttatatcttcttcgaaaccacacttatccccaccttgtgctatcatcacccggatggaggcaaccagtccatgaacgccgtgtaacgcaggcagcgatacgttccctattctacacccttagttaggcgtcccttcccgctactctatcgcacgtagctttacagctctactccagccgcctcactaggttatggtgctgggggtaccg

SEQ ID NO: 632250 - DNA, 251 bp, Homo sapiens
tgacgcgagaaactgtcgccactagccaggatgctccggggactgtacagcacgagcagcagctgaccctgcgtgcccagcccgaggtgaagaccccactaaccgccaacatcacaagaatccggaaacacattccggcccgaggtccacctgctgccgccgccgtcggaggagcgggccatgtacttggaaaaaggccgcatgatctttctggctccactcagtgtctaaggcaccctgcttcctttgct

SEQ ID NO: 632251 - DNA, 494 bp, Homo sapiens
gaataagctcggtacctgatatattgtaggctgagttgaacacctgttatggtgccaacatcgctagttcgtcatcatctttgaacgtatcgcctgtataaattgatttcccaaatgacttgggaagcagtattactagatctggaggcaaccacaggacactaaacttctcccagcctcttcatgaaagaaacctcattctttggcaagcaggaggtgacactagatggctgtgaatgtgatccgctcactgacactctgtaaaggccaatcaatgcactgtctgtctctccttttaggagtaagccatcccacaagttctataccatatttttagtgacagttgaggttgtagatacactttataacattttatagtttaaagagctttattaatgcaataaattaactttgtacacatttttatataaaaaaacagcaagtgatttcagaatgttgtaggcctcattagagcttggccttgccatatgcaa

SEQ ID NO: 632252 - DNA, 261 bp, Homo sapiens
acgacgtgccaaagctgtgaagacgctgttgcagtcctggtcaagccggtgtgagtcatggcactagggatagattctgcaaaagaaaagatggagagggaaaagccagtcgaacgtgagatgaagtcatctgtactcccaaaggcgtccactctttcaaagtcatcagctgtcattgagcaaggagattgtaagaacaacgctcttgtaccaggtcccctcttcacaagttttgatggctgtcctccatggccatttact

SEQ ID NO: 632253 - DNA, 169 bp, Homo sapiens
ctcacttctgtaccctttctgtcatattttcatctgaattaacttctgctacagtaattctcaaccttctttttttctccaatcttgccattacagcattgatgtgaaagtccaatgaggcaatatgtgttaaagcatttcataaactatgatgctataagaatgtaag

SEQ ID NO: 632254 - DNA, 103 bp, Homo sapiens
cctgttgtcattctcagtgcaggtgatccctcctccccagaacaagaactgacaggtagggtcttgtgaagtcatggcttccacaatggctcaggaaacccca

SEQ ID NO: 632255 - DNA, 389 bp, Homo sapiens
  misc_feature (70)..(70): n is a, c, g, or t
tatgaataccagatggcaaaattccctcagctaatacccagtaaactgagttccagtagcatattaaaanggcctacacaccctgacccaagtgggttttatccaactttcagtatatgaaaatcaacccaacaaatcacacattaataaaggaaaaaaatgatcatctcaactgattgagaaaaaaacgtgacaaaacccaatattctttaaactagaaatagacaggaacttcttcaacttgataaaggccatatacatgaaaaactcacagctaacatcatattcagtggtgagagatacaagcttttcccttaagattaggaacaaggtaaaaatgtacactattatcacctctaattatcacagtactagaagttttagccaga

SEQ ID NO: 632256 - DNA, 191 bp, Homo sapiens
ctcgcctgatcatcgagaaatccagttgcagatcgcgagcgctccggcattcgtatcaccgacgaagaactgaaccaggccatgggcaccatcgcccagcgcaacggcatgagcctggagcagttccgcgaagcgctggctcgtgatggcctgtcctatgccgatgcccgtgatcaggtgcgtcgcgagat

SEQ ID NO: 632257 - DNA, 1180 bp, Homo sapiens
ggtattgtgtttattggcaattctgaagaaactatggaggttaaaactcttggcaacactggacacggtacaaactgcttcatattctggcacatttgcattccagcatcgtaggcagaatgcagtgtaattgttcaggcacctatccaggtgcagcaagttattcatttgcgtaaaggcagctgcagtccatcacattctccctcaacatgtatcagggtggcagcacacatcagcaacacacaaccagacattccatgtcagcatgacatttagctttgaacagggctcaagcaactcctgtgtcatcagccatcatcagacaaatttcacattcaacacagcagtcatgcaggcacacatcagcatcaaacgacatcatattgcaagcccaggcactggccgttggcagcaagcagggcaagcagcacacattggcccagcatgttatatccgagattccatcagcagcaaagcacctgcatcattcactttggcagccaccagcagtcagcaagcaccagcactaccaagcatcaacagttcgcagcaaactcatctgcaccgccattgagacatggctaggtatccaaagtcatgggtacttactgcgggcatcaaaccatgacacacagctgttcagtgtgcagtttatcgatgtggccatttatcatagaacccatggaacatccttgaacttataaacagcaaatcagacagcgagtgtgctgaacaattgaggcagcttgcagcaagaataaaagaggatcatgtcaatcagcatggggcaggaagtggatgggaccaggcacacctatggccacccaggagacagaaaaacataaaggaagctagcgaaactgaaaagcgaatacggcgccgcaggacactgaaaagcacaacacaaagacccatagcagtactccgtagaaaccaacgcagggacgcggcaagcggaaggacgaagacagacaaagaagaagaaaaagaacgagacagggacacgagaaccggacgcaaaacgccatccaccccacaaagaacgcaaacgaggccagcaagaaccacacacgaacagcgacacaccgagcgtgcaccagacaaaaaaagccagcagacagcgcgaaaaggcagcaagtagacaccaccacaaggacgacaatatccgcgagctgaaaaa

SEQ ID NO: 632258 - DNA, 300 bp, Homo sapiens
  misc_feature (72)..(72): n is a, c, g, or t
  misc_feature (133)..(133): n is a, c, g, or t
  misc_feature (251)..(251): n is a, c, g, or t
  misc_feature (286)..(287): n is a, c, g, or t
accgggggaaacccccaaaaaaaaaaagaatttcccccaaaaaggggaattttaaaaaggtttccccggggnaaaaaaaaaaaaattttaaaaaccttcccttaaaccaagaaaccttccaaaatttaaatcnttttttttttttttttttgagacggagtctctatcactcaggctggagtgcagtggcgcaatctcagctcactgcaacctcccaggttcaagcagttctcccaggttcaagcaattcncctgcctcagcctctctagcttgggcgcggtttcnnattcgccctatag

SEQ ID NO: 632259 - DNA, 120 bp, Homo sapiens
atggtagcggagggtaaatatgctcgtgtgtctacgtctactcctactgtcaatatatggtgtgctcacacgagtaacccctaggaaggcaattgatatcatagctcagaccatacctat

SEQ ID NO: 632260 - DNA, 115 bp, Homo sapiens
ttagagaataaatgggattgcatgaactccactctgagctgaaatacagacggcgggttaatatccttttcttctgatggttattaacaggtccttatgtcgtcagaagatcgag

SEQ ID NO: 632261 - DNA, 908 bp, Homo sapiens
gagaccctcggggccatgcctgggtggggcctgatgtcgggcgtggggcctgcaggtgggcgccccgagcacgacttggcttccttgtgccttaaaaaacctgccttcctgcagccacacacccacccggggttgtcctggggacccaaggggtgggggggtcacaccatgaagagaggcaggtggcctgggcggctcctgcgggatcatgcagctgcgggcgcggcgggcgcggctgcgacaccccaatcccagccctctaatcgatgtcgcggtgattcttctcgcttcagcccgccgcccagtggccttcgccattctgcccccagtggcggtgcatccccggctgttgccagcttgcgcgacctggtctgtccatcctcgtctgtatcatctacttgcgcaggttgcatgcctgtctgtgcctagtcgccctagttgcgcagttgaccaatatgagttctgatctcttttgcccttcagtgtgcggaccgacattcgtttgcatgtcatcgttctgatagccggatgatacaggtggtttgagtgtcccctgtttgcccggggggctgggccctggggtgccgttcgcttgtcttggttccgttgctcattgtccctggcaaggacgtccgttctggagtgcctcccgctggtgcccggcgacccgggtctttgcaccagggtagtccgctgagccctttcttagtacgccccatgagcttccgggaccggcgcggggggggttctgcatccgtccgtccatggctcggatggcgggacactatgcttctgtgtagagccttgaaagtggccaactcgggtcttatgcctaatcgggcgagccccatcctggttcgcgactggggcggccggagggggcgctcggacggcctcacgcccgtcct

SEQ ID NO: 632262 - DNA, 992 bp, Homo sapiens
atgtagcgtggtgcggcctttggtctgattcatcataattcctatatctatagactgaacttaattactcgtcttcgagtaaagcatcgcatcagtcgtctactttatcttgcagtacttatatagctggttgcccgatagactgaatacggctgctttcgagagcctttctcatatgtatcgtcgtcaataaggcatcatgagaggtagaataagccgtagtagaaacttatgcgctggtgccggcagacactacttgtctggtccatcacatcagttctcttcccacttcccaacatccgctaatcaatcttaatgctcaataagaacagaagagtggaaggaatgttcatcacctgtcacaactataacgagcgatcatccttaatgagtgtgttggccctttcaagtgatacagttctcagggtgaacaaattgtgtcaaccttcacataaatacatattcatctaattgttttctctcccaaagaaagtgtcgttactccgtagatcgacactatgtacaataggctcgactcagagatacccgatgtccctgattagcaagggcgtttaaaactgagtaccaagattctcatacatatgctccggataacccaaggtggtggaacaaagggtcgtctctaaacatgtggaggccccagtttctcttatacaagatcgattcattggctagcgatccaggaagctggtgagctggggtaacgtaaccgggtgctctgagcatacggtggacgcgtacaggacggatataatacctagctcagaaggggaatgtggtggtacgccgtattccagcccttgggagtcaggacaggggatcaccaggcagggagtgagacaggcggcacagagggaaccggcctacaaagaagaggggccagatggggagggcaggaacaagaacgggcggagagaaacgtagccggaaaaagaagacaggaagcacgggcacgggaaggaccgcaagga

SEQ ID NO: 632263 - DNA, 1008 bp, Homo sapiens
aatagaagcagcacaatgagagcatctgcggcgagagtaacagcaagggttgcggtcccgtcactgcagagaactcctgtaagaaatggcagcagaaggaaaagggaaatgcctagtcctagtaatgagggcacttccagttaaatgacagggtgtgacttcatacctgctgaggcagagaagcagaattgaatgacgagactcagtcttggtgagcacgtgaggattcctggggccacgttagtggcacagttcttttggaagatacttagctctgaccacaaagccgagctctctgtcctggctgccctctccctcctcgtagtttttgtgctggtgcagagggggtgctcccctgtgtccaaggctgccctggcgctggggctgctgggcgtctactgctaccgggcggccatcgggagtgtccggttcccgtggcggccggacagcaaggacatttccaacagggcaactccaacaacattgccaccgtggacatctccgcaggcttcgtgggcttagacacctacgtggaaatcccagccgtgctcctgacagcgtttgggacgtacgcagggcctgtgctgtgggccagccacttagtgcacttcctgagctcagaaacacgcagtggttcagcactgagtcatgcttgcttctgctacgcactgatttgttctattccagttttcacgtacatcgttttggtgacatctctgcgttatcatttatttatatggagtgtattttctccaaaacttctctacgagggaatgcacctgctcattacagctgctgtctgtgtattcttcacggcaatggatcaaaccagactcacacagtcttagactaagctgaacactggaaaaataatacatgcttaaagtctgctgttattctaaaatgaaagatatgaattcaacaaagttgatggataactttctttgactgctctacctgaatttagactaagcagtaaatagtttaataaaagatcactttaatata

SEQ ID NO: 632264 - DNA, 249 bp, Homo sapiens
ctaataaaatataatattaaagagcaatgaaaaacaagcgaatggcaaccatatacaacagcatgaatgaatcttaataacattatgttgaattaaaaagtaaataccaaataacaacatatggcatattttctaatgaaattttaaagcaagtataaacaccatatgccttagacgtaatatgtgatataaaattttaagctttataagtgaataataattataaacattcaggacagcatttgcttt

SEQ ID NO: 632265 - DNA, 5181 bp, Homo sapiens
  misc_feature (5173)..(5173): n is a, c, g, or t
  misc_feature (5181)..(5181): n is a, c, g, or t
ctctgattttaatcagttctgcgtttgaaaggaaacccggtgatatccgacatccaaagcacgtccaacagacggatgtggctgcgacactggcgatagcacttggcttaccgattccaaaagacagtgtagggagcctcctattcccagttgtggaaggaagaccaatgagagagcagttgagatttttacatttgaatacagtgcagcttagtaaactgttgcaagagaatgtgccgtcatatgaaaaagatcctgggtttgagcagtttaaaatgtcagaaagattgcatgggaactggatcagactgtacttggaggaaaagcattcagaagtcctattcaacctgggctccaaggttctcaggcagtacctggatgctctgaagacgctgagcttgtccctgagtgcacaagtggcccagtacgacatctattcgatgatggtggggactgtcgtggttttggaggttctcaccctgctcctgctcagcgtcccacaggcactgcgcagaaaggctgagctggaagtcccactgtcatctcctgggttttctctgctcttttatttggtgatcctggttctttcggccgttcacgtcattgtgtgcacctcagctgaaagttcgtgctacttctgtggcctctcgtggctggcggcaggtggggtgatggtgctggcctcggcgctgctgtgtgtgattgtgtctgttctgaccaacgtgctcgtgggtggaaacaccccaaggaagaaccccatgcatcccagctcaaggtggtcagagctagaccttcttattctgttggggacggcgggccacgtcttgagcctgggcgccagcagcttcgtggaggaggagcaccagacctggtacttccttgtgaacaccctgtgtctagctctgagccaagaaacctacagaaactactttctgggagatgacggtgagcctccgtgtggcctctgtgtggaacaagggcatgacggggccacagcagcgtggcaggacgggcctggctgtgatgtcctggagcgagacaaaggccacggaagcccctctacctccgaagtgctcagaggccgcgagaagtggatggtgctggccagtccgtggctaatactggcctgctgccggctgctgcgctccctaaaccagacaggtgtgcagtgggctcaccggcctgacctcggccactggctcaccagctctgaccacaaagccgagctctctgtcctggctgccctctccctcctcgtagtttttgtgctggtgcagagggggtgctcccctgtgtccaaggctgccctggcgctggggctgctgggcgtctactgctaccgggcggccatcgggagtgtccggttcccgtggcggccggacagcaaggacatttccaagggtattattgaagctcgttttgtttatgtctttgtccttggcattctgttcacgggcaccaaagacttacttaaatctcaagtcattgctgcagacttcaaactcaagactgtaggtttatgggagatatatagtggattagttcttctggcagccttgctctttagaccacataatcttccggtcttagcatttagcctcttgattcagactctaatgactaaattcatctggaagcccctgagacacgatgcagctgagattactgtgatgcattattggtttggtcaagcattcttctattttcaggtaggttttcattattatcatgggtagtagacttcatgttttacatatttattttaaatttttctttgagaaaatgttcccataagttggaaagtgactgtcagtgtggcatggtgaattacgctgaactctcgtgtattttataagacaaagtacagccggttgtttaagacacgcgtcccaggtgtggatgtgtgggtgcttaagacagcagactgctgctttgctgggccaggcctgggtttatttattacaagcagttcaggaagcacagacatcacgttgttcacttgcttcactgatgaatgtaataattgttctcgttcatgccctttgcccctggtgtcggggctgtccacactggggaccattggtgcccccatgattattagctccctgaagcctggtgggtcgtcagggcttctgtccggtgtttaaagacccatcccagacaagcccaaaccacctcagtttgaagagacatagagggacaggcagacggggcctcagagggatccagcctcatccagcctcccggcaacctcaggagagcaggccagatggggcctcagagggatccagcctcatccagcctcccggcaacctcaggagagcaggcacagccctgctggttcccttccagtgccgactcccaggctgagtcgctttgcagcagctgaacgtcgtggttgcattttggtctctaccgtgaggtctgtattttcttggtgtgcaccggtgtctgcctgtccgctgtctcgtacccaggaggcatgtgcagttctttgtgtccctacagggcctctcttccatcctcttctcctttcctggtgctcccagcctttcccatggaacagcccacagttgcaggattttctgtctttatgtctgtccccctgatcctgaagcccaaaggtggtaggcgtgaagttacagaagtctgtgtcttcaggtacaatgagtaggtggccaatggccagcttcttagccccgtcctggtgcttccccgacccttctgatccgctcaggcccctgtcctcctcgtacacagctgcagctctccctgccatgtccacgcaaggcacaagggtgtccccagcagaactgcaggcctggatgctggtatccagcacgttcaagccaggtggcctccggcaggctcttgccacaccttcgtttccttatctgtaaaccagggatagtggtctcccggcctccccaggacccagccctccctggtctccccacctccccgtggcccctgttttgaggctgagtccgctgcccctcagtgttagatctcctctgagaggaacctgtggctttgctgcccatccctacttcctgccctcgactgggcagttccttaacagatcagggatcaggaacatgactgcccttgctcatctgctggccctccacatttgcccagtccctgggtctctctgcctccgtttcctccctgtttgatgaggataatcacgaagcacatcaggactgttgggttagatgaagtcatgcaggtaaagctgctgtgcagctgcagacatgtcagcatggctggcagtctctgtgcttggctgagcctgctcagagccacagtgacctcctaggtgtcctcctcccctgctcccatcgtggcatctgggactctgtccccctgccaccctccagggtctcctactgcttctgcctgtttgctctctcctcagtctccctgcagaagagcttccaagtggaggagacacatgactggggtggcaccgtccaagagaggcagtagctgcgagtccagtgggtctcagggcaagccaagtcaaagggctggggcctaagacaacagggataggagtcaatgcacatctgtgagataatggggaagcagcatcaacatgacttggggaccccctgggcccacagctctctgcatggaaagggaggaaggagccaagctggtgagcacccagccagtgttttgtggacatgaacagttctggttctggagagggatcttcgttgagcttgatagagacatgtgctgtcggactgtagatgtcatgagtttctgaggaaaggtcagcatgacaggcaagtgacagacatcagagtcagtaaagatggagcgtggggaggcggggcctgggagcagagaggaggggcctaggaatggagaggtggggcctaggagtggaagggtgtggtcttggagtggagaggcggggcctgggagcagagaggaggggcctaggaatggagaggtagggcctaggagtggaaaggtgtggtcttggagtggagaggcggggcctgcgcggagaggcagggtctctcagaagacccctttttgggatccagaatcactaggagcagggtaagctgtgtggcatcagcgcttgcatcctgcagggagttacctaccagggctgggccgggactggccagaaccttgacagatgaagtttgaccagaccaagtgagtcctcatggtctgatacgtaagccagatgtgagttaccaatttgcaccaggggctgtgctcccccagtggctggcctgccctccaccatataacccactggcagcacctcaccgtagatgggacctggctgggtgcccgttctagtcttcagcccagctccccgcttggctgggcccagcagctggcctctcagggccctatgcgcccctcggatgggggtccttgaggggagcttcatgtgcttgtcttaagtcgatgggtctggacaagggtcttagatgtggcacagtcagccagccggtctgtgtgtgcgtccctcttcagagggggccccagcttctgcacggtccgctcacgtgcccttccgcagcctgggcactgcaggcagggggagggggtgccacccaggcaaggccagctcggcagtctgaaggaacggctgggcagccacctctgaccacacgtgtgtccgtgccggcgtggttatctgggctgcctacacagttcacgctaacatcgtagctcacgctaacatcgtggctgttgatgccacgtgttgtgaggcctttgtcagctcttctcctgtattccagggcaactccaacaacattgccaccgtggacatctccgcaggcttcgtgggcttagacacctacgtggaaatcccagccgtgctcctgacagcgtttgggacgtacgcagggcctgtgctgtgggccagccacttagtgcacttcctgagctcagaaacacgcagtggttcagcactgagtcatgcttgcttctgctacgcactgatttgttctattccagttttcacgtacatcgttttggtgacatctctgcgttatcatttatttatatggagtgtaatgataaccgctacacagctagctagtgacctgaaatatcatgctagctgtgatctaatgagatgatcacaagtgtgtacttctgctgtactgatagctagcgatgtataagncctattan

SEQ ID NO: 632266 - DNA, 804 bp, Homo sapiens
ggaaggaggtggagtgaggagggtgatgttgatatgtgatgaagaatgaggacggaagatgaggagagactcctcggagggcttggatggctgaggactgggcccagggatgtatgtggaggccggtggcagctatcggggcttatgagtgcccaggaaggtaaggccgagtgctctagtctgcatttcctgtgaaggtgtgggaggactctgattcagacgagtgaggaagaggacgatgaggaagaggatgatgaggatgaagtacgaccgatgatgatgtggaggatggtgacgaggtggctggtagaggggcgtcgatggaaggccgtgtactctgactgttggatgtgctcgaagagagtgtcttgagcatcagattcaagatgggatcgtcggggcttggttaaccaggatccgacgagtatggttggagtgatgtgagcatgctactgattggagccgggaatacgcgagaagcaatcggccatggtgacaaggtgtcagggagacacgaatgcgaaagcgggtcatcgagcatggactttgatacacccgcttaggatggtcccaaacctggacccctttacggcagttaggtgaggtccacggctatatccgcctataccgaactgtgggcgcgccgcataacgacccgtcaccattggcgcttcgagacggacggtctatccctcgcaggacagctccccagaactatgttggtctcgtggttcccactaggttagcaatgagagcccccaagtgaagccctcatttagcggcagagtagactttccccccatg

SEQ ID NO: 632267 - DNA, 5195 bp, Homo sapiens
  misc_feature (4964)..(4964): n is a, c, g, or t
  misc_feature (5030)..(5030): n is a, c, g, or t
  misc_feature (5187)..(5187): n is a, c, g, or t
  misc_feature (5195)..(5195): n is a, c, g, or t
ctctgattttaatcagttctgcgtttgaaaggaaacccggtgatatccgacatccaaagcacgtccaacagacggatgtggctgcgacactggcgatagcacttggcttaccgattccaaaagacagtgtagggagcctcctattcccagttgtggaaggaagaccaatgagagagcagttgagatttttacatttgaatacagtgcagcttagtaaactgttgcaagagaatgtgccgtcatatgaaaaagatcctgggtttgagcagtttaaaatgtcagaaagattgcatgggaactggatcagactgtacttggaggaaaagcattcagaagtcctattcaacctgggctccaaggttctcaggcagtacctggatgctctgaagacgctgagcttgtccctgagtgcacaagtggcccagtacgacatctattcgatgatggtggggactgtcgtggttttggaggttctcaccctgctcctgctcagcgtcccacaggcactgcgcagaaaggctgagctggaagtcccactgtcatctcctgggttttctctgctcttttatttggtgatcctggttctttcggccgttcacgtcattgtgtgcacctcagctgaaagttcgtgctacttctgtggcctctcgtggctggcggcaggtggggtgatggtgctggcctcggcgctgctgtgtgtgattgtgtctgttctgaccaacgtgctcgtgggtggaaacaccccaaggaagaaccccatgcatcccagctcaaggtggtcagagctagaccttcttattctgttggggacggcgggccacgtcttgagcctgggcgccagcagcttcgtggaggaggagcaccagacctggtacttccttgtgaacaccctgtgtctagctctgagccaagaaacctacagaaactactttctgggagatgacggtgagcctccgtgtggcctctgtgtggaacaagggcatgacggggccacagcagcgtggcaggacgggcctggctgtgatgtcctggagcgagacaaaggccacggaagcccctctacctccgaagtgctcagaggccgcgagaagtggatggtgctggccagtccgtggctaatactggcctgctgccggctgctgcgctccctaaaccagacaggtgtgcagtgggctcaccggcctgacctcggccactggctcaccagctctgaccacaaagccgagctctctgtcctggctgccctctccctcctcgtagtttttgtgctggtgcagagggggtgctcccctgtgtccaaggctgccctggcgctggggctgctgggcgtctactgctaccgggcggccatcgggagtgtccggttcccgtggcggccggacagcaaggacatttccaagggtattattgaagctcgttttgtttatgtctttgtccttggcattctgttcacgggcaccaaagacttacttaaatctcaagtcattgctgcagacttcaaactcaagactgtaggtttatgggagatatatagtggattagttcttctggcagccttgctctttagaccacataatcttccggtcttagcatttagcctcttgattcagactctaatgactaaattcatctggaagcccctgagacacgatgcagctgagattactgtgatgcattattggtttggtcaagcattcttctattttcaggtaggttttcattattatcatgggtagtagacttcatgttttacatatttattttaaatttttctttgagaaaatgttcccataagttggaaagtgactgtcagtgtggcatggtgaattacgctgaactctcgtgtattttataagacaaagtacagccggttgtttaagacacgcgtcccaggtgtggatgtgtgggtgcttaagacagcagactgctgctttgctgggccaggcctgggtttatttattacaagcagttcaggaagcacagacatcacgttgttcacttgcttcactgatgaatgtaataattgttctcgttcatgccctttgcccctggtgtcggggctgtccacactggggaccattggtgcccccatgattattagctccctgaagcctggtgggtcgtcagggcttctgtccggtgtttaaagacccatcccagacaagcccaaaccacctcagtttgaagagacatagagggacaggcagacggggcctcagagggatccagcctcatccagcctcccggcaacctcaggagagcaggccagatggggcctcagagggatccagcctcatccagcctcccggcaacctcaggagagcaggcacagccctgctggttcccttccagtgccgactcccaggctgagtcgctttgcagcagctgaacgtcgtggttgcattttggtctctaccgtgaggtctgtattttcttggtgtgcaccggtgtctgcctgtccgctgtctcgtacccaggaggcatgtgcagttctttgtgtccctacagggcctctcttccatcctcttctcctttcctggtgctcccagcctttcccatggaacagcccacagttgcaggattttctgtctttatgtctgtccccctgatcctgaagcccaaaggtggtaggcgtgaagttacagaagtctgtgtcttcaggtacaatgagtaggtggccaatggccagcttcttagccccgtcctggtgcttccccgacccttctgatccgctcaggcccctgtcctcctcgtacacagctgcagctctccctgccatgtccacgcaaggcacaagggtgtccccagcagaactgcaggcctggatgctggtatccagcacgttcaagccaggtggcctccggcaggctcttgccacaccttcgtttccttatctgtaaaccagggatagtggtctcccggcctccccaggacccagccctccctggtctccccacctccccgtggcccctgttttgaggctgagtccgctgcccctcagtgttagatctcctctgagaggaacctgtggctttgctgcccatccctacttcctgccctcgactgggcagttccttaacagatcagggatcaggaacatgactgcccttgctcatctgctggccctccacatttgcccagtccctgggtctctctgcctccgtttcctccctgtttgatgaggataatcacgaagcacatcaggactgttgggttagatgaagtcatgcaggtaaagctgctgtgcagctgcagacatgtcagcatggctggcagtctctgtgcttggctgagcctgctcagagccacagtgacctcctaggtgtcctcctcccctgctcccatcgtggcatctgggactctgtccccctgccaccctccagggtctcctactgcttctgcctgtttgctctctcctcagtctccctgcagaagagcttccaagtggaggagacacatgactggggtggcaccgtccaagagaggcagtagctgcgagtccagtgggtctcagggcaagccaagtcaaagggctggggcctaagacaacagggataggagtcaatgcacatctgtgagataatggggaagcagcatcaacatgacttggggaccccctgggcccacagctctctgcatggaaagggaggaaggagccaagctggtgagcacccagccagtgttttgtggacatgaacagttctggttctggagagggatcttcgttgagcttgatagagacatgtgctgtcggactgtagatgtcatgagtttctgaggaaaggtcagcatgacaggcaagtgacagacatcagagtcagtaaagatggagcgtggggaggcggggcctgggagcagagaggaggggcctaggaatggagaggtggggcctaggagtggaagggtgtggtcttggagtggagaggcggggcctgggagcagagaggaggggcctaggaatggagaggtagggcctaggagtggaaaggtgtggtcttggagtggagaggcggggcctgcgcggagaggcagggtctctcagaagacccctttttgggatccagaatcactaggagcagggtaagctgtgtggcatcagcgcttgcatcctgcagggagttacctaccagggctgggccgggactggccagaaccttgacagatgaagtttgaccagaccaagtgagtcctcatggtctgatacgtaagccagatgtgagttaccaatttgcaccaggggctgtgctcccccagtggctggcctgccctccaccatataacccactggcagcacctcaccgtagatgggacctggctgggtgcccgttctagtcttcagcccagctccccgcttggctgggcccagcagctggcctctcagggccctatgcgcccctcggatgggggtccttgaggggagcttcatgtgcttgtcttaagtcgatgggtctggacaagggtcttagatgtggcacagtcagccagccggtctgtgtgtgcgtccctcttcagagggggccccagcttctgcacggtccgctcacgtgcccttccgcagcctgggcactgcaggcagggggagggggtgccacccaggcaaggccagctcggcagtctgaaggaacggctgggcagccacctctgaccacacgtgtgtccgtgccggcgtggttatctgggctgcctacacagttcacgctaacatcgtagctcacgctaacatcgtggctgttgatgccacgtgttgtgaggcctttgtcagctcttctcctgtattccagggcaactccaacaacattgccaccgtggacatctccgcaggcttcgtgggcttagacacctacgtggaaatcccagccgtgctcctgacagcgtttgggacgtacgcagggcctgtgctgtgggccagccacttagtgcacttcctgagctcagaaacacgcagggtcagactgagcatgctngctctgtacgactgattgtcattcagttcacgacatgttgtgcacttggatattatataggggatnttcaactcttacagatgactgtatacagtgtgctggatctcacgatgataaccgctacacagctagctagtgacctgaaatatcatgctagctgtgatctaatgagatgatcacaagtgtgtacttctgctgtactgatagctagcgatgtataagncctattan

SEQ ID NO: 632268 - DNA, 483 bp, Homo sapiens
ggagacggggtactcaacttcgaaacctggacagaagactaaggactcgggactctccctaggcaggggggtgccatcaaagtatctgaacacagtgacatagaagttttcataaggaagaatctccgggtgaagagaggaagagccggtggtccaaaaggcccaccagaggcatatggtaaataaagccaaatggggtaggagagagaacaagggggaagggagagaaacaagagccagggagaagggaagcaccatcaaaaggggcgggggaggtggggaacaaggaagagtggagggaggacctcggagactagtccaaggcttcagggcgtgggagtcgtggttcagcagagacagaaagggggaagtctgcacaggaagccggcttggtggatgcagagtggggctcgggatatggctcaagttgaaatagggcatcaagtgaaaataaccggcatgtactgggaggccgaagcaggt

SEQ ID NO: 632269 - DNA, 427 bp, Homo sapiens
tttcacgggacaacggatcccgcctaccctgctcctgtcagcaggaacacagctggggggacatgaggccacaacctatttatactgctgggcatttgcccaggtagcctcagggcagatgacaccttagcttcccccatgttgttaagattcctaccagatcatactgactgccacctgactccaagctcagagggacagagaagtccccccggggtaaaattctaaatgcctgggttcagttctcggctccttttgaagctacatttaagctcaaacacttaaggcaattgcctaaaggagttgtgaaggttatgagttattgggacctgtgcctggggcaaagcctccgtagcaaacacccatgcttcctcccaccgggccccacctcaggagttcaggagctggggagcactgaggaatcagc

SEQ ID NO: 632270 - DNA, 4383 bp, Homo sapiens
ctctgattttaatcagttctgcgtttgaaaggaaacccggtgatatccgacatccaaagcacgtccaacagacggatgtggctgcgacactggcgatagcacttggcttaccgattccaaaagacagtgtagggagcctcctattcccagttgtggaaggaagaccaatgagagagcagttgagatttttacatttgaatacagtgcagcttagtaaactgttgcaagagaatgtgccgtcatatgaaaaagatcctgggtttgagcagtttaaaatgtcagaaagattgcatgggaactggatcagactgtacttggaggaaaagcattcagaagtcctattcaacctgggctccaaggttctcaggcagtacctggatgctctgaagacgctgagcttgtccctgagtgcacaagtggcccagtacgacatctattcgatgatggtggggactgtcgtggttttggaggttctcaccctgctcctgctcagcgtcccacaggcactgcgcagaaaggctgagctggaagtcccactgtcatctcctgggttttctctgctcttttatttggtgatcctggttctttcggccgttcacgtcattgtgtgcacctcagctgaaagttcgtgctacttctgtggcctctcgtggctggcggcaggtggggtgatggtgctggcctcggcgctgctgtgtgtgattgtgtctgttctgaccaacgtgctcgtgggtggaaacaccccaaggaagaaccccatgcatcccagctcaaggtggtcagagctagaccttcttattctgttggggacggcgggccacgtcttgagcctgggcgccagcagcttcgtggaggaggagcaccagacctggtacttccttgtgaacaccctgtgtctagctctgagccaagaaacctacagaaactactttctgggagatgacggtgagcctccgtgtggcctctgtgtggaacaagggcatgacggggccacagcagcgtggcaggacgggcctggctgtgatgtcctggagcgagacaaaggccacggaagcccctctacctccgaagtgctcagaggccgcgagaagtggatggtgctggccagtccgtggctaatactggcctgctgccggctgctgcgctccctaaaccagacaggtgtgcagtgggctcaccggcctgacctcggccactggctcaccagctctgaccacaaagccgagctctctgtcctggctgccctctccctcctcgtagtttttgtgctggtgcagagggggtgctcccctgtgtccaaggctgccctggcgctggggctgctgggcgtctactgctaccgggcggccatcgggagtgtccggttcccgtggcggccggacagcaaggacatttccaagggtattattgaagctcgttttgtttatgtctttgtccttggcattctgttcacgggcaccaaagacttacttaaatctcaagtcattgctgcagacttcaaactcaagactgtaggtttatgggagatatatagtggattagttcttctggcagccttgctctttagaccacataatcttccggtcttagcatttagcctcttgattcagactctaatgactaaattcatctggaagcccctgagacacgatgcagctgagattactgtgatgcattattggtttggtcaagcattcttctattttcaggtaggttttcattattatcatgggtagtagacttcatgttttacatatttattttaaatttttctttgagaaaatgttcccataagttggaaagtgactgtcagtgtggcatggtgaattacgctgaactctcgtgtattttataagacaaagtacagccggttgtttaagacacgcgtcccaggtgtggatgtgtgggtgcttaagacagcagactgctgctttgctgggccaggcctgggtttatttattacaagcagttcaggaagcacagacatcacgttgttcacttgcttcactgatgaatgtaataattgttctcgttcatgccctttgcccctggtgtcggggctgtccacactggggaccattggtgcccccatgattattagctccctgaagcctggtgggtcgtcagggcttctgtccggtgtttaaagacccatcccagacaagcccaaaccacctcagtttgaagagacatagagggacaggcagacggggcctcagagggatccagcctcatccagcctcccggcaacctcaggagagcaggccagatggggcctcagagggatccagcctcatccagcctcccggcaacctcaggagagcaggcacagccctgctggttcccttccagtgccgactcccaggctgagtcgctttgcagcagctgaacgtcgtggttgcattttggtctctaccgtgaggtctgtattttcttggtgtgcaccggtgtctgcctgtccgctgtctcgtacccaggaggcatgtgcagttctttgtgtccctacagggcctctcttccatcctcttctcctttcctggtgctcccagcctttcccatggaacagcccacagttgcaggattttctgtctttatgtctgtccccctgatcctgaagcccaaaggtggtaggcgtgaagttacagaagtctgtgtcttcaggtacaatgagtaggtggccaatggccagcttcttagccccgtcctggtgcttccccgacccttctgatccgctcaggcccctgtcctcctcgtacacagctgcagctctccctgccatgtccacgcaaggcacaagggtgtccccagcagaactgcaggcctggatgctggtatccagcacgttcaagccaggtggcctccggcaggctcttgccacaccttcgtttccttatctgtaaaccagggatagtggtctcccggcctccccaggacccagccctccctggtctccccacctccccgtggcccctgttttgaggctgagtccgctgcccctcagtgttagatctcctctgagaggaacctgtggctttgctgcccatccctacttcctgccctcgactgggcagttccttaacagatcagggatcaggaacatgactgcccttgctcatctgctggccctccacatttgcccagtccctgggtctctctgcctccgtttcctccctgtttgatgaggataatcacgaagcacatcaggactgttgggttagatgaagtcatgcaggtaaagctgctgtgcagctgcagacatgtcagcatggctggcagtctctgtgcttggctgagcctgctcagagccacagtgacctcctaggtgtcctcctcccctgctcccatcgtggcatctgggactctgtccccctgccaccctccagggtctcctactgcttctgcctgtttgctctctcctcagtctccctgcagaagagcttccaagtggaggagacacatgactggggtggcaccgtccaagagaggcagtagctgcgagtccagtgggtctcagggcaagccaagtcaaagggctggggcctaagacaacagggataggagtcaatgcacatctgtgagataatggggaagcagcatcaacatgacttggggaccccctgggcccacagctctctgcatggaaagggaggaaggagccaagctggtgagcacccagccagtgttttgtggacatgaacagttctggttctggagagggatcttcgttgagcttgatagagacatgtgctgtcggactgtagatgtcatgagtttctgaggaaaggtcagcatgacaggcaagtgacagacatcagagtcagtaaagatggagcgtggggaggcggggcctgggagcagagaggaggggcctaggaatggagaggtggggcctaggagtggaagggtgtggtcttggagtggagaggcggggcctgggagcagagaggaggggcctaggaatggagaggtagggcctaggagtggaaaggtgtggtcttggagtggagaggcggggcctgcgcggagaggcagggtctctcagaagacccctttttgggatccagaatcactaggagcagggtaagctgtgtggcatcagcgcttgcatcctgcagggagttacctaccagggctgggccgggactggccagaaccttgacagatgaagtttgaccagaccaagtgagtcctcatggtctgatacgtaagccagatgtgagttaccaatttgcaccaggggctgtgctcccccagtggctggcctgccctccaccatataacccactggcagcacctcaccgtagatgggacctggctgggtgccgatgaatagcgataggtgccgatgatagcgataggtgccgatgataggaggatctctag

SEQ ID NO: 632271 - DNA, 2251 bp, Homo sapiens
ctctgattttaatcagttctgcgtttgaaaggaaacccggtgatatccgacatccaaagcacgtccaacagacggatgtggctgcgacactggcgatagcacttggcttaccgattccaaaagacagtgtagggagcctcctattcccagttgtggaaggaagaccaatgagagagcagttgagatttttacatttgaatacagtgcagcttagtaaactgttgcaagagaatgtgccgtcatatgaaaaagatcctgggtttgagcagtttaaaatgtcagaaagattgcatgggaactggatcagactgtacttggaggaaaagcattcagaagtcctattcaacctgggctccaaggttctcaggcagtacctggatgctctgaagacgctgagcttgtccctgagtgcacaagtggcccagtacgacatctattcgatgatggtggggactgtcgtggttttggaggttctcaccctgctcctgctcagcgtcccacaggcactgcgcagaaaggctgagctggaagtcccactgtcatctcctgggttttctctgctcttttatttggtgatcctggttctttcggccgttcacgtcattgtgtgcacctcagctgaaagttcgtgctacttctgtggcctctcgtggctggcggcaggtggggtgatggtgctggcctcggcgctgctgtgtgtgattgtgtctgttctgaccaacgtgctcgtgggtggaaacaccccaaggaagaaccccatgcatcccagctcaaggtggtcagagctagaccttcttattctgttggggacggcgggccacgtcttgagcctgggcgccagcagcttcgtggaggaggagcaccagacctggtacttccttgtgaacaccctgtgtctagctctgagccaagaaacctacagaaactactttctgggagatgacggtgagcctccgtgtggcctctgtgtggaacaagggcatgacggggccacagcagcgtggcaggacgggcctggctgtgatgtcctggagcgagacaaaggccacggaagcccctctacctccgaagtgctcagaggccgcgagaagtggatggtgctggccagtccgtggctaatactggcctgctgccggctgctgcgctccctaaaccagacaggtgtgcagtgggctcaccggcctgacctcggccactggctcaccagctctgaccacaaagccgagctctctgtcctggctgccctctccctcctcgtagtttttgtgctggtgcagagggggtgctcccctgtgtccaaggctgccctggcgctggggctgctgggcgtctactgctaccgggcggccatcgggagtgtccggttcccgtggcggccggacagcaaggacatttccaagggtattattgaagctcgttttgtttatgtctttgtccttggcattctgttcacgggcaccaaagacttacttaaatctcaagtcattgctgcagacttcaaactcaagactgtaggtttatgggagatatatagtggattagttcttctggcagccttgctctttagaccacataatcttccggtcttagcatttagcctcttgattcagactctaatgactaaattcatctggaagcccctgagacacgatgcagctgagattactgtgatgcattattggtttggtcaagcattcttctattttcagggcaactccaacaacattgccaccgtggacatctccgcaggcttcgtgggcttagacacctacgtggaaatcccagccgtgctcctgacagcgtttgggacgtacgcagggcctgtgctgtgggccagccacttagtgcacttcctgagctcagagactctctgggtgtcagcaatgctacatgacagcttctgatacccactgcatatgactattacagattacgcgtgcatcgaaccggtgacagctggtgtgaagccaaccatatatactgcgtgacttttctccaaaacttctctacgagggaatgcacctgctcattacagctgctgtctgtgtattcttcacggcaatggatcaaaccagactcacacagtcttagactaagctgaacactggaaaaataatacatgcttaaagtctgctgttattctaaaatgaaagatatgaattcaacaaagttgatggataactttctttgactgctctacctgaatttagactaagcagtaaatagtttaataaaagatcactttaatata

SEQ ID NO: 632272 - DNA, 4126 bp, Homo sapiens
ctctgattttaatcagttctgcgtttgaaaggaaacccggtgatatccgacatccaaagcacgtccaacagacggatgtggctgcgacactggcgatagcacttggcttaccgattccaaaagacagtgtagggagcctcctattcccagttgtggaaggaagaccaatgagagagcagttgagatttttacatttgaatacagtgcagcttagtaaactgttgcaagagaatgtgccgtcatatgaaaaagatcctgggtttgagcagtttaaaatgtcagaaagattgcatgggaactggatcagactgtacttggaggaaaagcattcagaagtcctattcaacctgggctccaaggttctcaggcagtacctggatgctctgaagacgctgagcttgtccctgagtgcacaagtggcccagtacgacatctattcgatgatggtggggactgtcgtggttttggaggttctcaccctgctcctgctcagcgtcccacaggcactgcgcagaaaggctgagctggaagtcccactgtcatctcctgggttttctctgctcttttatttggtgatcctggttctttcggccgttcacgtcattgtgtgcacctcagctgaaagttcgtgctacttctgtggcctctcgtggctggcggcaggtggggtgatggtgctggcctcggcgctgctgtgtgtgattgtgtctgttctgaccaacgtgctcgtgggtggaaacaccccaaggaagaaccccatgcatcccagctcaaggtggtcagagctagaccttcttattctgttggggacggcgggccacgtcttgagcctgggcgccagcagcttcgtggaggaggagcaccagacctggtacttccttgtgaacaccctgtgtctagctctgagccaagaaacctacagaaactactttctgggagatgacggtgagcctccgtgtggcctctgtgtggaacaagggcatgacggggccacagcagcgtggcaggacgggcctggctgtgatgtcctggagcgagacaaaggccacggaagcccctctacctccgaagtgctcagaggccgcgagaagtggatggtgctggccagtccgtggctaatactggcctgctgccggctgctgcgctccctaaaccagacaggtgtgcagtgggctcaccggcctgacctcggccactggctcaccagctctgaccacaaagccgagctctctgtcctggctgccctctccctcctcgtagtttttgtgctggtgcagagggggtgctcccctgtgtccaaggctgccctggcgctggggctgctgggcgtctactgctaccgggcggccatcgggagtgtccggttcccgtggcggccggacagcaaggacatttccaagggtattattgaagctcgttttgtttatgtctttgtccttggcattctgttcacgggcaccaaagacttacttaaatctcaagtcattgctgcagacttcaaactcaagactgtaggtttatgggagatatatagtggattagttcttctggcagccttgctctttagaccacataatcttccggtcttagcatttagcctcttgattcagactctaatgactaaattcatctggaagcccctgagacacgatgcagctgagattactgtgatgcattattggtttggtcaagcattcttctattttcaggtaggttttcattattatcatgggtagtagacttcatgttttacatatttattttaaatttttctttgagaaaatgttcccataagttggaaagtgactgtcagtgtggcatggtgaattacgctgaactctcgtgtattttataagacaaagtacagccggttgtttaagacacgcgtcccaggtgtggatgtgtgggtgcttaagacagcagactgctgctttgctgggccaggcctgggtttatttattacaagcagttcaggaagcacagacatcacgttgttcacttgcttcactgatgaatgtaataattgttctcgttcatgccctttgcccctggtgtcggggctgtccacactggggaccattggtgcccccatgattattagctccctgaagcctggtgggtcgtcagggcttctgtccggtgtttaaagacccatcccagacaagcccaaaccacctcagtttgaagagacatagagggacaggcagacggggcctcagagggatccagcctcatccagcctcccggcaacctcaggagagcaggccagatggggcctcagagggatccagcctcatccagcctcccggcaacctcaggagagcaggcacagccctgctggttcccttccagtgccgactcccaggctgagtcgctttgcagcagctgaacgtcgtggttgcattttggtctctaccgtgaggtctgtattttcttggtgtgcaccggtgtctgcctgtccgctgtctcgtacccaggaggcatgtgcagttctttgtgtccctacagggcctctcttccatcctcttctcctttcctggtgctcccagcctttcccatggaacagcccacagttgcaggattttctgtctttatgtctgtccccctgatcctgaagcccaaaggtggtaggcgtgaagttacagaagtctgtgtcttcaggtacaatgagtaggtggccaatggccagcttcttagccccgtcctggtgcttccccgacccttctgatccgctcaggcccctgtcctcctcgtacacagctgcagctctccctgccatgtccacgcaaggcacaagggtgtccccagcagaactgcaggcctggatgctggtatccagcacgttcaagccaggtggcctccggcaggctcttgccacaccttcgtttccttatctgtaaaccagggatagtggtctcccggcctccccaggacccagccctccctggtctccccacctccccgtggcccctgttttgaggctgagtccgctgcccctcagtgttagatctcctctgagaggaacctgtggctttgctgcccatccctacttcctgccctcgactgggcagttccttaacagatcagggatcaggaacatgactgcccttgctcatctgctggccctccacatttgcccagtccctgggtctctctgcctccgtttcctccctgtttgatgaggataatcacgaagcacatcaggactgttgggttagatgaagtcatgcaggtaaagctgctgtgcagctgcagacatgtcagcatggctggcagtctctgtgcttggctgagcctgctcagagccacagtgacctcctaggtgtcctcctcccctgctcccatcgtggcatctgggactctgtccccctgccaccctccagggtctcctactgcttctgcctgtttgctctctcctcagtctccctgcagaagagcttccaagtggaggagacacatgactggggtggcaccgtccaagagaggcagtagctgcgagtccagtgggtctcagggcaagccaagtcaaagggctggggcctaagacaacagggataggagtcaatgcacatctgtgagataatggggaagcagcatcaacatgacttggggaccccctgggcccacagctctctgcatggaaagggaggaaggagccaagctggtgagcacccagccagtgttttgtggacatgaacagttctggttctggagagggatcttcgttgagcttgatagagacatgtgctgtcggactgtagatgtcatgagtttctgaggaaagaatcactaggagcagggtaagctgtgtggcatcagcgcttgcatcctgcagggagttacctaccagggctgggccgggactggccagaaccttgacagatgaagtttgaccagaccaacagggcaactccaacaacattgccaccgtggacatctccgcaggcttcgtgggcttagacacctacgtggaaatcccagccgtgctcctgacagcgtttgggacgtacgcagggcctgtgctgtgggccagccacttagtgcacttcctgagctcagaaacacgcagcggacatggagcctttccaatggggagaatcgctccctggccagactgcaagctccc

SEQ ID NO: 632273 - DNA, 1703 bp, Homo sapiens
ctctgattttaatcagttctgcgtttgaaaggaaacccggtgatatccgacatccaaagcacgtccaacagacggatgtggctgcgacactggcgatagcacttggcttaccgattccaaaagacagtgtagggagcctcctattcccagttgtggaaggaagaccaatgagagagcagttgagatttttacatttgaatacagtgcagcttagtaaactgttgcaagagaatgtgccgtcatatgaaaaagatcctgggtttgagcagtttaaaatgtcagaaagattgcatgggaactggatcagactgtacttggaggaaaagcattcagaagtcctattcaacctgggctccaaggttctcaggcagtacctggatgctctgaagacgctgagcttgtccctgagtgcacaagtggcccagtacgacatctattcgatgatggtggggactgtcgtggttttggaggttctcaccctgctcctgctcagcgtcccacaggcactgcgcagaaaggctgagctggaagtcccactgtcatctcctgggttttctctgctcttttatttggtgatcctggttctttcggccgttcacgtcattgtgtgcacctcagctgaaagttcgtgctacttctgtggcctctcgtggctggcggcaggtggggtgatggtgctggcctcggcgctgctgtgtgtgattgtgtctgttctgaccaacgtgctcgtgggtggaaacaccccaaggaagaaccccatgcatcccagctcaaggtggtcagagctagaccttcttattctgttggggacggcgggccacgtcttgagcctgggcgccagcagcttcgtggaggaggagcaccagacctggtacttccttgtgaacaccctgtgtctagctctgagccaagaaacctacagaaactactttctgggagatgacggtgagcctccgtgtggcctctgtgtggaacaagggcatgacggggccacagcagcgtggcaggacgggcctggctgtgatgtcctggagcgagacaaaggccacggaagcccctctacctccgaagtgctcagaggccgcgagaagtggatggtgctggccagtccgtggctaatactggcctgctgccggctgctgcgctccctaaaccagacaggtgtgcagtgggctcaccggcctgacctcggccactggctcaccagctctgaccacaaagccgagctctctgtcctggctgccctctccctcctcgtagtttttgtgctggtgcagagggggtgctcccctgtgtccaaggctgccctggcgctggggctgctgggcgtctactgctaccgggcggccatcgggagtgtccggttcccgtggcggccggacagcaaggacatttccaagtaagtgcgtggcggacacggggtgcatagagccactttactgtttgatgaactggcggacacggggcgcgtggaaccacttcactgtttgatgaactgagaagaccaagccagtcttcagagcattggagtttggtgtttgtgaattgtgattgtgtcaacagctactggagtgtaactaagaaaacctcaaccagctgcgttgttagcactttttatgttttatgtgttacttttaggagacaaatcacttggaagtaagattttttaaatttaaaataaaaccttcagggtgtgtgatggg

SEQ ID NO: 632274 - DNA, 174 bp, Homo sapiens
ttaatcacgcatgcagctgcccggtggcctagctgaggggctggagtcgtggccctgcatttctgggtagggctggcaatggttgccttaaccctggcgcccggcctgattctttaagctgtttttctttgttgtagagattatcttgtcagctactactaacttgattaatat

SEQ ID NO: 632275 - DNA, 195 bp, Homo sapiens
atatatgaaaagtcttctacacgctttcagagactgtccaacttatgaaacatgaaaccgtaagataattctaaaataaatcctctgtcatactccatgtctctatactggactatggtgctatctactctaccagcctatccaccttgcgctaagtgtcccagtttcaccgtgaacgttcagtgtcacaatcaa

SEQ ID NO: 632276 - DNA, 1994 bp, Homo sapiens
gagacggatcgtttggctcatgttagttgtagaaggtctaattcaagagtgagtaccatcttacactttctagaagtctgttacttaaaatgttttctttcttctaggtgatatccgacatccaaagcacgtccaacagacggatgtggctgcgacactggcgatagcacttggcttaccgattccaaaagacagtgtagggagcctcctattcccagttgtggaaggaagaccaatgagagagcagttgagatttttacatttgaatacagtgcagcttagtaaactgttgcaagagaatgtgccgtcatatgaaaaagatcctgggtttgagcagtttaaaatgtcagaaagattgcatgggaactggatcagactgtacttggaggaaaagcattcagaagtcctattcaacctgggctccaaggttctcaggcagtacctggatgctctgaagacgctgagcttgtccctgagtgcacaagtggcccagtacgacatctattcgatgatggttctcaccctgctcctgctcagcgtcccacaggcactgcgcagaaaggctgagctggaagtcccactgtcatctcctgggttttctctgctcttttatttggtgatcctggttctttcggccgttcacgtcattgtgtgcacctcagctgaaagttcgtgctacttctgtggcctctcgtggctggcggcaggtggggtgatggtgctggcctcggcgctgctgtgtgtgattgtgtctgttctgaccaacgtgctcgtgggtggaaacaccccaaggaagaaccccatgcatcccagctcaaggtggtcagagctagaccttcttattctgttggggacggcgggccacgtcttgagcctgggcgccagcagcttcgtggaggaggagcaccagacctggtacttccttgtgaacaccctgtgtctagctctgagccaagaaacctacagaaactactttctgggagatgacggtgagcctccgtgtggcctctgtgtggaacaagggcatgacggggccacagcagcgtggcaggacgggcctggctgtgatgtcctggagcgagacaaaggccacggaagcccctctacctccgaagtgctcagaggccgcgagaagtggatggtgctggccagtccgtggctaatactggcctgctgccggctgctgcgctccctaaaccagacaggtgtgcagtgggctcaccggcctgacctcggccactggctcaccagccacagcgagaatgcgctcattactgcgaagatggcaccaagccattcgtgaggaatctgcccccatgacccagacgtctcccacaaggctcacttccaacactggaggttcagtgtcttttttttttttctgaaacggagtttcactctgtcacccatgctggagtgcaggggcacgatctgggcttacggcaatcaagagattctccggtctcagccccctgagtagctgggattacaggcgcccggtacatgcctgggctaattcgggcggttcaggggagatgggcgggtgacccatgtttggctggcggtgggcctttaaatcctgaactctaggggagtcccccactcgggctccccaaggggagaaacacaggggagacacacggtgcacccgaaggtccccgcacaatgggaacggcggggggcaccacatctcggcacgtgggttccccaaaccatatgcgtggtgtagtgccccagcgggagacacaaagcagggctgcacaaaagcaagaggccacccactgtagcgacgatcgccgcataacaacaatacatccaccacacccatactccacctaaaaaacagagcgaggagtgacacaacaacgtggaggggatgagccaaagactaaaataaccagactcgaatagacgaaacaatcgcaactaggagacaagaacgacaggtccacagctatagctactactcgtgtactcgcaccgctcctcgagat

SEQ ID NO: 632277 - DNA, 1421 bp, Homo sapiens
gagacggatcgtttggctcatgttagttgtagaaggtctaattcaagagtgagtaccatcttacactttctagaagtctgttacttaaaatgttttctttcttctaggtgatatccgacatccaaagcacgtccaacagacggatgtggctgcgacactggcgatagcacttggcttaccgattccaaaagacagtgtagggagcctcctattcccagttgtggaaggaagaccaatgagagagcagttgagatttttacatttgaatacagtgcagcttagtaaactgttgcaagagaatgtgccgtcatatgaaaaagatcctgggtttgagcagtttaaaatgtcagaaagattgcatgggaactggatcagactgtacttggaggaaaagcattcagaagtcctattcaacctgggctccaaggttctcaggcagtacctggatgctctgaagacgctgagcttgtccctgagtgcacaagtggcccagtacgacatctattcgatgatggttctcaccctgctcctgctcagcgtcccacaggcactgcgcagaaaggctgagctggaagtcccactgtcatctcctgggttttctctgctcttttatttggtgatcctggttctttcggccgttcacgtcattgtgtgcacctcagctgaaagttcgtgctacttctgtggcctctcgtggctggcggcaggtggggtgatggtgctggcctcggcgctgctgtgtgtgattgtgtctgttctgaccaacgtgctcgtgggtggaaacaccccaaggaagaaccccatgcatcccagctcaaggtggtcagagctagaccttcttattctgttggggacggcgggccacgtcttgagcctgggcgccagcagcttcgtggaggaggagcaccagacctggtacttccttgtgaacaccctgtgtctagctctgagccaagaaacctacagaaactactttctgggagatgacggtgagcctccgtgtggcctctgtgtggaacaagggcatgacggggccacagcagcgtggcaggacgggcctggctgtgatgtcctggagcgagacaaaggccacggaagcccctctacctccgaagtgctcagaggccgcgagaagtggatggtgctggccagtccgtggctaatactggcctgctgccggctgctgcgctccctaaaccagacaggtgtgcagtgggctcaccggcctgacctcggccactggctcaccaggtgagagcgtaggcccgtggccacaggccagactttctacggccgattggtcacctgccaagctcttctttttctaaattgagaccatttttcatattaagaatgggatagtatttgagatctgaagaattgggaaaatacactaaaaccagtgttttactggatactag

SEQ ID NO: 632278 - DNA, 1084 bp, Homo sapiens
gagacggatcgtttggctcatgttagttgtagaaggtctaattcaagagtgagtaccatcttacactttctagaagtctgttacttaaaatgttttctttcttctaggtgatatccgacatccaaagcacgtccaacagacggatgtggctgcgacactggcgatagcacttggcttaccgattccaaaagacagtgtagggagcctcctattcccagttgtggaaggaagaccaatgagagagcagttgagatttttacatttgaatacagtgcagcttagtaaactgttgcaagagaatgtgccgtcatatgaaaaagatcctgggtttgagcagtttaaaatgtcagaaagattgcatgggaactggatcagactgtacttggaggaaaagcattcagaagtcctattcaacctgggctccaaggttctcaggcagtacctggatgctctgaagacgctgagcttgtccctgagtgcacaagtggcccagtacgacatctattcgatgatggttctcaccctgctcctgctcagcgtcccacaggcactgcgcagaaaggctgagctggaagtcccactgtcatctcctgggttttctctgctcttttatttggtgatcctggttctttcggccgttcacgtcattgtgtgcacctcagctgaaagttcgtgctacttctgtggcctctcgtggctggcggcaggtggggtgatggtgctggcctcggcgctgctgtgtgtgattgtgtctgttctgaccaacgtgctcgtgggtggaaacaccccaaggaagactctggttgaacacctggtgtgtgccacgtgctggcagtgccctggacagggggcctcagggaaggacgtggagcagccttatcccaggcctctgggtgtcccgacacaggtgttcacatctgtgctgtcaggtcagatgcctcagttcttggaaagctaggttcctgcgactgttaccaaggtgattgtaaagagctggcggtcaccagaggaacaagcccccccgctgaggggggtgtgtgaaatcggacagctcccagcagaggtgtgggagctgcagtgaggg

SEQ ID NO: 632279 - DNA, 135 bp, Homo sapiens
gtaggtgtagctgagggtagaaggagagttagctgacgctcggaaggtgtcttgagattattatccgctgagggtagaagcggcccccgtagacgctcggcaggtgtcttgatagggtacctgcagctcgaattc

SEQ ID NO: 632280 - DNA, 285 bp, Homo sapiens
actcattcagttcatagcctgggtctacctttctattagctcttagtagattacacatgcaagcatcccgtgcattgagttcacccgctaaatcaccacgatcaaaagggacaacgcatcaagcacgcagcaatgctgcctcaaacacgcttagacctaggccacacccgccacgggaaaccagcagctgattaacccttttgcaactaaacgaaagtttcaactacagcatatactaatccccagggcttgggtcaactttccgtgtccagccaacccgccggt

SEQ ID NO: 632281 - DNA, 911 bp, Homo sapiens
  misc_feature (8)..(8): n is a, c, g, or t
  misc_feature (79)..(79): n is a, c, g, or t
  misc_feature (122)..(122): n is a, c, g, or t
  misc_feature (188)..(188): n is a, c, g, or t
  misc_feature (193)..(193): n is a, c, g, or t
  misc_feature (214)..(214): n is a, c, g, or t
  misc_feature (220)..(220): n is a, c, g, or t
  misc_feature (251)..(251): n is a, c, g, or t
  misc_feature (255)..(255): n is a, c, g, or t
  misc_feature (257)..(257): n is a, c, g, or t
  misc_feature (262)..(262): n is a, c, g, or t
  misc_feature (265)..(266): n is a, c, g, or t
  misc_feature (349)..(349): n is a, c, g, or t
  misc_feature (358)..(358): n is a, c, g, or t
  misc_feature (524)..(524): n is a, c, g, or t
  misc_feature (544)..(545): n is a, c, g, or t
  misc_feature (576)..(576): n is a, c, g, or t
  misc_feature (585)..(585): n is a, c, g, or t
  misc_feature (612)..(612): n is a, c, g, or t
  misc_feature (628)..(628): n is a, c, g, or t
  misc_feature (630)..(630): n is a, c, g, or t
  misc_feature (641)..(641): n is a, c, g, or t
  misc_feature (644)..(644): n is a, c, g, or t
  misc_feature (660)..(660): n is a, c, g, or t
  misc_feature (683)..(684): n is a, c, g, or t
  misc_feature (691)..(691): n is a, c, g, or t
  misc_feature (694)..(695): n is a, c, g, or t
  misc_feature (698)..(698): n is a, c, g, or t
  misc_feature (724)..(724): n is a, c, g, or t
  misc_feature (733)..(733): n is a, c, g, or t
  misc_feature (746)..(746): n is a, c, g, or t
  misc_feature (767)..(767): n is a, c, g, or t
  misc_feature (772)..(772): n is a, c, g, or t
  misc_feature (775)..(775): n is a, c, g, or t
  misc_feature (782)..(782): n is a, c, g, or t
  misc_feature (784)..(784): n is a, c, g, or t
  misc_feature (788)..(788): n is a, c, g, or t
  misc_feature (794)..(795): n is a, c, g, or t
  misc_feature (797)..(797): n is a, c, g, or t
  misc_feature (801)..(801): n is a, c, g, or t
  misc_feature (809)..(809): n is a, c, g, or t
  misc_feature (837)..(837): n is a, c, g, or t
  misc_feature (842)..(842): n is a, c, g, or t
  misc_feature (867)..(867): n is a, c, g, or t
cacccagntagcagataggactaagctctgtctttcagccttcacttactcagaaataactcatatctcaacactcagnaagccccaagcagtagaatgaggcttccctggaaagaggctgngactcacaggctggggatttaagaccctctcaccgtccgaccttccttccttctttggtcttgggngatgngaggctccatttttaaagggnggagancagcagatcccctgctactgtgagacaagcnaganangtganttnnggccagactcactatggggtcaccccaaacagcttcagatcaaaaagcctgccttgctgtgatgcccattgacagtggctgcnaaatataangggggggccacagggtctctggctttatttccacagggtagggagaagaccctgcagaaggctaggcagagggcgccagccgcggaatttcccagcttttctggttctcagcagaccaacgtggtctctaatcagaaagacgaagaggcaggagagcactggcctnagatatcccccaaaaaaaanncttgcactgtgggccagggctgctgtgagcnaggaggccngggttccagaggggctcactaggtccngcgggaggctttcccngncctccctcatncgncgccgggctcgacggnaggcctctagcacattgtgaatnnaactctnctnnctnaacccttccagacggtccaacacacnccgcatccntttctgaaggganctcgattccatgaaggccctngactnctncagacantncaanctgaanntnacantgcctgtngtctctgtgcggatccaaagcggctcangcgtncccctttgaaggatcctggtatccntacataggagaggtctccaattccagagaacgccaatgaaaacc

SEQ ID NO: 632282 - DNA, 174 bp, Homo sapiens
caggttactggaatggtacaaagtatccttaataaatggcctttggtttggaaatatatcagggactttcagtcattgggactatacacacacgaccccttttttctagaacatctacaacaaaagccaatccaatcaattgtttggtctctttcaaacacgcaccttcacttc

SEQ ID NO: 632283 - DNA, 1191 bp, Homo sapiens
ggaagcgcctcttcacggcactgggatccgcatctgcctgggatcatcaagccctagaagctgggtttcatttacaattagggctgccgtatttctgtttctccctgggctgcggaaagcccagaagattttatctcagcttcataccacaggctgctggtgttccctctttttttccacgagggtgtttatggctgcaattgcatgaacatcccaatggtgtcagaccagtggcgatggcatctaggagtttaccaactgagcaccatttttccaatttcttctcttgtccatccttgcctggggcactgcacaaacgcttctgtgcagacttgcatcacatagctcctctggtgccaagtgtggtagctcattgcaccaaccaacacatcgcagccaagctcatggcatctcagtgcacacaagcccatttgcatgtcatgcgggtccagccagcacagcaagtgggcaggtcctccaaagcagccaacatccaccagcaacctcaatcagcagcaacacaattcccccagcatgcgcagcagggcagcacacaatcttgctgcaagaccactgtgcccagtccgtgcagcccagcttggcccccagtttccaagtgccacgagctgccacgaactgggggcatcacacaccaccctggcagcaaccaacacagaaccaacacgggggcaacaacgatcagaccccccacagaccacagaccgaggcaatcagcaagaggcttcaagggaaccacaagcccgcaattagacactaggaccctcattggccccccacccggcgaaagaacaactggtgacatcggctggccgattagattgcacaacctggggaccaccaagacacgggaccgccaacccacctcgggttgacactacggcgagaacacgccaaaccctacaggcccaatctacaacacgaagacagaccaacccacccaacacaagcccaaaccgcggcacactcgcacgccacgaccgcaagaccgcgcacagcaccgtcgcacacaaccccatggcgcaaacacagaggcaccaagcaccacccgcacctcatgacccccggaatacctacacatcactcacccactgcacacacagatcacagaaaacaaacaggccgactgggacggaacacaaaccgacacaaacaaatgcagagacagacaac

SEQ ID NO: 632284 - DNA, 310 bp, Homo sapiens
  misc_feature (23)..(24): n is a, c, g, or t
  misc_feature (29)..(29): n is a, c, g, or t
gggggccgcctggctgaaagaanngaaanccccgagtttcgagatttaactagtacatctctggtcgttggacataccaagtgacaaacacctaaaagcgccgccggacctacgagctcaggtcggattaacccatacatgagctctccctgccacattgaggatgatccttacggaaaaggaacagattggtcctaaaccaaaaggaggaagttgcccaaaagaaaaagatttcccaaaagaaactgaagaaacaaaaacttatgggcacgggagtaaaatcagcattaaaaaaaatggtattaaaagg

SEQ ID NO: 632285 - DNA, 407 bp, Homo sapiens
tttgttgtttccttgagaatggagttgctctgttgcccaggctggagtgcaatggcaccatctcagctcactgtaacctccacctcccagtttcaaccaattctcctgcctcagcctcccaagtagtgggattacaggcttgcgccgccacgcccggctaatttttttttttttggtttttttattaaagatgggtttcctcattttgatcaggctgttcttgaactcccgaacctcaggtattctgcccgcctcggcctcccaaagtgctgggatttacagttgtgagccacatatgcccagctaaattttttaccctttttttcctatcggtttctaaatctcctcaacccaaacaatacaagagttttcgtgcactttcatttctttttgcgccccgctttacc

SEQ ID NO: 632286 - DNA, 187 bp, Homo sapiens
gtgcggtcgacttaagatcccctatgccgcgtgtctgcgatcctcgacgaacgaaactggctggcctggccaaagacgccctggcgaacgacattcacatcgtgccggctgatatcaaccacagctctcaccgctatgagaatggcttcgatgctgcccggggtcaaaagattctgtacgcaccgtt

SEQ ID NO: 632287 - DNA, 281 bp, Homo sapiens
  misc_feature (53)..(53): n is a, c, g, or t
cctcggtaccagcaatcgaggacatgagagatggtatgtcccccacccccttncctcaccatactcaagtcttgcacctaaggtcttaaatcatctgctttaccatgaactgattactgaaactatccatgtgtgtgtatcattgtacggctgagagagaaaaagagtcatcttaggtaagatgagtgaatcatgggacaacagtggagctggtggctgaatactctctggattgccaattagaacagttgaagaatacatctgtcctcgattgtgctggt

SEQ ID NO: 632288 - DNA, 522 bp, Homo sapiens
cgtatccctccctagggtgaccagagtaaacccactatggtattcccttcatttagcacataccttcgcacatagtctttctataaaactctactcacattatccagtcggcatgcacatctcattccttcacagaattgtattgagagttaactgcgaaaatactgtattattattattagaatgacctataatttctgtccaaactgagaaacttttgaggctgggaacagggggtttgtgctgatcgtaatgatgtcaggacaataggaaaaacaaggacttatggccaccccagctattattgccagtacactctgctttagacatattaagcaatcaagaagtggtcgtactatcacgcttctgtcactagactgtgaatgtctcaaggtaagagtgcttttttgtctattagcttctgtcacatggtctggtatattcaatacattttgagtaggagatgagggtaaagactaggaaatgactaatttttatagacatactaaggtaatgcagagt

SEQ ID NO: 632289 - DNA, 158 bp, Homo sapiens
gtcgctctagaggatctctgtggagacgggtctcacattgctagtgctaagcaagccctactgtgaaggcagagacaagaggatcactgtgctttgataaacctgtctgatgcagtgccctcgggaaaggacttgtaagtatatgcaccattcgctgg

SEQ ID NO: 632290 - DNA, 750 bp, Homo sapiens
gactccctgtgagtgttgtgactatgaaggcagtggctccactgctgggtccttgaggctcccttaattcctcaagtagtggtggtgagcaggactatgattacctgaacgactggggggcacgtgttcaagaaacgttgcgtgacatgtatggtggaggtgatgacttgaacttcagggtgaactggttggtggacgagtacgaacaatttcaacgtgatattcccaataagcatgcgagaagctaggctttagacttatgtagtctactagcgcagtgcttgttggaggtttggataggctgcaaatcaatttgggctcagagggagatatcagtgatccattactgtttggaaaagcactgagctcagttactacttgaattttactagtaggagaagcactgggatattagtgtgcctttttgtaccttttgcagattggaatgagtttgctgtttaaggctttaatggtactgatttctgagacgataagtacactacgacaagaatattggtggtgggagcagtaagttaaaggcattgatatgcttgcaacggcgcttttgtgacagtgcggtttgcttttatgagagtacacaatttaaaaactaaaaaagttctgcaggattgattaatctgggggatgagacgtgagatggcaatgtacatacttctagttagagttgatgcctggtttcgtactaaatttaaatctaccgggggggcaaagggggttcttttcccattg

SEQ ID NO: 632291 - DNA, 276 bp, Homo sapiens
ggctggagtatatagtggcacaatcttggctcactgcaacctctacctcccgggttcaagcaattctcctgcctcagcctcctgagtagctgggattacaggcatgagccactgtgcccggcctattaagcccattaggtccattttacagacgggagagcagagacctgatgcctgaggtgggaggattgcttgatctcaggaagttgaagctgcagtaagctctgatcatgccactgcattccaacctggacaacagagctatactctgtctca

SEQ ID NO: 632292 - DNA, 271 bp, Homo sapiens
atgcacatcttactatatatcatgctcagagtgcaacatcattcttcttaaaggtaagcattactcgttataatgggcatgttatccactgagagacagtcctctgaactatttgcattaatgactctgcttcatttgatcatcggtagtatctatggagtcaaataatattgtgtcaacaggttagtttatcctctggttactgcatatgtcatcaaatactgcaaggccatctttctatgcaatatagttgtactggtgtgtagtttct

SEQ ID NO: 632293 - DNA, 337 bp, Homo sapiens
accgttgcctcagcccaccacctccagaccggaagcctcccctcgctgctgccttaggtgaggctgagccgccgggccctgtggatgccactgacctccccaaagtccagattccccctccggccacccggccctgtgcacagccacgcgtgcaaccggccgcacccctccagctaatgacgggatgtcaacagtcctacatgtctggagagggctaccagagcctgcagtccatgatgaagaccgagggaccctccctacggtgccctgccccccgcctacggccacctgcacacctgcctaccacccccatgtctacccggcccaacccgccccc

SEQ ID NO: 632294 - DNA, 413 bp, Homo sapiens
catcgtacacccctcttaccgaagacataacttgttacgtatgtactcgtgagtcctagtatataatgtctggcctgagaaccacagaaaggactagatattcatacatgcgagagaacactgagactgcctgttaatttgggaataatgttagaaaaaaagtccgcaaagaactgccagaaccaggcctgtaaccaagtttacggtcatctagtttctctcacaatttcaaaatgtcacatcagaaaaatctttggcgattaatccaatctccatttaatgcgtaaaaaaaccaaggccctaagtggatgtccctggtccaagtccagtgcctttcacaatagggctttgggacgtctaacccctctaaattggggcagatggctaactgtggggaaaggggggaaccctcc

SEQ ID NO: 632295 - DNA, 617 bp, Homo sapiens
taggcccaccgccgccgcggcctagttaccatcacaccccggtgaggagccgcagtctgcctgtagccggccccagtcaccatcacctgcaaccatgagcagcgaggccgagacccagcagcgcgccgagacccccgaccggccgagggcgcgccttcatgcgaccgagcgagcgaccaattctcctgtcaagctatcgcgccgatgcgagcagacgcgtggacgctgcgtggtgctcgtgcgggctctcggcattgtggcgcgtggtactgggcgttgctgagtccatcacggagtcagctcgcgaccaagggtgctggtgatcaagcctctcagagggtatcaacgccggggcgcactcgtcgagtatgcgtcttcggtcttcggggcacgcgtgatatgccaatagccgcaaaacgaggcaaaagtactgcattctatggcaacacgagggagctactcgtaccttataggaaatgaacttcagcgcaggccgcgcaaagaagattacgactggagtgacggcttattaaaggaaggacatcccctagcagcagcgaggaacagcgcgaagcccgccagaaaaggaacccatcaaggaagtttgagctgccgcg

SEQ ID NO: 632296 - DNA, 445 bp, Homo sapiens
  misc_feature (99)..(99): n is a, c, g, or t
  misc_feature (104)..(105): n is a, c, g, or t
gatttcatttctagatatgaaacagtttctacatcagctggtgatcgatatgattccttgctgagtcgctctggattatgggccgcagacgccgcctcntggtnnaacagtaatctacctctgccgataacctgtttaaaatgactcagcagaacaccgcgtttcattctattggtcaattccatgtggctgactaggtcaattttttttttgaacaaaagcaggtttttatatgtaaacagtgagaaaagaaaggctaaacactatgtaaatgtaaatggaaacttgtctatactggtttttataatctacaaaaacttttctttgtttatcgggaaatccatatttaatttgtaatatactctcaagcctgttgacctcctcatctattgtcctaattgtatgttttatgatttgatttatgtctttagacagtaacttttga

SEQ ID NO: 632297 - DNA, 447 bp, Homo sapiens
acctctttgctcccagattcgcaaagcagttcttagtgacccacagagactcccacacaataatagtgggagactttaacacccaactgacaaatattagatcatcaagacagaaaattaataaagacattcatgacctgaactcagctctggatcacttggacctgatagatagccacagaattctccacccaaattcaacataatatacattcttctcattgctgctcggcacttactctaaaatggatcacataatcggaagtaaaacacatctcagcaaatgcagaagagctgaaatcataacaaacagtctcttagaccacagagcagtcatatttgaactcaagattaagaaattcactcaaaaccacacaactacatggaaattgaacaacctgcccctgaatgactcttggttaactaatgacattaatgagaacaaag

SEQ ID NO: 632298 - DNA, 837 bp, Homo sapiens
catcataattgtggtttccaatcccagatgggacattcttacgtatgttacctggaaactaagctggattacccaaagcaccgtgtgattggaagtggatgtatctggattctgctatatttcgctagcttatggctgaaacatacttgtgctttcatcccacgtcacctgccattggatggtatttcgggggaacatggcgactcaaatgtggctgctgctggagtggatgctgaatgtggcaagggtgatttctcgtccaggaattgaatccaggaaatggagacaaccgtgacaactgatatgtgaataccattggtagaacggaatgtgcactagatgagtggcttggtttgcacaagctcgccttattttaatgtctatgctaagtctacagagatggcatattaccagctaggagctgattggcattacgttgtggctggatctttatttggaactccagtgtttggaaaaaactctgatccgaggcatttctatcccgatgtcgaagcgaactcgtgtaatacggggtatgtattgtgccatgttgatgcacatgtacatgatctgtccttgtaagccctatgcgcatagtatccttcgaaactgccctggggcatttaaccatgcgtttatctaaccaagacacgcttaacggcatgatgaaggttgctcagttccacgaaaagtgcagataccctgtgggacattcagagggcaccctttgagacctgtgaatagtgagctctaggctgtgcaagagtttaccttcatgtcttgatccagctttagtttcctcctgtcttgctcaggcgtgaccctccactgtccttg

SEQ ID NO: 632299 - DNA, 241 bp, Homo sapiens
ggtttagggttatagatgtgaactggagttggttgaggagagattgcaagataagatcaggagagtcttaccatgatgggaagcagcccacctgcacccactcttgaagtcatgtcatcttgctccttctcttccaatgtcctccatactttgatgactcctcaatttgtatcttcaagcctgacttctctgctggactacagactcctatttccggcttgctgaatcttttccaactctt

SEQ ID NO: 632300 - DNA, 819 bp, Homo sapiens
tggaataaaagatttattttttttcctcaggaaaaacagaaagttagggaaacacactacattggacaaccaacattaattggtagtgggtcctaacccttccgggcacagctatcaaaagtacagctggtttaaccagaaccaagggtgttcaccccccacagaaggtacatgaaacactagaggactggcatgtttttccctgagagaagcgtaagacaaacagaatgtcaaaaagtagtcacggggagcgccatccttctaagcaaatcctccctttccctttggggaggattggcccgaactacgtagccagtcagcacttagaccacgcgggcctcctcctccccctataaacccaccattcccctcctcctttcccaaaccactgggggtgtcctaaagccctcattggccccaagcccaaaattatcaactaagatcctggtctggtattcccacagtcatacctaatgaatggggaagtgggggcccctaaaaaccaattcacatctatgcactggtttccactgggattgggcagacagggctttttaagttaccgtaaccagatcttaaggattatttaaaaactacataaagggctttaaggtccttagagatacttgatataaataaggggcttatgatcaagaaggataaatacttaggtaaaaatagctctagcaaagatgaccttagggctctgagaatgggcaggcagggcagttcttccccattacattctaagtcatcttatgcatacctattttaaatgggagtccacagacctaagggtcatgtcccggagaagaacta

SEQ ID NO: 632301 - DNA, 351 bp, Homo sapiens
gccattatgtgccaggtatacactgcctcaaatattacatattagacagagtttacagggcacattaccgttccatcattacaagtgatgaagaacaaatgaattgcaaggagtatgcaaatcataaatatacagatcttaccacttacactaaccaagtacctacttttcagtgttacttacaaatttatgcacgaaacctcctgctaagctgaatctgagtagaatatgctatatattttaaaatagctatttctcatttttagacaagccaaatacccaaccatcaaaattatggaatagatagaattgtcacagtccattacagttatgtgttgctacccacagggt

SEQ ID NO: 632302 - DNA, 394 bp, Homo sapiens
attcgcggccgcgtcgacctgtttcatgaacaagtgtgtggttcaaatttgtactagcttcaaaatcttcaatgttcaggaatatccaaaataagaaattaacataaatatgctcctgtaccagtgataattctggacacccatgaatgggaacatgcagtgtttggttttttgtccttgtgatagtttgctgagaatgatggtttccagcttcatccatgtcccatgatgggaagcagcccacctgcacccactcttgaagtcatgtcatcttgctccttctcttccaatgtcctccatactttgatgactcctcaatttgtatcttcaagcctgacttctctgctggactacagactcctatttccggcttgctgaatcttttccaactctt

SEQ ID NO: 632303 - DNA, 309 bp, Homo sapiens
  misc_feature (163)..(163): n is a, c, g, or t
tcggcaccgactttattcaaagaccacggggtgtacgggtacagtgaaggggaggagtgggctggtgtggtgagtgcccaaggggcaagaagcattgccaccgagtgctccagcttaacggtattttggaggtcagcacggtgctcacagaagccaggaactngtccagggaggcgtgcaccgcaggggtgaactcggcggggaggtgaggcgaccagggatcaccagcaggcagtgaggttaggagcgtgaagcttgaccgggtccacccgaggcatgtgcgcgtgcaggtcgactcagggcggacag

SEQ ID NO: 632304 - DNA, 303 bp, Homo sapiens
ttgcaaaaaagtggcgcaccaaagatacaagatagcgattttaaatatttaaatactcatcgtgaaggttatccaaataaacaagttgatgtgttaaatatctttggtaatttacaagatggtagtaattcagatggcgatgtcacagtagtctctgccaaatctctcaagtatttactacgagacaggtacaagcattatcaagaactagagatatcaggcaaaaaaggacagcatagccagttgcatgaaaatgcgagagttgatcgtgctattggtgagttcttgtggccaatagtagag

SEQ ID NO: 632305 - DNA, 381 bp, Homo sapiens
aacggatagctgggcaccaaacggtggggacacaggcatgagccaccatgcctggccagctagggtctttggtctaagtgatatagctcccttgaaggaactgacatttggtagttcctggaagtccatccatagtagttcgcgttcagctttagaacaaaaatctgtcttttttttggagacagggcttggctctggtggcccaggctggagtgcaagggtacaatctcggctctctgcaacctccacctccggggttcgggtgattctcctgcctcagcctcccaagcagctgagataacaggcatacgccaccatgcccggctaatctttggtatttagtagagatagggttccaccacgtcggccgaagctggatca

SEQ ID NO: 632306 - DNA, 125 bp, Homo sapiens
  misc_feature (90)..(90): n is a, c, g, or t
atccttagatgtgcggacgatcaccaggtacatacactgatcatcttctcatacctttgtttccagcatttagggaattattcgtccacncagtctgtcgtagtgtgtcctgatatcatccagac

SEQ ID NO: 632307 - DNA, 280 bp, Homo sapiens
gacgttttgaggcaatgggagcggcccttgcccaagttgctcagctcttggagtactgcctctggagcgattcccggtagaaacggaagacgtgttgcgaagcggactgggccgaagacaggcactgctggagctcagtgtctgagtagagccccttggtgctggacatcagcagcttccgttccacgctgtccagggcaaaggtcaggactgcccgggcctccttttcttgcttggctgtaggatccagcacgagtgtcccatcagagtccagggcgca

SEQ ID NO: 632308 - DNA, 759 bp, Homo sapiens
atgcgggtgctccgacggacccagcccggcggctgcagcccgccctgcccgcgcggtcctcgtgtccaccatgcagcagggaggaagacaggcaatccatccggtctgtcctgacgcaatgagatggccgagccagagccactgagggcatatgggacattcattgcatttacttggtactgtgacgtgtgactctgcgagcgtgtcttagcagacggcaggccgcctgatccttgtggacggaacgagcgcagtcctacagtgccgtgtcggtgcggtgcttcgcttggcgctgggcataacgagtgcacgtgcctgtgactggacagctcacaccatcgggtgggcacaagacaagacccgggagctggaggttgccagtggtagactcctggcgtttgcgcttggtacgtgcactcaaaggatgccttagagattgggtgtcaccccagggacccaattcaagcgcacctgtaccacatgccctggcgaaacccaccaggaattattacaaccagtccaaaacagatcattacacaagttcgttatcatacccatttggacgcaggaaacagccgggaaagaatttccgcacactgaacactgacctgtggacgcccttcaaaatgtggcctccaaccacgtaacggcgaacgctccatatacacagcacaacatacgcccagacagaacaaccatgacagaagtataggcaatcaagcaagacaagcacgaaagaaccagtagagagacgaatag

SEQ ID NO: 632309 - DNA, 261 bp, Homo sapiens
cgccggcgcgtgctgtgggtgcctgctctcgcacgtcagctgacgcgggagctaccctctgtagctgagaacggcgcgtttattgctacacgagactctattgacagtggcaggttcagcggtagcggcttcatgcggtctatagctgttgcttcctgatgaggctactcgcatgcgtgcctaggactggtgtaagcactgagcctctagcaggaggcatggctcgaagacggagtctgcgccgggcgtgctagagccgtg

SEQ ID NO: 632310 - DNA, 421 bp, Homo sapiens
gagacggatcgtttggctcatgttagttgtagaaggtctaattcaagagtgagtaccatcttacactttctagaagtctgttacttaaaatgttttctttcttctaggtgatatccgacatccaaagcacgtccaacagacggatgtggctgcgacactggcgatagcacttggcttaccgattccaaaagacagtgtagggagcctcctattcccagttgtggaaggaagaccaatgagagagcagttgagatttttacatttgaatacagtgcagcttagtaaactgttgcaagagaatgtgccgtcatatgaaaaagaactttgaactatcaccattggcagcaccctcagatgcagttatctaaagttctttcataaattattcattcaacaactattaccaggatctgcctcagcc

SEQ ID NO: 632311 - DNA, 1121 bp, Homo sapiens
agcggaccacagttgcaacctgcagaggcccggagaacacaacctcccgagaagcccaggtccagagccaaacccgtcactgaccccccagacccagtgtcgcccagccactccccagcgactaccatggccgaagcacgcagacatgcgcatgcgctggaggagatgcatgcgacagggctgaccagttggctgatgagtcgctggaaagcacccgtcgtatgctgcaactggttgaagagagtaaagatgctggtatcaggacttcggctcatgttggctgacacaaggagaacaactcgcatcgtgtcgcaatcaaggcatgcaacccatcatccaaacgaagaacgatgaaggcaggctcgcagcaagcacttctacacaagcatttcagggcaaatgctgatggccttttcatcatgtccttgtcaacacagcttaaatcaagttgatgcttaacaaacaaatgccctggtgggcacatacatcacggaccggcagtggctgcggccaggcccaacggcgcttgctaacgttgtaaagtgcgacagcacacaggggagccagatgcgccatcaagcttggcgcgcgcatttcatcccgcagcggtaaccagagatagatgccccggaagaacacatggacacactgggcatcgaaaacaccgcctacaaaggcaagggcgacgacggcggcactccatccggcgaacaccacaaccacggcacacacctaggcacccctgcgacatatggggcaacagagaacgacatcgaacgagcacaacgacacgtccggcccacgcactccgacacagggacatccatcggacgcaaacggctcagacaacgcggaagcgacaccgaagcgcaaggacacgaccgaaaggaacgggcgaccacacccaccaacaggtgcaaccccaagagggaatggactggggacgaacgcgggcggaacagatggatgaccccgccccacgggagtgccacgcccacgagcaaagtcacggccagcggacaagaaaacgcgcaggagcaagcacagaccagcaggacaagcacataagaacgcaaagcacacaccccaagcccacgcaggcccgacgaacccacccaggg

SEQ ID NO: 632312 - DNA, 326 bp, Homo sapiens
aaatccaactgggaaccaaaaagggggggttttgggcaaagggccctgggcccccccccctccaccctggggtggggccccggtggctaaagcccctttccctggggcccccccccacaaaatggggggccgcccccccgcccggctggggttttcccccaaccccctttaatggggggggaaaaagaggaaaggggggggggcccccccccccccccggggtttggggggggcccgccccccaggggttttcccctccccggggggcctttcccccgcccctttggttaaatccaacccggattaaaccccccggtttttttgga

SEQ ID NO: 632313 - DNA, 196 bp, Homo sapiens
  misc_feature (122)..(123): n is a, c, g, or t
  misc_feature (127)..(127): n is a, c, g, or t
  misc_feature (133)..(133): n is a, c, g, or t
tatttcgcccagtaagccaatccctttattgactcctagccgcagacctcctcattttaacttgaatggaaggacaaccagtaagctacccttttaccatcattggacaagaagcatccgtnntatncttccncaccaatccaatcctaataccaactatctccctaattgaaaacaaaatactcaaatgggccta

SEQ ID NO: 632314 - DNA, 149 bp, Homo sapiens
gaggtgagtctagaggatcccgtcttggtttcctgcacttccacaactcattacagatttaagaaaattacccctccaccgctgcggttgctcatgcctgtaatccgacactttgggaggccaaggtgggtggatcatgaagtgcaggt

SEQ ID NO: 632315 - DNA, 157 bp, Homo sapiens
gtatattatcatggaccagtttctttatacaatgctaaaacatgaaaaccagatagagcgttaccatcaaggtatgatctagtaatacaataaactacaaggatcaagactgtagctatggaatatgtgtaatgcgatttactggccatgtaatcaa

SEQ ID NO: 632316 - DNA, 852 bp, Homo sapiens
ctgtggggaatcatcgtctgacatgtgattggggtgccacccagtgtgtgcccaatttgagaggtgtgggtgattgttaaggagcacgtgccgcacgttcccggcatcccgttatcccgggacctggacccatgtttgtgtggccggcgtccctaggggcatacacccgcccaggcgtgttgtgctcccacgcagctggttgacactccgatgatctttccgggcacgtacgtctcttgcaaacttcactgccgccgtctccccccatctattgagccccatgtgttcctgggcggtggttcctggaaccactggatggttcccccagcctccccccgggttggcacaagtttgaggcccggttcttccctttggcccttgaagaagagtttggaagagtccagggtcacctttggacctttcaacccgtgttgccttccctcctgatggccaagatgcttcactcactcggcggcgaagatggttacgtccgtaatcccttacttcgagccccccgtacttcgaatttgagtgttgaggcttatagaagctggatctcctgccggggcgtggtggctcatgcctgtaatccccccacctttttttttaaggcacggcggagtcaccctgaggtcacaggagtttaagacccgcctgacccacactggagaaacctcgtctctatcttaaaataccaaaattagccaggcatggtggcacacgcctatagtcccagctactcaggaggctgaggcaggagaatcacttgaaccccggaggcagaggttgcagtgagctgagatcacgtcattgcactccatcctgagccacaagagccaaactccgtttcca

SEQ ID NO: 632317 - DNA, 1020 bp, Homo sapiens
  misc_feature (327)..(327): n is a, c, g, or t
  misc_feature (602)..(602): n is a, c, g, or t
  misc_feature (607)..(607): n is a, c, g, or t
  misc_feature (628)..(628): n is a, c, g, or t
  misc_feature (669)..(669): n is a, c, g, or t
  misc_feature (766)..(766): n is a, c, g, or t
  misc_feature (768)..(768): n is a, c, g, or t
gtgaaactacgatatacccattagctagctgatgccaggtaactgaacagactgattccaatgtctatcagacacgtcgatggcggaactcaaaggtaggcatgccaaggttcaagcctcgagagactgagcgtatccgacatgtacacatcagagtcatagctcgctggctagctgtagctggattgatgccgtcatgagaaaggagacatgatgataggaaaaaaaatccactttgttaactgtatctgtggtgttctcttcaatgcaacttagagctcatgccccttttctggctttgctgttgattctggatggtcagagaantattcactgatggagacctttaccttttgtgccgccgcgagtctctatagcacatcacctatctcatcattactacttgagttgaattctctgaaaggacaaacggttcatgtgctatgtgtcctgtttagatcaaagtagtcttcatatataatatgtgttacatatattgctgtagactctcagaaatcagggtagagcttttcctttgagcagtttaatgagtgaattcagcagcaaagtcgcaagaaatggttctccagccaggagaggtnatgtntatcctctgattgcccgtttnctctgcacacagtgatatcgtattcagtgagaggtgctgtnggcaccagcagcaccctgggcacacagcatttcatgtcatgtcacagtgtacaagctaccctctaattcagaaagaagagcattttgcacagagaanantagataagatccactgaagtgtcatctctctatctctaattcttcagtcggttgatgttggaatgtgagtccttgtcatgaacttgtaaaccaatcttggcaagatacaagtgtttagagaaaggcaactacaatgaacctcttgttcgtcctgttttggaatgctgaagttcctcaatggatcctatggctaatactaggggaagcaagcttcccataggtttctttttacacactgcagggtatcttata

SEQ ID NO: 632318 - DNA, 196 bp, Homo sapiens
  misc_feature (177)..(177): n is a, c, g, or t
tgctgggattacaagcatgagccaccacgcctggcctgttatgtttttaaatgagctgaacttacttgtttgtataatcacacaattaaaagctattggtatttggtgaaaaagaaaaaatctatttgttttccaaatcatgtgtcctgatattcaattcagcatatggtggacatntattaggagtgcaacagac

SEQ ID NO: 632319 - DNA, 1244 bp, Homo sapiens
gtctgcgctcctgctgctggcggggcctggaggctgctggcgtgctgtccgatgccccccgtggaccctccaggtcaggccatgccgataaggggctcctggtgaaacggcccggaagacgaaggcaattcaggcccagtaaactgcgagaactcggccaaggtgaaaggtgcccaagtcggcactgggtaagttcgaggcaaggggctgaacagtgctgtcctccgagtgctgggacctgtcgccccagaggaggtggcgcttgaggcagggcttgaagcgttcgcccggtattgctagacctactgtgtgccaggcgcggagcggggcccttggacatacgaaggtgacagaacaacgccaacgtacctggtcctacgtggactacggccctagttgggcgagagaagcatcaaaaggaatatcaaagccagatgtgtacatagctaacgtgcatttgaaagcctatgagttacaagacctacggttactctgatggggacttaggccaagtcacgcctactctgaggaagcgacatttcagccgagagctgaaggatgtataagagtgagctaggtgaacagtacggagaatattctaggaaagactagtaatgtgcaacaggtccttgagttcgcaacaggacgtagatgcctttgagcactttgacaaaataaaggcaggtaaaagagtgactagtgaatgaggatccaagcattgacattaaacacttcaagtaaaaactatcatgtaacgagagaactgaatactacagagactgacaaccacttacggcgacgatagaaacgataaagtagacccaaagacggcagaaaaataacaaatcacacacgaatgacaacaatacaaagacagagggacctctaccacggtgaaacaggacagtgagatatccacagacaataagaaataacgcaacaaggcacatcatatcacacaaagcaagatagaaagcgaagctcatagaagcacgggaggaaggaaatataagcaaggacgaacacacgaagacatggctgagcgactagaacaacaagagaggaagaagaaaaggaggagacgaaagaactccatcaacacaataagaaaagtaacagatatatgatacatataaatagacaatgagctagactgaaagaaagagataagtagataggaagaaaacgaacgcaatcctatatcaaagacacgatcatgaaatcgcactatcagttaacgatag

SEQ ID NO: 632320 - DNA, 271 bp, Homo sapiens
ttccccgcgcgcgttgcgcgctgtaggcgccaacccctcgtatcacccgaggcctgtgggaggtgctctagcgtgacgtctccattccagtcctccttccctgttcccatggtccttacgtagagagaccagctgtccttactcaccaaggctccagggtcccagttagcgtactcatgcctgccccaagtatgcatgaggcggtacaccgcgacgggcaaggtctggggcctatgggcgcctaccgtgagcccgggatttctgagcttag

SEQ ID NO: 632321 - DNA, 254 bp, Homo sapiens
ggttgggaagacacacattccttgtgaatcaatctgagaagaggaaatatatgccctctaacttcagattccaaaaacttcaatgtcctattgggcggtcctttctgacttagacatttccccctgctttttagaggggttgatggctgaatacagacagcagattgtttttgctattgctgaaaacttgtttaaatgaaggagatttatgaggagaaacattagacactacacgagtgagacaacattatgta

SEQ ID NO: 632322 - DNA, 567 bp, Homo sapiens
  misc_feature (513)..(513): n is a, c, g, or t
  misc_feature (523)..(523): n is a, c, g, or t
  misc_feature (552)..(552): n is a, c, g, or t
tccatgaagctgttgattctgtttttctgttcctccagatgtctacacttttacctctgcttgcctgatacaaccaccaccagtcacctcacagaataactcactccttaagaatctgatcaggaatcagccttccctgatcacaaacactgagtttagaagtccctccacagtgtcccccgtaaccctgtgctacctcactgcctcatagtttagtgccgtttgtgtacatgcctatcttcgtccatggatccagaacaacttgtaaaaatgactgtacttatcaccttcagtattcaatgactaaactataattttaacatatctggcagaatgaatcacttggggatttctgccaacactaccaatatattactcctaatttgtaattattacttagcatggattatagtaccggctgttggagagccaatgtggcagaccctaagtggaataaaatgtcagtagcagtctaggagcatatatttattggaatagatcattcattcattngttcattaantaatttgttcattaaataaacatttattnagcaaaaaaaaaaaa

SEQ ID NO: 632323 - DNA, 95 bp, Homo sapiens
cactctgcccagttcctggcctggttgatgcagcttccaaggggagggctgcgtgatcttggcccttcaagaagccttggctaatcccctagagg

SEQ ID NO: 632324 - DNA, 465 bp, Homo sapiens
actttatttaagggccaacgatctatggccgcttgtctcaggagggaaacatgggataggagagccaagggtggtttgctcgccagagcatatcatcacccagggatgaagcccaggatccacatgctattcttcctgatgctatctatgtggagctgcctgtcatcaacaggccctagcgtgagtggatcccgaccatgagcccatgggttctcatcatacagctcccagaaggtctccatcatacacgaaatgggggagatatgtacaatggcactccatgtattcattaccccatctagtagaattataagcagatggccaatctggttcaattgattatctcttgattccccactttcagattaccagatctaattgtgaacgagtgcatatagatgacatgattctattcagaaacactagtgatcattatgagttcacatagggaatcttcatacatag

SEQ ID NO: 632325 - DNA, 1115 bp, Homo sapiens
tggctgggttttgggatagcccggcttagaaaaccccacaaatgggagaaacaggctaccgacatgatcttgtgaaggagggaaatattttcccttgggtgggaaagcaagcgcaacatgttgaaaggagacagcgtttatatgacaagcccgccttgggaattggccaatggcggcctcctttcacgccggttcttcgagactaaggtcctcaacagtgggcagcctcttacggagttttcagacaaagggccgcacgagtgcgttcgcctagggctgcccctcctaattccgaccgcgattttccacaaaggggggaaaaaccgtcttggttcgttcgtggctggactaacgatggagtccacccagggtatgatctagaccccgaacgaggactcggttcatgcaattggggtaacacgttccgcctggagaagaatgtggggggtggcataccccctgccacatgtggtgctaggcgagcacctacaaaaaggtgtggcccgcgcctagactttcacttctgcagcagggtacgcttctctcgggctagtgctaaccatatgcggggaaccgcttgccatttgatagccccgaagagtctatctacacttgtttatcccaacaacttcgtggtaaggtgtccattcgacagggcagacatgttctgttcgatctgagcctttgccaaattggggcaaatacctgaggtgaatacgggggtaccacagggcaacggtatgtatccctgtggcctggaacaatggcacagatgaaatacaggcagttcgcaacggcaggcaaagcgtgaccgcagctgctacgtctaggccttgactgtttcaggccagtagaatcatcggggttcatcggcttgaacagctctagcttgtgcccactatggtgagctgcagatctgggaaccaaggtcaagccaacggccaggggggtgtcaaccagcccttttttttgttttttttgtttttttttttttcctccttaagctgctgtcaatccaaaccatttggcatcatcgtttcgttattgaattaaaaccaacatatcagcaatagtctgctctccccgggatctcataaatgcctagggtacatcga

SEQ ID NO: 632326 - DNA, 963 bp, Homo sapiens
agaagcctgcagacactcaatgccagactgtgaaatcagccaggagggagactgtccctgcaaagcccagggcagagctgcccaagaccatgggaacccaccatttgcatcagcgtgacctgaatatgagacctagagtcaaaggagatcatttcggagctttaaaatttgactgccctgctggatttcgggcttgcatggaccctataacccatttgttttggccaatttctcccatttggaatagctagatttacccaatacctgtatgcccattgcatctaggaagtaactagcttgctttcgattttacaggcttatatgtggaagggacttgacttttctcaggtgagacttcggactgtagacgttgggttaatgctgaaaagagttaagactttgtgggacttttggaaaggcatgattggttttgaaatgtgaggacatgagatttgcgggggcgggcaggggcagaatgatatggtttggctgtgtcaccacccaaatgtcatcttgaaattgtatctcccagaattcccacatgttgtgagagggtctctaggggaggttgtctaatcatgagggccagtctttctcatgctattctcatgttagtggataagtctcacaagatctgatggattatcaggagtcccacttgtgcttcttcattccttcttgctattgtggcaagaagtgcagttttcacatcctaatgattcatctctttgtccaacaattcagtgacccatttcagcctcacctcatatccctaaaactaggctgaggattcgtcctagggctatattaaccttttctcgaaaaacaaaagggggcttagatccaaggcagtactccctctggcaaggccaaagagtaaaagaggcggaacaggggaagccggtgtgggcctgggtagaacaaacagggaattgcgtgctggatacagagggcgacgacaga

SEQ ID NO: 632327 - DNA, 314 bp, Homo sapiens
  misc_feature (15)..(15): n is a, c, g, or t
ttcggcacgaggccnatgggcttgggcgtcgacgatgatttgtgctttctcgtccaccgcagccacgccggtatagccttgaacaacgcctttgcccgtggccatcttggccgattcgttatcggtgcgattggataagcgcacggcgcctttggcacccttgcggtcttctgtgttcttgtccagccactcgcgcagttgtttggcttctttctgcagccgcgcaagctttttggcctcacgcgccgccgtggcttcatcggtgggtgcggtatcggcctgacggtgtttgtccagcatcttctgggcggccg

SEQ ID NO: 632328 - DNA, 161 bp, Homo sapiens
  misc_feature (85)..(85): n is a, c, g, or t
  misc_feature (160)..(160): n is a, c, g, or t
aatgtaactgaaactgctggctgggcgcagtggctcccacctgtaatttcagcccttcccgaggctgaggtggaaggattgctcnaggccaggtgttcgagaccagcctgggcaacaaagcaagaccctgtttctatttatattgaaaaataaaaattcna

SEQ ID NO: 632329 - DNA, 522 bp, Homo sapiens
tgcaggattcggcacgagcttaacatttaagagagagggtgtggcagaaaacgttggggacttcgctcataaaggccgcccacgccccacttgccacccgagtgatgcccaaactgtcccactgtgctgttggcacgaacaccttaagggactgtggctgtcctgattcctagaagacttatcgcctatgcatgtggatcgtcctgacccacaccctgccgctaaagactgcttgcaggatgcctaccacagtaggccattgcggtatgccccatcctcaggtctacaccctacacctgctgcgtcgtgaattaactggaaataactttgcagggagagcccaagctaagacccccgaaacccatggcaaacaaaaaaacaaaaactcgggggccgcccggtacccaactctccttaacgcggtcgtactacacttcactcgtccgctcttcacaccgctgaactggcccttcaatacccacctaaccgctagcagcccctttccgccagctgcttcccccc

SEQ ID NO: 632330 - DNA, 296 bp, Homo sapiens
gagacagcctccttggctcaatcagcccacaggattctatgcttgttcctctgtgcaagactttagtcgcccaccacctcatctggtgtccacatcaaaccgtgcctacatgcggaacccctactccagcgtgcccccagctatagatgactacaccaagacctacaccacaggtgtggtcgccacacagtgcctataccactgatgccatcactctacagcttcacatgaaggctctcatctgcgtaccaggtcagacagtgggaagcgcatatcctcctactgctgtcacattc

SEQ ID NO: 632331 - DNA, 562 bp, Homo sapiens
ggtcaggttgggaaggtgggatcaggtgtgggaggcacagtccatgggggaggtgggatccagggaggagaggtaaaggccaggttggggagagaaggggtgagggaggcagtctcctgagtagcttggaggattcttgggaaagccaggaggtgggtttttaatacatggtcatccttgtgcttgtgggacaatcctatccccagtgttgcctgtgtggtgtggttgggcttggggttgggggttttgccagtgtgagtggtgccctgctcactgggccatgtggttacatgcttgccccgtatgaagccatggctcgaggtgtctccctgtcatggccacgagggtggttttgccaatggccaaagaccgtttgggtaaaagccctttccagccacccgtgcccctcctcgtcgctttccagccaatgtgccttgtgaccattgggagtaaggtacgtcaaagcatgacttgttgtgcacccttgtgaggcagggggaggcacggtgggacctggtgtgacgccattgggcggaggtgaacacggctggcgcaggttgac

SEQ ID NO: 632332 - DNA, 460 bp, Homo sapiens
gcctatcttggcgcggccggcaaggccagatgatccgagagccaacgataggagtatggaatctggctatgtttagtctcatacagtcatactcagggtacgtgggcgcgtactccgtactacgaggtactaacaggattgcctacaatcttgagatattgcacaacggcgaatctcctgtggattgtgacggtcttgcgggcaagatccgacatcgtgtcccgggcccttgatttgttttctgataacgccccacctcctgagctgcttgagattatcaacgaggacattgccaagaggacgtgtgaggagcaccagctctgtgttgtggctgtgctgccccatatccttgatactggagctgcaggcagaaattcttatctggaagttcttctgaagttggcagacaaatacaaaaagaaaatgtgggggtggctgtgggcagaagcaggggggatct

SEQ ID NO: 632333 - DNA, 364 bp, Homo sapiens
ctgttcttgaggttccccgtctgtcgctgctgtggacagactgggtgtctgacggtggcatggtggttcgtgcattccagtgtgatctgcggcgactctaccgaggtgttgggcgacatgctaggacgactgacgcagctcattctggaactgttgagtgctactggaggtgtccgtgaaccagaatgatttcttgttgctggaggagtatcattatctgtgaacgatcagaactacttccagatgcataacgcctgcggatggctggaggagatcttgttaaggaccgtttaccccgagctgttcgtggagtacgggatctggagcggcggcggatagcaagtggtgagcgacttcgagaacg

SEQ ID NO: 632334 - DNA, 1003 bp, Homo sapiens
  misc_feature (338)..(339): n is a, c, g, or t
  misc_feature (341)..(341): n is a, c, g, or t
  misc_feature (347)..(347): n is a, c, g, or t
  misc_feature (353)..(353): n is a, c, g, or t
  misc_feature (356)..(357): n is a, c, g, or t
  misc_feature (374)..(374): n is a, c, g, or t
  misc_feature (396)..(396): n is a, c, g, or t
  misc_feature (414)..(414): n is a, c, g, or t
  misc_feature (436)..(436): n is a, c, g, or t
  misc_feature (451)..(452): n is a, c, g, or t
  misc_feature (457)..(457): n is a, c, g, or t
  misc_feature (459)..(459): n is a, c, g, or t
  misc_feature (461)..(461): n is a, c, g, or t
  misc_feature (465)..(465): n is a, c, g, or t
  misc_feature (479)..(479): n is a, c, g, or t
  misc_feature (483)..(483): n is a, c, g, or t
  misc_feature (494)..(494): n is a, c, g, or t
  misc_feature (506)..(506): n is a, c, g, or t
  misc_feature (514)..(514): n is a, c, g, or t
  misc_feature (520)..(520): n is a, c, g, or t
  misc_feature (535)..(535): n is a, c, g, or t
gctgagaccctgcagcaccatctgtcatggctggctgggctgttatggtttagagctgctctgcctgtcattttgtgctgtgcatgctgtgactgactgcgatgtggctccctgtgcctgccctgctgtcctgctgtggaatctagcttctccagtgactgtgtgtcgccccgtccgctgtggctggggaaagctgtgcccacagaacctgaccacacctgtggcaatgaggacccagaaccctgatggacgaaaacttgtatgagaagaacccagactcccatggttatgacaaggaccccgttttggacgtctggaacatgcgacttgtcttcttnntnggcgtntccatnatnntggtccttggcagcacntttgtggcctatctgcctgacnacaggtgcacagggtgtncaagagcgtgggatgggatganagagtggtcccgccnngaagntnanaggnttgtgaataccganaggncaatggccttnccatcatggaanccaactgnttcgancccagcaagatccanctgccagaggatgagtgagcaggtgttaagtgggggtcaagaaggcccgccttccccaccccctgcgtgccattatgaccttttctcagagcacctaattaaaggggctgaaagtctgaagaacaaaaaaaaaaatcgcagccacactcttcacaggcgtcagcagcaacaagcgaccagacagtggcgccatggacaaacaagcaccaaggccccgcactctaggcacacgtgggcaaccgcgtgcgcaccccatagcggacgcaaataccaaacgcagggtacctgcatggcaaacagcgccagagaagcggaagagagtgaataggggagtataacatgcaagaaggagggacgatcgactggatgaaaggagtaggaacgtattagcgataataaagagaacctggagagacaggataaataatatggatagggcgggataataaagaaggagaaagcctaaga

SEQ ID NO: 632335 - DNA, 382 bp, Homo sapiens
tctgtgccagtttccaatatagcttactccattcccaccttacaaacaagttctttgtaaagttctgtaggcagagtaaaggtttttaccccaactggctttttaaaaccttttacctaaaggattattttccggtcaggttccaaccaggccaacttattgctgtcccctggaggcagcccatccattaggtcctgggcatgccccagatttggcagcccatcaactggatagcagccccagggtggtggccacccctctcatgttccatcatggggtccatacccaaggcatcctggccatatccaccagagtgaaaagaacgatagctaggatatcctggcgatatccaaggagctcaagggatctctagaatcgccga

SEQ ID NO: 632336 - DNA, 144 bp, Homo sapiens
atatttaccgcctcctggtactgctcgggtgatgcgattgtgtcatccccgttcaccagaaccaaagcttccagataagcactttcgacctttctacggcgggcctggtcaataagcaatcgtttggcaatggtggaaagataa

SEQ ID NO: 632337 - DNA, 445 bp, Homo sapiens
  misc_feature (12)..(12): n is a, c, g, or t
  misc_feature (228)..(228): n is a, c, g, or t
  misc_feature (233)..(233): n is a, c, g, or t
  misc_feature (273)..(273): n is a, c, g, or t
  misc_feature (325)..(325): n is a, c, g, or t
  misc_feature (350)..(350): n is a, c, g, or t
  misc_feature (366)..(366): n is a, c, g, or t
  misc_feature (378)..(378): n is a, c, g, or t
  misc_feature (425)..(425): n is a, c, g, or t
  misc_feature (440)..(440): n is a, c, g, or t
taatgtgtgacngccgctttcttggttcaaggacatgaacatttctacaaaataattaaatttccttgggatgttcaataatttttctgagatgcatgattaaataatttgccattaaaaaaataatgtaaataaaatattgaggttgtaggccctgtacattgcaaataggcttgtggcattttcttagcatgttatagtgactaaactaagttttacattagtagnaaagnagtccctgtaatgttttttaaaaatatatacttaatttcnaatcctttgggattgattccactgtcagttttactccagtttttccaatacnaatccataaggagagggttaaaganggaatatgacttttcnttattgcaaccntgtagattgtccatttgatgccttcatgaaacttctgtgtacttccngggccttacatactnttccc

SEQ ID NO: 632338 - DNA, 294 bp, Homo sapiens
tttataaaaacagctgtagtcttgttgccagttctcatgttatttctcatatacacactctttgagagctgatatgcatatcttgcattttcagtgcagaaaataatattattaaatctgttcttggatttatttctaaacagaattaacatcagaatcatctgactcatcagaatcatctgttttggaaaattcagtattcatcaaattagtcttcggccaatctgagaacattgtttacattacctttaggaatgttatacaggttagtttattattgcaaaaagtgtgtca

SEQ ID NO: 632339 - DNA, 196 bp, Homo sapiens
gatgttgacactcgagtagtactcccgattgaatgcccccattcgtataactaagttacatcaccagagacgtctgggcactcgtgagctgtgcccacattaggcttaaaaacagatgcaattcccggtacgtctaaaccaataccactttcaccgactacacgtaccggggcgtatacgtactggtcgaatgctc

SEQ ID NO: 632340 - DNA, 659 bp, Homo sapiens
agcgggggttggagatggggcctggtgggaggtgatcggatcaggcgggtggatttctcacagatgctttaggaccatcctcttggtgctgttctcatgatagttcagtgaattctcactcgatctggtcgtttgaaagtgtgtggcatctcccccctcgctctctctcttgctcctgctccagccatgtgacctgcgtgctccctgccttcacctgccgccatgattggaagctttctgaggccgccttagaagccaagtagatgccaacatcaagcctctaatacagcctgcagaaccgcttgccctctctcacctgctgccatgtaagatgtgcctgcttcaccttccgccatgattgtcagtttcctgaggcctccccagccatgtggaactctctgtcttttccagaatatcatataaatggaatcacacgataggcagccttttgagtctggcttctttgactgaacagaatgcattcaaggatgtgagaagaacgaaaggaggggggagaggaggagaaaaggacgtgcatcatctgaaaatgaagggtgttctttaaagcagcaaagttagctcaacaaaacttattgtgctttatcatggggaactgacatagcagaaagtggaaccaacggtaaggggggactactgta

SEQ ID NO: 632341 - DNA, 730 bp, Homo sapiens
  misc_feature (476)..(476): n is a, c, g, or t
gttaaatcacgttggaagccatcagactaatcctgaatgtgggataattttatgaaacaagtgtcttggatgcttcaaaatatttcagtatcatgcaaacacaatctagaggacgattgtctaaattaaaaggcactaaagacacatagaccacagtagcacttgaaccttaattggatcctgggctggagttggtggtgatcagtggtaggtggtcttcgcatgagaatcactatattgataactttaacttgctagggtacatgttgcggacaagcctgcagagattcgtccaccatatagtaataacaatgtgaacattctggaagtgcttgtgattccattaactccgctcattctcatgcaatagaggtatatacatacctaatgcttatacccacacagtcactatccattaaattattgtcctctagtatcatgtcattgcatattgttacactgttaacctgatttgnacaataacagatgctttcacgaaacccataagtcgaaccacagcgtactgaacggacgaggataccaaaagaatgatggtcggtgacccctttggacttggtagtcggagttagggtcattagcgtgcaagtacataacggactgacatatgcatgtaaaactaaatggggtcttctactcccccatggcgactcgattgcattttgtaggtgtgggtggccctcactaccagccgcattggtgggagccaaaa

SEQ ID NO: 632342 - DNA, 111 bp, Homo sapiens
aatgctctgcttacaaccattacattaatgagtgctgaatttcatggttgacatgctatatggctagagatacccaatgttatccctaacataaaaaacaacaagtttaaa

SEQ ID NO: 632343 - DNA, 912 bp, Homo sapiens
ccattcatgctgaggctccagaggttcatggaaatgagtgttgagcaggaaattctggtgactggtatcaaggtcgtcgatctgctagctccctatgccaagggtggtgaaaattgggcttatcggtggtgcgtggagttggctaagactgtactgatcatggtagttaatcaacaatgtctgccaaagcccatgggtggttactctgtgtttgcgtggtgtcggtgagaggacccgtgaaggcaatgatttataccatgaatagtgattgaatctggtgttatcaacgttaaaagatgccacctctaaggtagcgctggtatatggtccaatgaatgaacctacctggtgctcgtgcccgggtagctctgactgggctgactgtggctgaatacttcagcagaccaagaaggtccacgatagtactgcctagtattatctgatacacatcttatcgcgttcacccaggctggattcagaggtgtctggattattgggccgaactcccttactgctgtgggctatcagacctacacgctggccagtgacatgggtactatgcaggaaagaatttacaccactaacaaagcaagggatctgatacagctctgtacaggctaatcatatgtgcctggctgattgactttgatctgaacgctggccccatggctacgtaacggataggcccactgaggattgcgagccagctgtactgtcgggtggccatggctgaacgcgggcaacgaatccaggctgggggaccgctagaaaccgagctcttcgtataaggagtcccaagaatgtcggagggacctataaagatagcccggggggaaaagacccgccggagacacaccccacaggaatctggcaccgggaaaaaaacacacaaagaccacggaccgaaacgaa

SEQ ID NO: 632344 - DNA, 179 bp, Homo sapiens
gtgcagagagaatggccagcaggaaggcggggacccgggcaaggtggcagcaccacgcaggcccaacgtggttcttccaacgtctttttccatgttttgaacaagcccagatacaaggagttcaaagaagcttcagctgtatcgccagatcgtattgcatcatctgcaggcagcctagg

SEQ ID NO: 632345 - DNA, 159 bp, Homo sapiens
tcgatacgactttctttattttctttctttctttctttctttccttctttctttctttctttctttctttctttctttctttctttctttctttctttctttttctttttccttccttccttccttcctttcttttcctttcccttctgtcgtcttctc

SEQ ID NO: 632346 - DNA, 287 bp, Homo sapiens
cactatctccagtacaccggaagagccccttaaatgaaacactgaatatagcccttacaggtcaccattcaggaggttgttttagcatctgctaaaaactccagcgcaatttgatgctgatgaacttcgtgctgccaatgaagggccttggaacctgatgaagatactctaacttgacgatttgtggcatcaacaaacataacaagagaaatcagaagacattacacagggatctacaggagaggaactgcaagagagatctggccaatagacataacctcatgaca

SEQ ID NO: 632347 - DNA, 215 bp, Homo sapiens
  misc_feature (105)..(105): n is a, c, g, or t
  misc_feature (122)..(122): n is a, c, g, or t
  misc_feature (172)..(172): n is a, c, g, or t
  misc_feature (185)..(185): n is a, c, g, or t
  misc_feature (212)..(212): n is a, c, g, or t
ggggggctttttaaattaatttattaggggggtagagatagggtcttactatgttgtccaggctggccttgaactcctggcctcaagcaatcctcctgcgtcggnctcccacagtggacggnttaacaacagaaatttatttctcactattctggagattagaagtcaaagntcaaggtgctggngattttgtttcttctgaagcctctctnttt

SEQ ID NO: 632348 - DNA, 1001 bp, Homo sapiens
  misc_feature (471)..(471): n is a, c, g, or t
gcctttaatggagcaatcaataagaaggaagggatagtgcagatcggtggtacttcatagcagtctagcgctggcgacccgaacactcctattcagaggaagaaagagtatgccttgtcaaatggataaactaaagccctggaaagatgatcctgatgtcggcatgtcatcccaatgaatccgcagaacgaatgatcgtcgtttgaatgctgtgggagattggcattgtccttgtgtaaaagtgatcgaaaccatgtcgagttgacaagacacatggtttggattgaagagaaccaaatccaagcaataaggaaaaggttaaccgctttttcaaccaaattgcaagggaaaatctttggaagtttggttcttggaaggttggcttaagcatttgggttggcatgtgtggttctaaccttgggggcgtgggggggcttgatggggggggaaggcttttatgttggtcccttnggggcattctcggtgtgggcagtgtctttcaagagatgggtgtgaggaggggtggattggagacttcttcgggacggagattggtgagagggctcgagtatgcgctcttgggaagaaagtgtgagagccggggggagattgaaaggagaatctctcctggagagatgctttgaggaaagggggggcaaaattccaccctgggggaaaagctgggggtgttgcaaaaatggcgaaattggaatggtgacatgggaggtactaaaggggttttcacctgctgttgacaggggtggcccaagagggtgatgaagagggtcggtgttggtgtagatagaaaagtggaggaccggggaaaagaatacactcagggggaaatagtgttgtgagagggaaaatgggtgtgcagatttgtacccaaagttggtttgagagacccatgttgggttgtttgccgcatttaaaaagaaggggggaaaaaaggtgtgtgggtgttgagggaaaagagagaaagaaagaagtgggacaaaatg

SEQ ID NO: 632349 - DNA, 722 bp, Homo sapiens
atcgtagcactttaggaggccaaggcggggatctcttgaggtcaggagttcaaaaccagcctggccaacaaggtgaaccccatctttactaaaaatacaaaaaaattagccaggcatggtggcagacacctgtaatcccagctactcaggaggctgagggaggagaatcacttgaacacgggaggtggaggctgcagtgagccgagatcacgcaccattacactccagcctgggcgacagagcaagactctgtctcaaaaaaaaaataaataataggaacataaaaagttgatctcatagaagtagagagtaagccagtgcttaccagagactgggacggggaaggtaggaagagatgggttaacagacacaaaattacagctagataggaagacttaagtactagtggtctaaggccctgtagggtgaaaacaaatactactgtatggtgtatttcccaaatggctggacagacgaaaatgctttaatggtgcccaatcacaaaggacacgtgcacacacctgttgacagtgactgatatactacttacccctaaattgaccattacacatcattaacatatcacacggtagccataaatatgtatatctcggccacatataaccatcaggtttcaggccaccacatggctactggtaacccgaattggtccaaagacacgacaggatatttccactcaaggcagcccagacgaggagggg

SEQ ID NO: 632350 - DNA, 111 bp, Homo sapiens
cggccccgctgtcctcatctattgcaattctccgcggccctcgggggtcgctgcccgcattctcttgctccaagtctgggacctacggctcccttgccatcagtgggctcc

SEQ ID NO: 632351 - DNA, 249 bp, Homo sapiens
  misc_feature (32)..(32): n is a, c, g, or t
ggcagccggcggagaacaagacaccagggagncatgaggacaccaccgcactccagccggggcgacagcgagaccgtcggcgggaaaacaaaaacaaagcaaaaaaaccacccccccctacagcgggcatccctacagatacagaagctaccagaaatcctcgaaaggcagaataagagagaagaatgggccgcgcagggagactcacgcgtgtaatcccagcacgttgcgaggccaaggagcgcggat

SEQ ID NO: 632352 - DNA, 424 bp, Homo sapiens
acgatcgctatcacttaggctgaatgttgcagctcactgcagaattctctctcctgggcctgacagtttcagaatgctaaggcaagcagggttgaatccagtgtcaagaggattacagagttctcatacattgctggtgggaatgtaaaatggtgccgctgttttggaaagcagtccagcagtttctcaaaatgctaaacatagaattacacagtaactctgagtaacatcccacttcaaggattgaaagagaattgaaagcatatgtctacacaaaaacgtgtacataaatgcccataggagcattattcataatagccaaaaagtggaaacaacctaaatgcccatcgatggacaaatggataaacaaaatgtggtatatgcatatgatggaatattattcagccaaacattcaagccgtca

SEQ ID NO: 632353 - DNA, 332 bp, Homo sapiens
  misc_feature (320)..(320): n is a, c, g, or t
ttcctcagggttcccttgaaagctttatttatttattttgttcatttatttattggagaggcagcattgcacagtgaaagaattttggatatttcagaagccccgaaatttaagtttggctttgctggttccaatgggaaggccttggaaaagttccttatccttttggaacctcaggtttcttatttgcaaaataaaggctgacttgtttaattcatagggatgtgaggttctgctgaggaaatgggtatgaatgtgccttgaacacaaagctctgtcaataagtgatacatgttttttattccaataaattgtcaagnccccagaaaaaa

SEQ ID NO: 632354 - DNA, 512 bp, Homo sapiens
gcaaagacattaatagccaagttttctataacttgcagctgaacacatgctttaccaatagaccagctatggtccttcttggtcatcattcttctcttcctcttccccaaatcccaccatctccttatatgttgagggattgattcagaaaactgccgtcaactgttccttcactctttgtttgcgtaagaatttcctgagtcttgctaccatgagaaacgtagtattttcctgctttcttgtcagtgtctgaagttaggctttctagttcttatgatataccctattgttcttaaggacttagtgggtcacagtcacatcttattctgtagtgttgaaacacacacacaaacaacaataaagtctccccagagcactcaattttattcaaactgactgaacagttaatttgttcctcacaaagttcttaatgctcttcagtgatagaggttttatttttagaaaacatgtgagaaggcagggcatggtggctcacacttgtaatcctagca

SEQ ID NO: 632355 - DNA, 374 bp, Homo sapiens
atctcatcaacaaccgattagtcattgttgggtggtgatgagtcggtgtgatgagataggaggaggtggggatcaatacgatgaatacaaccagatgactgacgctagctgcgaaatgataaacaataggagaagtacttaatagtatccgttaatcatttgtattggcaacgaacttaacactccctcggactcctgcctcactcatttacacacagaccagaccaacgtatcgtataaagcctagccatggcgatgaccacttatgagcgggcgcaggacatataggctatcgcatcgtaagattaaaaaatgcccataaaccaattacttaccaaaaggcacaagcatgcaccccactgtatccccataga

SEQ ID NO: 632356 - DNA, 153 bp, Homo sapiens
tgccctatcgagacatccagtacatctatggtgtctctttactgatcttcaacattagaaactaaaaaggaaaaacacataatattctatagagtattaaactgagatactatgccctatggcagcgtcccagttttctatatcaatcttcta

SEQ ID NO: 632357 - DNA, 1164 bp, Homo sapiens
agcgggcatggcggtccaggcggcggaaggggtgagccaacgacgcccgccatgcactcgtccgcgctcgatctccggcgtgttctcccggttccggtgcccgcccgtggcactcgacgacggaaacaggccaatcatcctatcgccaacgacttcatgggacggaggacaatcgccagtggcgacatcgccacgacggcacgatggtcgccagatcgagactgggatcaaccgtctgcgtgatgcaggctccaggcacgccgagacaatgcgagcattcgacccggccgagcaaagccatggagcgaaggtggcagtcgagggtgacgggcagtcggtacggcagtccacacacaggaagcagcgggccgtgccatggtcacatacatgcggaggcggcacaccatagtcccaacgatcagtgtcgacaaacgttccaccacatcaagacccctcaacgtattgactacacacagggatcaacaggacccgaggcacgatctatcctgaggaggtggcagtaggacgaaggcaacacggcacgcatcatggagaagggtagctagtgccggcgcaaccccgagagccctcgcagcgcgagacgcagggcacgggcggcaggtaaccgtcgcccatccggacactaccgagtgggtagccgcagacagtgcgcaacgttgatggtcccacggaaacgccactggcactgtgggggcacgcccgggcacaacgagtgggtggcacaaacgatcaaggggccaatggaaagcaagctgccgaagaataaccccagaggggcacattggggggaaagaaaccctgtccccggggaggacaggacaaaggacagttcgaaccccaaaaaagaatgcgcggaaacgcgggtcacatagcacggagggggagacacccatgtctaaccgccaagggggcaccagcaccacggtagggactccagatcacccggagggcacaaggaggggacacacaattaccaagttacgagaatgcattacaccccgtgggagagccggggcccccctgaaacactatagcacggggcgcgattggcataaccgataaataacacagaggtgaccaaaaggggaggacacacgatgaggcgataccccccaccagagagacccacgccaaaaaggcaag

SEQ ID NO: 632358 - DNA, 739 bp, Homo sapiens
gagaccaggaatcggatcccgtgtactgacggtcacgccgcggaagggcgaattctcattctgtcctccaggctatgagtgcagtcctgtgatctgtggtcactgcgtcctgtatctcctgggttcaagtgattctgggtgcctcagtgctcccagagatagctaaggattacagtgatggacgttctaacagaatcttggtacgtgagtgatacgaagaccccagaagaggaacgaggacgcagcaaaggatgtcatggggatgggctcattcctcagggagagacgggtgtttcacccattttgggccatgctggatcttttgagctccggtgacctcagtttgatcccgcctgctctcagcctcacagacgtgctgggatgaccaggaacaggagggcccatccatgccccagtcccgcaccaaggatagttaataacattactatagttggtactctttgaacacaagcaggaccgaagcatcgacctccatcaaaccccatggtggggcgacgcctgggatctcgcgagaagagcgatccggaaccaaatctgctgtgtgcgcgcgggaccccgatagagtaaggcccactgaggcaaaagaggctgccccagaaacccggtgcacacgaacagcggcggacaccgcaaaaaagaccccgggcagacggaagttggacacccgaagggactgcgagctaggctacacggccagcgtgccaacatcccccgggag

SEQ ID NO: 632359 - DNA, 180 bp, Homo sapiens
agaagggtgacggaggctggactggacagcagcctttagtgtggtttgagcgcatagctgcgctggtgctacagcatgcacttcatcatcagcttttttaacaacagttgtcagtacataagaagagtacaattacaacatatttcgccccagactataatgggtcatatgactctactc

SEQ ID NO: 632360 - DNA, 667 bp, Homo sapiens
caatggctcatgcctgtatatcccagcactttgggaggctgaagtgggtagatcatgagatcagcagttcaagaccagcctggccaacatggtgacaccccaccactactaaaatacaaaaattaactaggcatggtggcatgtgcctataattccaggtactcaggaggctgaggcacaagaatcacttgaacctgggaggcagaggttgcagtcagctgagattatgccactgcactccagcctgggagacacaacaagactccgtctcaaaaaaataaaaataaaaataaaaattaattaattaataataatagggccgggcacggtcgctcacacctgtaatcccagcactttgggaggccaaggcaggcagatcacgaggtcaagagttcaagaccagcctggccaacatggtgaaacccagtctctactaagaatacacaaattaggctgcccgaggtggctcacgcctgtaatctcagcactttgggaggccgaggtggccagatcacgaggtcaggagatcgagaccatccccgctaaaacggtgaaaccccgtctctactaataccatagccgcccgtagtgccggccgcctgtagttccaggtaacttgggaggcttgagcaagacaatgggcgtgaatcccggaggcaagctttgc

SEQ ID NO: 632361 - DNA, 175 bp, Homo sapiens
tcgcaccacgacgtccggtttctggtttcctgattctcacgggggtgtgaccattcatagagcttcggagttttaatttcttgtcatttaggttctccgtgcatgctgtattattctcattagtagaccatggcgtcctgtcttttgtcatgtttatgagcgagatgatcacact

SEQ ID NO: 632362 - DNA, 981 bp, Homo sapiens
ggaaatttggtaatccgcgagagcggtttcacggccagaataacattgccggcttacaggcgtatttaggcaatccgattctccaagggccgtgaaccgggggccactttcaaaggacttccggttttccggggacatgggagtataataaaaggcgaaagggaaaaggggagccccacatgggccccaacaccccaaaccccggcccaacaccggaggccacaaaggggccacgttgcgttaaccacggggtccaaaaaggtccacccccgtttcagaccgcggcacattaattcaacggttttaagaagcgcgcaaaaaggcccttggggggacacatggcacattctcttgaattgggcgcgtctcacacaggtctcccttgtctccacattccttggaggcccttgaaatgggttgtataaagagagtggagagattataactgtcgccctatatctccacaaatggacccaagaacctctaatatgcgtatccctgagaataaaaacgatccaacaggggtaaaacgccgagaatatttccccctcttaatagaaaactttgggtgggtggagagtggcacaacttttcacgggagatgcccacacataaaccacaaaagatcttctgttttgcgctgggggatatactcccaggtaccagagtctcggtttcttcacatattctttaagatgcgcctctcatgtgtagattctggggcgcatacttggcgccaaaggagatcttgcctggagaacatctttggacacagcgcaacctctccagacatctgcgtgcgttctcaaccaaccagtgacattgcgtttcccaaagggatacccaagatatcgttgaagagagaggtgctctgttagccaggaactgagctcccggtggcgtggtgtttccaaggggtgtctcaaagtttctttttttgttttagggggtttcattaaaagcccgcacttggggtagcca

SEQ ID NO: 632363 - DNA, 547 bp, Homo sapiens
gaattcggcttaccaacattggcccgaagttggtgttgaccactgtgttagagtaggtggttgctacggagcactggttgtagatagcggcttgcggcaggaagatcgcgctcctccatggtgcggatgttgacgtccatggacggtaacgattatgaccaatgtaggtaactacggcgggtatctgcctagtggaacactcgcctcgagcggacaccggtgtaacctgctcactgtagggacgatgtctgatacccactggttattggattaaccggattcccagaaccgtatcaggaccagtggggtcagccccttgaccagccgctgccttggacccggcttctgacctcaaggggcctcatccgagcagctgctttccttcgaaaatgcggtggatttctgcaagttgggtgcgccatttttcactccacataacccccaatctggggaaacgttgcaccccggtgtcgtggacgaggacgtttggccgtaaagtcaccatcatgatcatcggaatcccacgggagtcactcccaggtgagaa

SEQ ID NO: 632364 - DNA, 131 bp, Homo sapiens
agtgtgtaaaattcgaatagatttctgcatcaaacactgctagaagctttccccagctaggtggtctgcaagggcctgcattcccaacatcccattacatgtatcccactccagaaagtctctggatttat

SEQ ID NO: 632365 - DNA, 665 bp, Homo sapiens
gtggggggtagggggagatactgataaactggctctccaagttggatggcgagctaagggctgacccgcgtgcctcacgtgacccagaggtagatagcggcgcagacttatgtgcaggccatactcgcgattagataccaggtctctgctgaccagacattgtctgactgggaaacgcgcctgataaaagcggtatagacctgtgaagctaagcctgttccctgtacacatcgaggggcgaattcggacgggaaggaaactgcaaggattgcttcagtaaaataaccaggacgaaagaatcttatgattgtaaatattcaccagtgacaacgagagtatgggcaggcctatgcagaatgtgaaaggtgacccgaattcgggaggcggtgaaggccaccagcctggtggaaactcgcggggacaggctttccgtcttgccccaaatttcgaggggcactacccaaattgcacgactcattgtgtaagggttggagaatggagatgatattgaaggatttatatgcgaacaagcgtactttgttttttacgccggacaacgccacgtgtaggcattgccttactttacagaattgtctactacccccattgaacgaggattcatgataatttttggtttaagtcgtgctggcctctaataacgctcg

SEQ ID NO: 632366 - DNA, 900 bp, Homo sapiens
gaacatcagagagcaaagggttcttttggtcacccaccactggccccatggctgcctgtgcagatggatcctgagctagccaatgcgcctcttctttgaatgtggtgccactgtggtcatcctgaacatgcccaagggaacagagtaatggtgatttgactataactcctggtgagtgtctggtgcccaagttcctgtgtggcgtgaagatgatccctccatggcatccacttcctccactacatgctctgtggacaaaggctaatcctgaatgtgaatgtatgtgccctctgtatgtggtttcttccttagcctgcaccaggcgtgattgctgaacatgatgctgctgctgtgatgcacacatcagtggaaagatggtagacctgttcccccaagccccagagtctgaggtggaggccatgaggtgccaacctccaaggatgctggaacatgctaccatgtgtggccttaacaccatatgccaccctgaaagacgtggcatctcactcaacaaacttcatcaaagcggaagaccacaggtggaagaaagctaacgtgccctgagaaatcagagaagaatcctggagaccattttaacagaatgttgcttaactgtggctcttcccatgaagacagcaacacaagggaccagaagtggaggcacggaatacaaccccggatggtggcaattggaagagcgaaaaagcaacacaaaagagtggcatagtgacaggctaccagaagaattgaggccaagaggcggaccaagaactccggtcagcaaagcgtgcaaggagaaattaaccaagagggtgcgaggaagtaggagaacagaagaagaaaggactgagaaagccagggaatggaaaaaagtccaggagacagggagcgagaaacgga

SEQ ID NO: 632367 - DNA, 226 bp, Homo sapiens
gtactgaagggggtggcagggctgtcactgtgccggaatcatgataaagggactgatctgactcctcaggtggaggagacggaaaggtcagcagcggactcacgccacaaccccagccacggaacccttccaaaacacagaggagccatatgagaatatcaggaatgaaggacaaaatacagatcccaagctaaatcccaaggatgacggcatcgtctatgcttcc

SEQ ID NO: 632368 - DNA, 453 bp, Homo sapiens
ggtagcattgagctttctcaggcaggcattttcatgggggagctggggttctcctagggacatgatctgacactgctagaaggcatgctaaagtttgtctcttagtaactcagaggtttggatggagtcatgtgccaagagttctacagttctcagtccatttcttctatcccttcatcccatgaataacgatttttttaaattgagcagagcaaaatatattcctttaaaagaggtgattgaaaacagatttttccattaaattggaggttttgtttttaaaattacaaaagtgatttttctaatttcaataagtcagcaggaccttgagtaacattgtctaagtggacagctttgatggataataatgcctcagtcttctaccacagtcctttttattattaaggtgccatacaaaaaccataaaaattaaatataaggtgataaacatga

SEQ ID NO: 632369 - DNA, 222 bp, Homo sapiens
cgtctgtgatattggggagggccggcagtgacacggtgtggtgatggcgtggggctgctggcttctgctgggcaggatggcttaaccctgactttgggatctgcctgcatcggtgttggccactgtccccatttacattttccccacactgatctgcccgcatctcctctgtcgcgggtacggccttgatatcacctctgggtggtccgagcggaccgggta

SEQ ID NO: 632370 - DNA, 774 bp, Homo sapiens
agcttccttattccaggtattaggaataaggaagctggtaacagcatgtattcacaaattaattgttaatatttttcagtaagttacaataaactgttttgcatgcttgaaaaactgtaaagaaaaagaatatttataggaggattttaatagtttggttttagtttttttctttttgctttaaaaacaacccctaatatttatctctgacaacacagtggtgtgtataaagttcatttccatgcttatgacacaaaaataacgatcagaaatatcaatctatcagtgtcagctgatatatatccaattaattcactgcaggagggaaaataaaacaaatctaaagtaatcattaaagcttacagttcaagtttttttccttttccttttgttttctttttttctctgtgttcggacaacattttttgggggctttttgggtgcctctgtgtgcaaagctgatctccttagatttaatgggccctcccagcgaggatttgaaaggaacaccttgaagacgttctatatatgggcgtgtgctacgtgctcccgtggctctggtgtgttaagttcccaatttcactcctcgaatttgactccagctcgtgacgtggctcaagttagttctcaaaagttaattccacctttcttcccaggtgttcttgtgtccctccttcggggaatgggggcagccgttagaaaaattgcttgctgcacacccttttaacgggctctttgaatagctgcagtcactgcacttgtgataacttcccg

SEQ ID NO: 632371 - DNA, 614 bp, Homo sapiens
attaatgattttgatttggaggcctaatttgtcgattgtgaaagcagcttttagtttaacttattcacagaccccttataattaccatgtattttttttcttcctaaatatcttgattcatcttgtgaatcttacgtgcccgtaaagttgcgatgttgaatcggttctctattgttctggcagtgactcacgggtccagcattttttcataagtgatctttaaaatagttctccaggattttatggctcctcactcccatgtcctcagacccagcgtcatacacggtgtgaatatgtgcacagtccagaaattgagacatcctaccctcagttgaataatgtcccattcatgccaaccttgccaacacggagaggtcacagatgcactcgaagacctttatcctcccattcctcttgcccaagtcactacagttgcttctattgaagtcagtctttaagcaacctgtgttaaagacaccagcacttctgctagatgtactggctgtacctcgtaagtcatgtgcaagcagtgccctctagagagtcatcttattcggtcaactttagctgagactgtccatagacacatgctaggataggtctcactcggaggc

SEQ ID NO: 632372 - DNA, 165 bp, Homo sapiens
cattgggaaggggacccccgccccctgccctcccctctttgccccgtactgtggaaaaaaaacccgcccttagtctctaaagagtttattttaagacgtgtttgtgtttgtgtgtgtttgttctttttattgaatccctcccagtaaaaaaaaaattggttcttt

SEQ ID NO: 632373 - DNA, 233 bp, Homo sapiens
gacatttgatggctgctgacctgcttagggtggtggttgctgaaggtggggtgacagtggtaatttcagtgattttggtttggtttggtttctttaagagacagggtctcattctgtcactcaggttggagtgcagtggtacgatcatagttcactgcagccttgacttcccgggctcaagcaatccttctgcctcagtctttccagtagctaggaatatcaagaatcggcac

SEQ ID NO: 632374 - DNA, 308 bp, Homo sapiens
  misc_feature (83)..(83): n is a, c, g, or t
  misc_feature (103)..(103): n is a, c, g, or t
  misc_feature (161)..(161): n is a, c, g, or t
gcacgaggttctgcctgtacacctggttcctcttttaagttcctagaagatagcagtagcagaattagtgaaagtattaaagnctttgatctctctgataagngcatagaaaaaatgctgacatatgtggtcctctctctgcttctgctaccacaaagaanacccccatgtgatttgcttgaccttatcaatcacttgggatgactcactctccttaccctgcccccttgccttgtatacaataaatagcagcaccttcaggcattcggggccactactggactccgtgcattgatggtagtggcccc

SEQ ID NO: 632375 - DNA, 454 bp, Homo sapiens
tgggagaccacagaactcaagggtgtgtttctcctctttggggtcccctttaagtagtggggatatttggggacctgggagataacaccgagttacccaatcctttaccagggcaatggtggccatcaattccagttggaaaataatagaacaagactggaattttaatatgcttcacttaggctttcatttggcagtaagaatctaagaaaattcttggcctgtggttaaagtctctaaacccacgtggcgctcttcaagaaatttcaaggtttggggcactattggccacaaattaaagaacctttttaaaacggcataattggcgttggcggtaaacttcgggaaagaacactataagtcttggggagcaagagaaatattccttaatttatttgggagagaaatatggagaagaaaaatattttaatggcttggctatcaaagggtggga

SEQ ID NO: 632376 - DNA, 1357 bp, Homo sapiens
agcggagcacagaagccccgcctctgctggagaagccctgacacggaggcgtcgagctgcacctcgtgtgcataacgtctgggcagctgcgggcaggagcatgcgtttggtgaggcgctggcgagactagtccaccgctgggcatgagtgagcagcctggcgggccagcgcggagcgccaatgtagggtgacgctacgcgcggcgcgtgttcagtgcccagtacggctgctgtcggctacttgatggtgaggcgtttgcccttgcttgatcgttccgtctcgttctttggatgaacagactaggttgaaagagtgagagaatgggactttaagggttcctaatagccgtcgtaggggtgggcctgagttcgcaggacggaagaaggggtatggaagaaagtggggatgcaaagaccgaagaaggagagaaggtaagatcggatggaggcaacttagagacgaggggcttggattccctctgggcgtaaggaaaccaggagagagaagcaaggttaagaggcattgccctgcgagtttcacgcctgaaaacgttttataacaagggttatgcttccataggtttcccaaggtaactgcaccctattttttaaaaagttgggaaggttctcgcgtgggaatgtatgctggacccggggttccacccgggggtcgttggcaccggctaggattggttttatctcgggtggaatgtggaggctttccaagtgggttgtaggggggtttgcccctgttccccacgggattgaatagacacaggatttattatcggttttaaaggcgaggggaaaactagtgtggcgttttggtcacatttttcgaaaaaagaggaccgagtttttttgggtttccttttggggggcaagggcacagaaaagaagcgcgttaaaaaagggaaacaagggttccgctcctgtgggcgggcctaccccacataaaagaaggttcttgttggtatatatttgtgacaacgcgccattattaggaacaccacaggcttgtggcacacctttttggggcaccccttaagaagtgaggaacgcggcccgctgagggtgaactgtgtagtttgagggttttcacactttacagggggtaacgacaagacaagggctgggataccccaaaaatctgtggggaaagcatgttcgttgagaaagaggtttttgtgtggtgtatgcaattttcccaaagaaagaggcgtgatttttatcagggaggaaaataacggcctattaaaatgtttccgctaaaaattgctttgtggggagaacagaaaattattgttggcgtatagtgtggagaggcccctgtgtgcgctgtgaaaaagagaaatacc

SEQ ID NO: 632377 - DNA, 580 bp, Homo sapiens
ctgagccgtacgattgacaatgtctgtctgtcctcaggcgttagtcatcagtatggtctctcacagggctcttgtcttctctgcatggactcttgctgcgggaacgtcgtctgcttaatttgatgctatgaggcaacccaatctttcctcggatggcactgtaaaatatcggtccggaataaggacatctgtagcggactctaaatctacgatctcgacttcttgaacggatccgtcacctctcttagcttctacttcgctttctttcacggatttcgctcttttgcctttctctgtctctacttcgcttccgttccttacttttgcttctcttacgttcatgactacgatttctgctcttgattgtatgcctcttatagctacgttcttcatggccgttggcactgctcaacttgtactcatccttcttgtaaggagcctcaagcattgcttcaatatcaatatcgtctgccatttactctaaacgcctgttccctcgctcggtgctcgacagggagctgatctgactgcggagctcttgttccacttgtctgctggcttgcaggtcagcctttaactt

SEQ ID NO: 632378 - DNA, 302 bp, Homo sapiens
  misc_feature (107)..(107): n is a, c, g, or t
gactttaatcataaggaaatatacaaaatgcccagaagtggaattcagaataataaggaaagtcagtgagatccaagagaggacagctttctagctttaatctcccntggagagaattcatgatatgaatgaggaatttaacagagagatggatataacccataaccaatcagaaatcttagagctgaagaatttaattaatgaaataaaaaatactatcaggagctgcaacaacagatttagaccatgcagaaaattctagtttcttttttttccctacatcttttgaaatagcacagaca

SEQ ID NO: 632379 - DNA, 396 bp, Homo sapiens
tagaggatcccgcgtgtgtagagtggatccaaagaatcttccccgtgtgtgtaccctggtgctgagtgtgtctagtgatgcaggcctagggcagacctttgagcagagccagtgtgcccactgtgcttgcctatggtgcctctgaaggcctctgctcgggcccgtgtgttgagagaggagctggccctgtactggtaagctggtggaggagtcaacattaaccaaccagatgcgactagtgctggtgaagcgggaatcaggccggccgctctacctgcgcttggtcaccgatcacctgaggctcttcacgctgtatgagcaggtgtctgagagactccggaccctgccttgcactgtccccctgttgctgatccattcgttagcacaagcacacgc

SEQ ID NO: 632380 - DNA, 615 bp, Homo sapiens
ctctctcccggcgcccacaccctggtctgagcggcgcagcgagccgcggccgggcgggctgctcggcgcggaacagtgctcggcatggcatgggattccatgggctcctcttccctttctctttcctttctggctcttgtgctgttgggcgcaatgtgatgcgccttacatgtgccgccctgtgataaccccacgttgggccctgcattaccctgccattccccgttgtagtcctgttccatttggcgcgcccctatgggttccgttagcccgcattaccaagaagtattataccggcgcccatagtgacgccacggaaccgcattttgtgcggagggcccccggacacgggcccacaaatacgaggttcttcacgcgcacaaccgcgcttaacgattcccgcttgatacctgattggttcccacacctggacttggtgggtacacgccacccccggcctccaggtgctgggcattccaaccggctttcatacaccgcggggggcggcacacataccactatccgcccgaacgcccgatgtgacatgacgcccgataatagctcgcattctcttaacgcccggtccaacacacggcggcaaagcggtgggacccc

SEQ ID NO: 632381 - DNA, 424 bp, Homo sapiens
gcagttttgctcttgttgcccagcctggagtgcaatggtgcgatctcggctcacagaaacctccgcctcctgggttctagcgattctcctgcctcagcctcccaagtagctgggattataggcatgcagcaccatgcctggctagttttgtatttttagtaaagacagagtttgtccatcttggtcatgctggtctcaaactcccaacctcagatgatccgcccacagctgcctccgacattgttggaattacaggcatgatccaccgtgcctggccaaacaaaggcatttctatgctaggtcgttcttgttcctccacctgagtgagctggaggtttctacaagtttttatccaaatgggccagaggtttttctatctgtgcagccacgggcatgtccccaagcacaacaacatatgctagtt

SEQ ID NO: 632382 - DNA, 303 bp, Homo sapiens
gtaaattcacatccttcatttaaaacactcacaatagatttgaagacatactcaattaataaagcattattataaaccacaccaacatcatactgaataggtaaaagctggacagcttcctctatgaaacttaaacaagacaaggattgccactctcacccctcctaaatcacacagttgacttccagtaaactggaaatcctagccagagccatcacggcagagaaggacataaaaggtctcacaatgtgcagatagacagtaacactatctgtttgcagaccatatgattttatgtctata

SEQ ID NO: 632383 - DNA, 179 bp, Homo sapiens
cagtatactgtactgctgcgcgttcctgacacgtcagtacaccactatagcgacagatcgacgctttgtgaagggagggtgccagtagacaagacaccctagacaccctgagctgcttctaacctgggtacctgtgctcccctcagacccgagggagcttgagctccgtgccccgcaag

SEQ ID NO: 632384 - DNA, 663 bp, Homo sapiens
aatttcacctgaaggaacttgcatgaacaatacttcagtcatgatgtttaagaaaggggagctttgaaatcggaggagccatacatccagtggcaattaagtataaccctcagattcggtgcatgcacttttggaacagtagtaaattacaacatggtgaagctacctgctgtcgaagtgatgagccagctgggcgcatcagtctgtgactgtgtggtgacatgtcccccccaatgaccacgagaggaaggacgaatgatgcagttccagctttgctggaacagggctctaagtctgctatttgctactagcaaggagggcctgacgtgaagcttccctgggatggaggactaaagagagcaaaggcgagggacactctttaaggaagagacagcagtagaccaattacagcaacgatgattcgtggtgcaaagtggactctctcagtcgtaagaggtacggactgtacagtcgtttagaatctagaactagacccttagaaagtggaatggtctgtatgagttacgtacgtatatatcgtaacgcaggaattcatggttaatcttttctacagaatgatgtgtctctacctctttatgccagaggcagaacctacggtgcccttttggctttgctgtcgtcgtaacattagccccatggatg

SEQ ID NO: 632385 - DNA, 166 bp, Homo sapiens
tgaaggcgtggatatatggttgtcaccgtagagtgattctcagattcccctggctagcccaggcagagctgatggcccaaatagtgttcagatctccacataaggccttcccctaggacctagcccctccagttgttgactggtaagatctgcaaggaacccacgc

SEQ ID NO: 632386 - DNA, 295 bp, Homo sapiens
taaaattttttttttgttgagagggattttttttgttgccccggctggttccagggtcatggggtcaaatgggccccccccccccgcttcccaaggcccaggcccagttgtaggtttttcccctgcccccctggccacccagagggtttttacccctttaaagaattggctttcataaattgggtttgttggggggcaagtttttttaactggaaattgtaaattcccccccaaatgttttttttaaccgtttccataaacttaaactcccaaaaaggatggtttttgggggcca

SEQ ID NO: 632387 - DNA, 391 bp, Homo sapiens
  misc_feature (291)..(291): n is a, c, g, or t
ggaacctctcagacgatgccccccagtatgggaaccagaacctctcaccaaccagacacacccggtgggggcacagcacagaccccagaggcaggaacctctcagccgatgccccccggtatgggaaccagaaccttccaccaaccaaacacacccggtgggggcacaggacagaccccagagccaggaacctctcaagcgatgcccctcagaaagagcaccccatattcaagtggcgggccctcggaggacaagcgcttctcggtggtggatatggcggcccttggcggngtgctgggtgcgctgttgctgttggctcttcttgggctcgccgtgcttgtgcacaagcactatgggccccggctcgtgctgctctgtggattcggagccc

SEQ ID NO: 632388 - DNA, 123 bp, Homo sapiens
cctataccaggtcagcgtgttgccgatcagccgcgtatctgcgtttgccacaggtgcgacagatctgctggtcgacctcatgccagctcagcagcaataccgacaacggcgtcagcaccagga

SEQ ID NO: 632389 - DNA, 389 bp, Homo sapiens
gcaattagatgctatgtcatagacatgggaggaaatgaaattaacatatatcaaaccttaaactaaaccgaactaagttatgccatgagaatgcgtatgtctagaaacgatatcggcacttcccaataatatgcatcccctaccctatatgcctataaaatagtggtaaaaaaaagaaaaaaaggctcataaagctgagcaccttaaccatttaataagcgtatggtagtgtagactatatttgcatagttgcgcagctccaccattcttaaatatatgtaagatgatgttgctgtactcttttccaccagtaatataaatgtagcccagtaatcagtaaaactatcctttcttagttactctaactgatatgcccaagtgtctaccag

SEQ ID NO: 632390 - DNA, 541 bp, Homo sapiens
gaggagacgtgaatggtgggtagtacggaatgagcgcatctgatccgcctgccctgtcaggatgagagcgagagaggagcacccatggcatcgtaggctcgaaggtgacgcgtggattcctggatcagtaccagtcctctattggacgctggaactttgagctgagaaggtgtggtccttctctatcctgagtacttctgcaggaagaggagagattggtgggctgtgcctctgtggagggaggttagcaggtcatgggccaggcccgggcagtccctcccccgttgttgtccctccccactccatctgttgttgtctggtagtcctggacgtgtcctaacttcttgcagaggctgtgaggattccggagtttccccacacctccgggccttggtccttgtacctcacctccttggactgctggctggaggcctggggaggtggggcatcacgctctgggttcaaagggcagagcagggaaacctcagagctgggttacctgggtgacaggtggggatgtgcttgaggtagggggcaggct

SEQ ID NO: 632391 - DNA, 243 bp, Homo sapiens
cagcccatggtgcagccggcgacctcttcattcccatgcggttggggactcatccagaagcatctgaagaccagggatcacaaccggaaccgcaggctcatgatggagcagtccaagaagtcctccctcaggggggcccgcagtattctcaacaacaagctcatcagcaagaagcgggagcgctacctgaggggcgagaaccctttcaccgacagccctgaagggagcccaaggggtaccgag

SEQ ID NO: 632392 - DNA, 134 bp, Homo sapiens
tagacagaaatatttttgtaaggttttggggcagggagggagcattaaggacgaggaaaacttgaattccagatttttaatgcaaaggatttatcatttctaccagaaataaacgttttaagttttttcttgga

SEQ ID NO: 632393 - DNA, 377 bp, Homo sapiens
  misc_feature (28)..(28): n is a, c, g, or t
  misc_feature (52)..(52): n is a, c, g, or t
  misc_feature (79)..(79): n is a, c, g, or t
  misc_feature (88)..(88): n is a, c, g, or t
  misc_feature (125)..(125): n is a, c, g, or t
  misc_feature (353)..(353): n is a, c, g, or t
  misc_feature (355)..(355): n is a, c, g, or t
tcaaattgaaaaacatcaacattgcctnaaggctcctgaaatgcgcgtgctnaagtctgccctattccttcctcggtgncccccaggnctctccgcttattttaagatagagctcatcggttgtnaaaatgctactgtgggccgggcgtgggtgtcacgcctgtaatcccagcactttgggaggctgaggtgggcggatcacgaggtcagatcgagaccacagtgaaaccccgtctctactaaaaatacaaaaaattagccgggtgtggtggcgggcacctgtagtcccagctactggggaggctgaggcaggagaatggtgtgaacccaggaggcagaacttgcattgagancngccactgcactccagcctgggt

SEQ ID NO: 632394 - DNA, 591 bp, Homo sapiens
tttttttaaaaaggcaaatgctaaggtttattgattacattttgacgctaagtgaacttaactagtataagaactaaagcataccgtcatgtttaaaaaatgaagctatttttccattggagagattttggaaaaatataggtctgaactctggggcatgcatggctgacttttcaaagcttcacaagtgagtttccacacagtcgtttgcatcacaatgatatagattgataccttcaatcttatgcatcaacagaaacacggctggaaggacatcaattgtttatgaaagataatcaaagaagcctattgtggcgaatgttttttaagggatcctagggagatgaataacgcctgcttcttcatgggttgacaatgtatggctgattagggaaggtgaaaccacacttatctgatgatcttaccgaagggacacactcgagttgagggacacggtcctggtcactgctgtggtatgttaatgcggcactctggatgtgagcgtagcgacttcttccttaatagatgcacgctacacaggggtaagtgtgcatgacatgaacgagcacatcacatgtctcatgtagcgga

SEQ ID NO: 632395 - DNA, 1370 bp, Homo sapiens
gcagctccgagcccccgatgctgggtcacggagtatgctgcttgagaagcgaggctgtggagggcagaccggcgaggaggactgcgttcggcctggggggactgggttggactcacacaccaatgccggtcatcctccagtgactgcggtgtggagcggcttctccgagcctgcgagaagtctggtagcgcgcccgttgagctgatgaagctgcaatgcaacgggcctgcgggtcgccaacacgagccggtttcacaccgtcctagtccccgggtagccgggcgccgccagtgcctgcgggttctgcgggcatcggcggtggctgcgggagatgccggccggacgctcgggggcgccgctctgtgtcctgccgtatgcatccgcgcagaccggctcggtctgatgtgtggtggaatcccgtgcagtgagtacttacccctattcccgtgtgatcatagcgctgacgcgcagcgcgccgtgcctctgtaggtcaccgagacccggtgggttcgcccacatgcgttgcccagtgcgggcccgccaggagcatgcgttgggaagacctgcaaggcacatcagtacctccggcagaggaagacctcgtgaagcgagttcatgactggcagtgaagagtgatgaagaggggaaccgagtgggtcagggcatggggtacggaaaccgtttcacccagagttcgtgatccaaggggtgtttcagaacccttcttggtcaccaaacacgtttgcatcaggccccaacacgggggttcaccacttggtacgtttgctagagggctgagagacagcaatggggccattacggtgacagggaacacatggcagagggaaccaggcatccccttttcacgaaagtgcgttgacaggcacctggcgaggggagccactggcacccgaccacaaggggacaacgcgccccccggacctccacgttacacacgaagacgaacgagttcgacaggaaaagacgacacagcacacaacgagggatgcacatggagacaaaacggaacgtcaagatgttcgagtaatcaacagaggggggaaacgccgcaaaaacctatcactttggtggcatatgacgagagtacacttaacaaaggcggaacatggacaataatagtcttgcgccaccatttgagagggagaaagttatcaacagagcagcttaaggcaattacgaagataacatgggaggaaatacaataatgacggaggagtaccaatacaagataacgacttgaaatgggacccgagtaaacccaaaacaattggggagcaacacttataggaaaccaacgttagaactcattgtctagggatcacatagaaaagcagacagaaacaagagaa

SEQ ID NO: 632396 - DNA, 215 bp, Homo sapiens
  misc_feature (7)..(7): n is a, c, g, or t
  misc_feature (178)..(178): n is a, c, g, or t
tggctgnagatcgcgagagagcggccggaggcggcgcggagtgcagtggtctgagaggcacttaggaggctgctctgctccgcattgccagctgtcctcccggctgatctcccactcccagcaacaagctccttggctcagctcctgctgcgtatgtagaccccgaagtttctgcaancaagctcttcagacccacatcgcttcttccagtgact

SEQ ID NO: 632397 - DNA, 214 bp, Homo sapiens
agcagctacgcgggcggtccggtgctgtatgtgaggtcaggccttccagtctctgactcttacctgaaacacgtgtccacttgtctgtattaaggttgggtatatttgaatttctggcttctcttttgtttggactctgtttgtcttgcttgttctgttttttctttcctcccttccttgccttcttttgggccacctgggctttttttttttt

SEQ ID NO: 632398 - DNA, 159 bp, Homo sapiens
cgatgttgtgcgcagcgcgcagcgactgcgcgccgtcgagctcgaggtgcacctggatgaaggtgcgcgacccggcggtgcgggtcttgaggtcatggaaccccagcacgccgggctgggcggcgatgatcgcctcgagctcggcgaggagtgccgggt

SEQ ID NO: 632399 - DNA, 522 bp, Homo sapiens
ggggacagagtcttgctgtgtcacccaggctggagtgtgatagtgtgaccacagctcactgcaacctccacctccagggctcaagcaattctcacgcctcagcctccagagtaactgggattacaggtgtgcatcaccatgcctggctaatttttgtatttttaggagagatggggtttcgctatgttggccaggctggtcttaaactcctggcctcaagtgatctgcctgactcagcctcccaaagtctgggatcacaggtgtgagttaccactcgtatgtacttcagttaattcccaaagagcccgtattctcttgcccttttctgccatctcacccacctcctttatcctttgctgtcatccatctctggtgtccgtaagaagctcactggtcccagtggtgggttggttttagatgttgaccaatgacgggtacagaggcttttagagaatgcagaccgacctcctattccattcttctccccttctgtcgtcatatcgcacccgtatagtagtagta

SEQ ID NO: 632400 - DNA, 105 bp, Homo sapiens
attcgcggccgcgtcgacaactggtgcaacacgcggtactggcgagccaagcagtcgccggctgtacccgacaccccgcccgaggcaactccggcggggtgtttt

SEQ ID NO: 632401 - DNA, 416 bp, Homo sapiens
  misc_feature (14)..(14): n is a, c, g, or t
  misc_feature (24)..(24): n is a, c, g, or t
  misc_feature (52)..(52): n is a, c, g, or t
  misc_feature (55)..(55): n is a, c, g, or t
  misc_feature (62)..(62): n is a, c, g, or t
  misc_feature (68)..(68): n is a, c, g, or t
  misc_feature (70)..(70): n is a, c, g, or t
  misc_feature (105)..(105): n is a, c, g, or t
  misc_feature (113)..(113): n is a, c, g, or t
  misc_feature (127)..(129): n is a, c, g, or t
  misc_feature (164)..(164): n is a, c, g, or t
  misc_feature (168)..(168): n is a, c, g, or t
  misc_feature (272)..(272): n is a, c, g, or t
  misc_feature (274)..(274): n is a, c, g, or t
  misc_feature (292)..(292): n is a, c, g, or t
  misc_feature (381)..(381): n is a, c, g, or t
  misc_feature (392)..(392): n is a, c, g, or t
  misc_feature (394)..(394): n is a, c, g, or t
  misc_feature (396)..(396): n is a, c, g, or t
  misc_feature (399)..(399): n is a, c, g, or t
  misc_feature (411)..(411): n is a, c, g, or t
  misc_feature (415)..(415): n is a, c, g, or t
agcagcggctgctngtccaaggtnccgcggagtcggacgcaggcagaccatngtnggacccncggttnanctcgggtggccttaacagcagggctggttggcttngaaccgcngtgcccagatggtnnnttcctgccctgtggcctgctgcctggaccccgganggangccagctacagctgctgccgtccccttctggacaaatggcccacaacactgagcaggcatctgggtggcccctgccaggttgatgcccactgctctgccgggcnantcctgcatctttaccggnctcagggacttccagtagctgccccttcccagaggccgtggcatgcggggatggccatcactgctgcccacggggcttccactgcagtncagacgggcgntncntgnttccaaagatcngggna

SEQ ID NO: 632402 - DNA, 105 bp, Homo sapiens
cgggccatcatctgtgaaccttgtcttgaggtggctggggcaggaagctgaagtcgaaaccagcgctgggaggaccagtgcggaccagtgaggtccacggagggc

SEQ ID NO: 632403 - DNA, 731 bp, Homo sapiens
gcctcttataaaatctcattcatttccagagagttcaggacaacaaaatccaaaacttatatgagaaacatttaagacacctttaagtgatggctgaagaacacatatagacaacaaacagaagacctgaacaaacagaaacaggagagttcttactacaacatgttaaaactcaaagccaaaatcaacacataacagaggtggcacaccggccatgccattacaaaaaaacacatgaggaggtttccctatctggaatcgattcagaatgcacgtgtggttcaacccagcccaggctctcaaagtaatgctcggatactaggagtgtgttctgataaccaatctccacaacatcgcagaaacagtcgctgccaagaaggctccaccatgtttagcagttcagacaggacaaagataaggcatgacaacacggacgttttacaaagctcaagggaccattatgcaatccaaaatcagggtggcgcacatgcaaccaaagtcaccgcaggaattgtagtaccaaaagagaaaaagaaggaagtatgtggagacagttggattgccccagagcaaagcaatttccccgatttcaaagtagaacatcaaattacaatttagatagtacatgaatggaatgaccacgtttgagtcataaaaggatctggtttgggtcaacagttaccagaaaatttgaaagaggaatggagacatatggtgatagattgtaagat

SEQ ID NO: 632404 - DNA, 318 bp, Homo sapiens
agaggatccccgcatttcgtagatcccacttattttttattttttttattttctgagacagagtctcgctctgtcgccggggctggggtgcagtgatgcaatctcagctcactgcaacctccacctcctgggctcaagcgattccccgcctcagcctcccgagtagctgggactacagttgcaagccaccatgcccagccaatttccgtattcttagcagagacgggtcctcaccatgttggccaggctgcagtccaggctggtcttgaacgcctggcctcgctggtcttgaacgactggcctcaagtgatccactca

SEQ ID NO: 632405 - DNA, 274 bp, Homo sapiens
aatagaggtggatggagggaagcaacagacacatctggtggttaccttcgggtgctgacagcgggaacccaggagattcggggtgtggacgggcccccatctatgcacagcaggagagtaccatggctgacactagaggttgcagtgagctgagattgcaccactgcactccggcctgcgtgacagagcactctctgtcccaaaagacaaatcatcaagaaattgcataattagcctgttgaaagccgcttttagtaacaaactttaccccctg

SEQ ID NO: 632406 - DNA, 781 bp, Homo sapiens
ccacatcgatcctctcagctatgacgtcaagcctcggggagacagccagaggctggatctggaaaacgcagtgcttatgcaggagctcatggccatgaaggaggagatggccgagttgaaggcccagctctacctactggagaaagagaagaaggccctggagctgaagctgagcacgcgggaggcccaggagcaggcctacctggtgcacattgagcacctgaagtccgaggtggaggagcagaaggagcagcggatgcgatccctcagctccaccagcagcggcagcaaagacaaacctggcaaggtagggccggagtggcttggggacacccttaggctcagtgactgcccagtgaccactggccacacctcaccgccctgctgcctcagttcttgtatttgcataggaaatgcaggccattcgtaggtatctaagaaggtgacattttgagtgtaatgaaaccaggtctacattttagaaataccaaatctcactttatgtaatagttgaaccttttcacatatcacagtcacatcagaggggtgatctctgcaggtgtccactgattctggtctccactccttcgggtaatcctctgtccacgggaggctccttggtgggttttggggttataggggccccttttcccatgtggttgttcctcccataatgtggaccccggttgtgtggcccttatttaatgttcccagtatgatacaaaccaacgggggggggcagcggcacagtaagtattatcgaagtccgtcgaggggacgt

SEQ ID NO: 632407 - DNA, 989 bp, Homo sapiens
  misc_feature (156)..(156): n is a, c, g, or t
  misc_feature (173)..(173): n is a, c, g, or t
  misc_feature (228)..(228): n is a, c, g, or t
  misc_feature (319)..(319): n is a, c, g, or t
  misc_feature (989)..(989): n is a, c, g, or t
aaaaacaataccgaaccggaaaagggcctattctcgggctctcggtctgtgcgccgcacaccagcccgcgcccctctcgccttgcatccctcgtccgctttaccacgcattaagtgattagtacaaaacacacccccccccccacgccccccactncccgaaaaccgccaacnacagcaagaaacaatataaagaacaacaacctaccaaacaacacccaccaaaccnccaaccactcaacaccacacgaagagctccacaaacgccccagccgcttaaatcaacgcatgcatttctaccaccctgcccctcccacgtntcattaattctaggtgtgcgtcttctgttattcttctgcttttttttctttctgctctgattaattatagaatttgtaacatgtcgtttctctggcgtcgaacggtcgggcactgcagagcttcattttctttctgcctccttctcgtatgctgttactcgatggcgtctctcgtgtatgaaaagagagtacacaacagttcacgtagtgcagtgcgaagtgctatctcactcggcgtgagtttgctacttcacattccatagttgtcttaactatagatttgtgatttagttaagatcgcgtgtgtgagattgttaatatcagatggaatgagacgtgtctggttagatgtagcgaggtcagtctgtctttgcgttctgttctcggtagtatgtttacgcatattcactagaattagatattcgtatcactatggagttacactattcgtataatagtatagaagtgtatcagtcacgtagatgcctgattgaaatcgtgcaacattttatgccactgactatttctgtctttaatctattttctctctttcttactttatcatctacgtcactgtaggcatctgatacgtcatattattaatactagtttccgtacagcgtacaagcgttcgtacgctacagaagggagtgttgtctatacgtgcggn

SEQ ID NO: 632408 - DNA, 1143 bp, Homo sapiens
  misc_feature (1114)..(1114): n is a, c, g, or t
cctcccttcaccaagccgaagagaagccccatgcacctcgaccaaatcaagtgctataccaggggattcgctttgcacccttgacactgactcatgagcctagattaagacgacaggaaagtctagcgaatggggctggacgatcgtggattaccggaacctgccccacaggccatctcccgccaaaaccaataaagagagagccagaggggaccaccgtggatggagaaacttttgatgaattgaactacatagcttttctaagcaggttaaaaaaaaaaaaaaaaaaaaaaaaaggtagggttttcggaataatatggatcccttcagattggaattaaacgaaaacgacaacactccccagttttggggatggggggaataccttctaatggagcactataagccaaaccagggccaaaattatgcgatatggggtcacccagtggatcataacgtaggcgctggaaattcactacacatattttctgccctggaggtggaacatttttacgagggaacgggttatcgccatcttttaaccctaaacccacctggatttttctgggtaacgacaggggccagggaaccaaggggaacgggacaaatggagggtcaacccagaaacaaaccaaatttttccaggagcacacgataacagctgactggtgagctggatatttcccttctggggtggagggctggaaatatgggccggacagggctctgggtaactggatcttggctcttcaacacattcggagatcgtggcccaccataacttcggcattaaattagcaaatattgggctcaacaaatatcattgcaggtggatataccgaagctgcggggggaggtaaggtggcatcataacagagaagcttacgttattttcccccttgttttttggatgtccccttaattttgggccaggaggtacctaatcatttatcctggtcagccgggggtacgatttaagatcaatcacagacaaactgggtctgatcatggcacaagctaaagactggtgtcatctcagaacaaagatggatacggaacaagatcctgtgcgtataaccaatagcaacatgggctcacagccagggtacattanatccgcaagcacctccggggaacttaaca

SEQ ID NO: 632409 - DNA, 97 bp, Homo sapiens
ctgcacagtttccagctagtcacccacaccagagaagaaataagacagcattagaagaaaacaggagagaaagaacatttgtgaactgcagctgtca

SEQ ID NO: 632410 - DNA, 168 bp, Homo sapiens
  misc_feature (44)..(44): n is a, c, g, or t
  misc_feature (56)..(57): n is a, c, g, or t
ctgaagcatcctgagccgggggctgagcataacgggctggaggngcctaatgatanngggcgagagacccctcagcctggtccagcccagtgaatgcatgccccagcccagccagctacccaacccctctctgtgtccagccggagggacctaagaatgactcccgaa

SEQ ID NO: 632411 - DNA, 367 bp, Homo sapiens
tgaggatccgtgtagtctgctctggggggcagtggccctgaccgagacctgggcggctccactccatgaggtatttccacacctccgtgttccggcccggccgggtgagccccgtttcatcaccgtgtgctacgtggacggcacgctgttcgtgaggttcgacagcgacgccgcgagtccgagagaggagccgcgtggcgcggtggatagagcaggaggggccggagtattgggaccgggagacacagatctgcaagcgcaaaggcacagactgaccgagaggacctgcggaccctgctccgttattacaaaccagagcgagggccgggtctcacaccctccaggaatatgtttggttgcggaggtg

SEQ ID NO: 632412 - DNA, 192 bp, Homo sapiens
  misc_feature (40)..(40): n is a, c, g, or t
gtgagtgtatgtgttgcacaccctttgaaggaggcttaangaggccacctccatgtgatggagctcagaatgggtcagggagaattggtaggagaggtgtaggaggctgagcagagtcacctccgagttgtgtccgagggctgcgagtcttcagtacttgtccctcacaggagctgttctcagggctgggtc

SEQ ID NO: 632413 - DNA, 805 bp, Homo sapiens
  misc_feature (105)..(106): n is a, c, g, or t
  misc_feature (109)..(109): n is a, c, g, or t
  misc_feature (115)..(115): n is a, c, g, or t
  misc_feature (306)..(306): n is a, c, g, or t
  misc_feature (635)..(635): n is a, c, g, or t
  misc_feature (747)..(747): n is a, c, g, or t
cggacgcatcatggggttattctataagttcctgggcttttacttggatatttacagaggaagttaacttaatttctggactggggggggggggtgacattaaannacntgatangacagttaaaaaaaaattgatagtcattctctgatggagtgaagcaagctttgtcaaccatcaacaaatatgacttcattggtcacaagccctgcagagatccaacaagatttgagttgggggggcagaacatatttcagacaaaaccaacaaagtgctgatgtatgaatggaattgattgctgaaggcanagagtataaagaatctcaagaaacttttagtgccattttcatttaataagccattggtatagcaacctaaaaaccttggctgggatgacaccaggatgtgtttatggaattgctgcaggaaaacacaattggcaggtggcatcctctgggtcacaggaccagcttctccaagagacttaaggctggggtgtggtacgggagtatttcttgccagatgggagctctttggtgaagactcctttcgggaaaagttttttggcttcttcttcagggatggcggggaaggaccatcacactatccccatccttccaatcaactgggggggggnacctttttcttggtggcaggtagagagagaggactaccctgagaatctcatcaaagtcctggccgtggtagcttggtaaaggaaaaacaacttcagtgcttatcaggaccanaaacaacgccccacgagcttgcgcaggggtgccctttgtatgcttctttggtgggagc

SEQ ID NO: 632414 - DNA, 343 bp, Homo sapiens
tgcatgccctgaacccctgggtgggtggcacagcatttcccccgtgtaaccttcctctgtacacaggacatgcacacacaagtaacattgacctgcatggacaggagccttgacctggcgtgtgggaattgaccgccatatctggctgttgtgggtatccccctggcaaggccatctaggcctgtggttccctgctccgactattagggctgcctccctgagctccagggccagattgcctgtatgcctgggtagccagtctggggattgggctgtatggcgcatccaaccagtttccattgtggtctaactgcatccattgccaccttctgtttgtgacctt

SEQ ID NO: 632415 - DNA, 1311 bp, Homo sapiens
tacgctttgctcaagaaaaaaacaaaacaaaaaaacaaaagaaaaaaaacaacggtggatgccttcgcactcaaggccaacttttggttacagattaattatttccagtaagaaaccatatttggaaccaagtcgagtaagttttaaggtttggcttcgcttctaagatgtaagagttcagactcacgattctattaaaatttagcccgtaaaatgacaagccttctttaaagccttatttttcaaaagcgccccccccattctggtcagattaagagttggccaaaataccttctgaactacactggcattggttgtggccgagaacaccgagcactggaactttggcaaagaccttcgtctattgagaagacggtagctactggcagttaggaggtgcagacactggctctcctaatgtagttctcagaatgcgtaaagcagaacagcctcccgaatgaagcgtggccattgacctcaccagtgagttagcagcacgtgttcccgacataacatggtacggtaatggagtgagcgtagcagctcagctcttggggatcagtctatggggattcatagcgagtatctgacagattatgggagcattttgacacagaactgcttattacctctaatgaagaaatctgtgaaacctgtggtttcccggcgtggtgggttggatcacggacacgcacggatttggacaatacgacggggcacataccctactcgtccgaatgtacgtccggtaaactcaaggtcattcgccactgtcatataagaccggaacagaaaatacaacttacgacgcccaaggatatataagtaggcacaaaaaaatataccctgtcttttctgttcttccttctgttcttgtatttgtcgtttatgcaaagagcagaaataaaagcaactataaaaaaaaacactagcagaagaaagcaagacagacaaaaaacaaaacaaaactgaaaacgaaagaagaaaaggagaagacgagaagagacaaaaacaaacagaacaaacagacagaaacaacaggcaaaaacacgaagagcagaaaaggaagagagaaaggaagcaggaggaagacaagaaggaggaccgaacagggagaagagagaagccgaaaaagcaaaagaaacaagaagaagaacagagaacaagaggcaaagcaaagggaagaggagaaagaagcacgagcaggcaagcgagaaaggaaagaggaggagaaagaagcaaagagaaacagaaaggaaaacaggaagaaaaaaagaaacgagaaagagagggagcggacaaagagcaaga

SEQ ID NO: 632416 - DNA, 598 bp, Homo sapiens
tcgaggaaaaacggcccggaagatgggctatgagattaacaccatttgatggaagccgagatattttggggacacctgaggggggacagaggggaggaggaaacagcaagagggaaaagagggagacgaaaggatgcaagagggggtccgcggggaatgaagacataagcgcagagagcaagacgactgtggagcaaaacgtaagagagatcacacaggggaaacaggatataaaaggtagaacagggcccaaaagggaacaaagacagaggagactagggccagcgcataggggtaaagattggaattgactccgaggatggaacaggaaacatggagaaagagtatgacaggtgcaataggacacgaagagcaagatgccaaaaccttatggaacaggggggggagactactaaaagaatgacaacaggaacaagaacaacgctggaccgaaggaaagggagccaatgaatgagtgaagcaatggagaactctggagggagcatagagcagaacgctatgagaagggggagaggagaagccagcaggatggggcataagaggagagaaacagatggagaaccaatggagaaaaaaa

SEQ ID NO: 632417 - DNA, 294 bp, Homo sapiens
gtttggcaagtcaggtaaatgccaggaacatatcccaactcaacaaatctatgtaactttatggaggtggaagctgcgttagttcatgctaggtggctgtagcaccgacctcatgtataaaacgcaaaacactttaatattaggatctaggtcttaattgcaagctatactgaggattttcatttattatgtattggatatactttcattccaaaagaagaggtgaatggatgatagagttacagcaccagtctataatcagtgaacgaagtatatccttggcagatacatacc

SEQ ID NO: 632418 - DNA, 765 bp, Homo sapiens
gagcgggcgagctccagccggagttacgtgacctacgtccacccgcacctacagcctgggcagcgcgctgcgccccagaaccagcgcagccttctacgcttcgtccccggggcggcggtgtattgccacggcggctcatcatgcgggtgcgccttgcgggaagcagggtttgccggggggtgaccgggctccatgcaagggaccctccgggtggaacttttcttcggctgggaccgaagggccatttcaaaccaccgcggagttttcaaagagaaaccaaccggggaaccaaagggacgcacggggtgggcagctgcgcacgggacggtgtggatgtgggacccgggtttaccggcccaaagcagaaacatttgcggcacaaggtggtggacggcatccccgtggcaacggcacaggaacagaatttcagaggcatccccttgtgttggggcccggaaggcctgcacggaagccaagtctggcaacgagggcgcccaaggggggcaacaggctacggagcgccagtggggggggcacaccctgtcgataaccggaggggacaacggaaacgcaattgccagagtgaacgcctgtggccgccccggggacagtggggtgggaaccccagggtgtaacacgccataagcggcaaagaaaagcgccacaggaggatcagaagggtggggtacacacggcgacgcacctctgggcacccgagggcaaccattcaggtggccgccatccggggggaagaacactgtgcag

SEQ ID NO: 632419 - DNA, 416 bp, Homo sapiens
aaactcccttgctttgaattggcaccgaaaagtgggaataccggggagttgagatctgtaattcatagtcacacaagggtcatcaagaccaggaaaaacaagaaagacatactcaatcctgattcaagtatggaaacttcaccagactttttcttctaaaatctggatgtcattgacgataatgtttatggagataaggtctaagtgcctaaaaaaatgtacatatacctggttgaaatcacactattccatacacaccaccatatatactagctgttaatcctatggaatggggtattgggagtgcttttttaatttttcatagtttttttttaataaaatggcatattttgcatctacaacttctataatttgaaaaaataaataaacattatcttttttttttcacaaaaacc

SEQ ID NO: 632420 - DNA, 482 bp, Homo sapiens
  misc_feature (66)..(66): n is a, c, g, or t
atgaaaatacatgacatgatgctcgtcctgcaagggcagtggaagcgcctgtgcccagtcccacgnagatgtgaggtggcccggggcaaaaacatcctcagaaatgccctggtatttcatttagatggaactactcctgtgtgtgaggacattggacgcagcctcctgacctatggccgccgcatccccctgggtgaatgggaaagccggattgcggaggtggatgccagtgtggtacgtgagatttgctccaagtacatttatgaccagtgcccagcagtgggtggatatggccccatttagcaggtcccagactacaaccggatccgtaacggcatgttttgggtgcgcttttaggcgggaagcctatgtaagcaaaagggcagggccggggtttgtggtccccccccccccacaaacaaagcaatttgggtcctttaacctgtgccacaggtgacccccaataaaatcctttggtgaga

SEQ ID NO: 632421 - DNA, 399 bp, Homo sapiens
cactgctgaccccatttctccacatcttcatcaacaagttattttttgtttatattataatatctgtcctagcaggtatgaggtgacagctcattgcggttttttgggtttttgttttgttttgctgagacagggtctcaactctgttgctcaggctggagtgcagtattgcaatcacagctcactgcagcttcgacctcctgggtccaaatgatcctcccacctcagcctcctgtgtagctaggactataggcccaagccaccatgcccggctaattttttgttttttctgtagagatgggggtctcactttgttgcccaggcaacacattgaggttttgatttgcatttttctaatgactagtgatattgagcatcttttcatatacttatagtcat

SEQ ID NO: 632422 - DNA, 833 bp, Homo sapiens
  misc_feature (354)..(354): n is a, c, g, or t
tcttgtcgtgcaggcggttcgccttgcaacccatgtaaatctgcctgaagtatacgccggatcatgctgcgataaagcgcgataaccctagctggttggggattaatactcgtgaataaacgaaggtgttgcctgcgtggacaaattaaacggcactttgtcagcgggtttaaatttcagctcaattttaggcgtggggggtgaattgtaaaggtgcctttgtcaatcttcgggcaaagtcaaggcaaggcaaatcggaattcctgaattgagtgtgtgaggttttgtctgggttttcccaagaaatctcgagttataccgcctttttatacaaactggcgccacaggttttgncgccctcaaaattaaaacctcgtttgtgggcttggtagacggccttcacgcagtcaacattgttggtgtctcaccacttgaagcatcggacggattggtttgtcacgagggttaaaagcccttggtgggggacacaattttataaaagagccacaaattaaaacccgggttaaataacaccggaagcctttgtggaaccaggtttttggcgacggagacttttggtgccgggtgtggggcattttatattttcacatcttttaaatattcctcctctttcccttgtgggaagagttttaaaagaaggttccattaaaattccttagaaatttcaattgccgcagaatttgtggagaggggaagtgcgcggaaagaaggccgggagaattgtgagatttcccccacagagggagaggctttttaacgatataaagagtgaaaggtgggaaaagttgggggggttttgaagacgggaaacg

SEQ ID NO: 632423 - DNA, 794 bp, Homo sapiens
tgtgctattattatttgaacaaactacatcttaggtcatttaagaataagaaaaataaaagtttttatttaccttcacttactccttcttgatgcttctcctttgttgtgttgatccaaattctgacctatattcttttccttccctccagagaacttcttttaatgcttctttcacaggcatgtctactggcaactaattctcttaatttggtttgtcagagagtctttatacttctacttatatttctatttgcagggataatgttatgtactttataattctagttgatgacactttttttctctctgtactttatttaatttattattatatatttatttgagacagagtcttgctctgtaagcctagggtggaacgcagtggtgtgatctcagttcactgcaacctctgcctcctaaagttcaaacgattcttgtacctcagcctgtctgagtagctggtatacaggcacatcgcgacacacccagctcattttcgtattagtggagacagggcttcaccatgttgcccaggcttggtctacgaattctcgatcctctaagttgatctactcgccctcagcattctcaaaatgctgagattacttccccgtgctccggcactctcttgtactttaaacatttcagactatactcctctttcttgggttcgttgtagtatctgagaaataggatatacattccttttggatcctcagtacataaggctgactcccccaattctggattcattccaacaccttatacatagtccgctatactgaaggttga

SEQ ID NO: 632424 - DNA, 410 bp, Homo sapiens
  misc_feature (346)..(346): n is a, c, g, or t
  misc_feature (380)..(380): n is a, c, g, or t
  misc_feature (406)..(406): n is a, c, g, or t
tcgcttcgcggggccttgcggcagcatggcgaaccatctgatcagtggcggcaccggctacgtgccccaggactggctcaccgtgcagcagctcttcctcggcgccaactgccgcacccacaacaacttcctgattctcccatggttcatagatttcatagctgatgaggtagacctaacttcagccctgacccggaagatcatgctgaagacaccactgatctcttcccctatggacactgagacagaggccgacatggccatcgcgatggctctgatgggaggtattggtttcattcaccacaactgcaccccagagttccaggccaacgaggtgcataaggtncaagaagtttgaacagggcttcatcacggacccncgtggtgctgagcccctcacacactntggg

SEQ ID NO: 632425 - DNA, 1527 bp, Homo sapiens
cccacgcgtccgaggcggtggtggtggtagcggtgtgacaggaggcctatggcagctgcccagtcctacctcagcccatcttgaaaacaatcttaggcaacatggaaccaccacgaggccctcctgttagtggggctgagccatctcgggcagttggcactgtcaaagtgtacctgcctaacaagcaacgcacagtggtgactgtccgggaaggcatgagtgtctatgactctttggacaaggccctgaaggtgcggggtctcaaccaggactgctgtgtggtctacaggctcatcaaaggaagaaagacagtcactgcctgggacacagccattgcgcctctggatggtgaggagctcattgtggaggtcctagaagatgtgccactgaccatgcacaattttgtacggaagacattcttcagcctggccttctgtgacttctgccttaagtttctgttccatggattccgctgccagacctgtggctacaagttccaccagcattgttcctccaaggtccccaccgtctgcgttgacatgagtaccaaccgccgacagttctaccacagcatccaggatctgtctggaggctccaggcagcaggaggctccctcaaatctctctgtgaatgagctgctaaccccccagggtcccaggtagggatgtcgtagatgaaaggccagggggccagtgaaagaaggattggaggaccctgagagattatactttcgtttatttgtttacgtgataaatactattgagtacctacaagtgttgaatatgggcatgggattgtgggatcattggtaaggcacccagtcactccaggtttcatttttttcatctgggaagaggggatgagattttccctagtgggttctgaagaggattaagggttgagatatttgcaatgcttaaagcaagatctgatacagagtaaataacaagtgttattcattacaagtgtatatataaaatcatctagtttgttcatttcttccagtataaccacaccccagtcttttctctttgaaataaatgttactgtatcagaaagtacttttatttcacttatgttggatatgatagcatatagttttgcataatatataaaaagtaaggttaatgtattattatttgtagttatgagtgcatgtgtgttgatttacctgtgaatttaatctcaggatggtgaaagtaacagaagaatgtttttctgtaaggtataattcatgggaggtggaggcaagacgatcaatagttcaaggctaccctccactaagtagcaagttcaaggccagcctgggctacatgagactgtcttaaaacagtaaaaaaggtgttttgtaacgtgatatatgtataatcgttatatgatgtgtgtaatgtgtattacataatataatatgtgtattgaaaacgttgccattttaatataggtaatgctcattattataaaataaataatatatttgaaaaatacatgtcattatgatatgtaataaaaagtcatatcttacccttt

SEQ ID NO: 632426 - DNA, 904 bp, Homo sapiens
ggaaagtctgcagagagagcggtggcagagccggaaaatggttgacacatattcgcgagcgagcgcccacctgtcccgtggagcgcccccccgaggatcccctcgggagagcccctgctgcaccccgcatgtggaacgcccccgcccgtgggggaaacaaaaaacaggagggcctcccgggggctacacaacaagggcgggggaccacacaaaaagggacacgaggcactcgccctccggggacaagagaagacccagcaaccagcgcaccaccgtcgcgaagcgagggcgaaacacccggggcggtatccctcatttacacagaaaagaacgagagtctctgttacaggactccctccctatcccgcacgaccaccacttggttcatcgcccacggaaagcaatacgggggtatcgctcggtagtagaaccacgcacacatctatcttctctggcgtgggagaaaaaaacaatatacgcccccaggtgtcgcaggcatggcggacggacccccgcggtttgctggtagcattcaacttatgtctccataagccccccacaacagttagatgcatgtttcctctctgcaagtggaacaatcacctcttttgttcttttctccgcaaacactccgcgggttttcgaaattccacgcacgccccgacacctcttcattagacaatggaattgtcatcgtcacaatttcttcagggggggactactaagggcccttcaacaaaagagctgttgcgtccccggcgggagtgaaaaaacgaacattattagcttggtaacctgcgtccagcatactagaaaaggactggacccatagtccccttgagcccagttggggcaagcctaagaaaggaccataaaaaagaaccctttgacagccacaaaacga

SEQ ID NO: 632427 - DNA, 426 bp, Homo sapiens
aaagggaggagcagtcagggcgctgtgtgaacagtgagcaatgaggccacaaaggcatcaagaggccataccatgtgggacttcccaagtaattactcttcctttatatgaaatggaagccagtggaaggttttgagtagagaagtgacataatgcaggacctgggacactcaaatggagaaaatgtacagaagtgagtgtgcaactgtaatgaaaaaatctaccagaaagcaaacaacctagtagacaaaaagtcaaaaaagtgtgaaaggccataaagagggtagttgctagccaaagagactgtaattcttcaaatatattagaagtttcttgtcacaggatgaaacttgtcagttttatctgcctttacaaacagatgagttgtgggagtctttctacctttctctggtgtatcaggcatac

SEQ ID NO: 632428 - DNA, 211 bp, Homo sapiens
gtcatatccgacatctgtgttttctttataggtcacagttagcctagtatgtgttttatgtgtattgtctggacgtataaactagattgcttcttatatgtatgcggtccaactatctctgatgtatggaagtaaatatctcaaaagcttcagaggctgagacattaatatttttttgcggcttactagtgttttttatatataatgaaga

SEQ ID NO: 632429 - DNA, 253 bp, Homo sapiens
cgtacatcgaaccacaaagcttctaataagaggaacccgctaggctacttcctgcttgtggaatgttatcaaagttagcctactacagaaaacagtcgacttcttgtgaaggtttgggacaaatatgtatcagtacgtttcatctgggtattcaatactatccttggtgttgatgctgactccatggcttctggaccccagcatttgaccctgcgtgcccagctggttgtagccctggagattgattgaggtt

SEQ ID NO: 632430 - DNA, 390 bp, Homo sapiens
tcttctcctgacatagggaactgcttctcagagagggtaatgacttacccatgattgtcccaatattcagcagtacgatgtggtactagaactaagttctgttgccatattgtcaatatttgcctgaatttgtttgttgtatgaaataaccaggtttttcagttttggacattggtttagactcaatctaaaaaccattaaattagttcaggctgtaccttcctgtccgccaaaaacattatcccagttgtgtgtaatactgtatatatatctaaaacatcttatacaaatgtttttatgtaatcaaaatgagttttcttaaatttaaatacattggatttaccactgataaattagattttaatcagattcaccttgagtgttatatta

SEQ ID NO: 632431 - DNA, 885 bp, Homo sapiens
gctgagtggagccagtggtggcccgtgtcctccccgtgcagtgccccctcccaccaaggttgtggccccgtccctcatccagcgacagcagcagcgatagacctcctcgtgacagtgacagttcgactgatgactctgaggaggagcgagcccagactggctgtgctgagctccaggagcagctcaaatgccgtgcacgagcagcttgcagccctctctcagaccccagacagaacagaaccacagaaaaaggagaaagacaagaaggaaaatgaacaaaagaaagagcacaagaaggaaagaggaagtggaagagaatgagaaaaaagcagagccaatggaacctcctcctaaagagacgaagaaaactacatagcagcagacagcgatgtgagcagagaaggagccagtgcccatgaaggagcaagccccctcccattgtatgagtcggaggaagaggacaagtgcaagcctatgtcctatgaggagaatgcggtcaggctcaagcttggacatcaacaagctccccgggctgagaagctgggccgcgtggtgcacatcatccagtcacggggagccctccctgaagaatttcaagccctgacgagatgtgaaatcgatttgaggaccctgaatcctgtcccacacttgcgttgaggctggagcgctatgtccacctccttgtttgcgggagaccaaggcaacctcaagcttgagaaagttgatgtgattgccgggtcctccaacaatgaacgctgtctcaccctcaagagcgcgaccactccagtgagtcagttcctctgcaacgaagctcgaacggtcctgctaatcttggaccggtctaaaacacggctcatccgatctccaccaggtactaatccactc

SEQ ID NO: 632432 - DNA, 293 bp, Homo sapiens
gcgagtgactggtgagacagctttgggctcggctgtcggggacgcatattggaggaggggctcctagatgtctggtcagagatggcacggggcaaggacatatgagaggcagctgagggttgccgggcgagctgcctcacgcctgtaatcccagcaatttgggaggctgaggcgggcggatcacctgaggtcgggagttcgagaccagcctggccacacatggtgaaaccccgtctctaccgaaatacaaacaatcacgccggtgcatggtggctgggtgcctgtaatcccag

SEQ ID NO: 632433 - DNA, 331 bp, Homo sapiens
ctgaatggtagatgaacggagtgtagtgtggtttggtagaacaactgcattgcacagttgttccacttgcacgggagcactgaacgttaagatgcataccaagagatgcatgctgcctaatgagacatataatgctggctaccagctgtgacacatctctgtgcatctgctcaagcaagtgtgggtaacaacacatgtcgaatgctttttaacagctgatactgtgtaagacgccaagatgcttaggctgagatcggcgctatgtgagtgatatactgagatacctttttgaacacttaacggttgatctgagacattgactaatgtggtt

SEQ ID NO: 632434 - DNA, 170 bp, Homo sapiens
ctacacagccgctatcctggactctgtatgcaatgagtccacccatatgtatggcccaccgatccaccccagcagacaccctcattgacacacgtggtacaccaactgtggcaaatcacagccccgtatctggatttcttactaagcattctttcaagtctactattccc

SEQ ID NO: 632435 - DNA, 260 bp, Homo sapiens
  misc_feature (195)..(195): n is a, c, g, or t
cacgaggctcgaataggggccgaacctagccagaccgcgcaacggatgcatgtcgcgatcgctcggccggtccggatggaacaggagctgcggctcggccagccggacatgatgctgcagctgaccggtcatggcttcgctgcccaggaatgcgccgaccgcgaatcgatgtcgaagatcgcgtcgattccgtcnccgatcgcgaatgtgcgcaggtcctttccggcgacgacgcccgaccaacaatggatgagcttgtc

SEQ ID NO: 632436 - DNA, 227 bp, Homo sapiens
  misc_feature (114)..(114): n is a, c, g, or t
cgggaggatcgcttaaacccaggaattcacaactaacctggacagcatattgagacctcatctctaaaaaaagaaagaaagaacaaaagaaggaaggaacacccagattcatanagcaagttcttagagatctatgaagagacttagataaccacacaataatagttggaaactccaacaccccactgacagtattagttcagtggggaagaaaactaacaaagata

SEQ ID NO: 632437 - DNA, 389 bp, Homo sapiens
  misc_feature (322)..(322): n is a, c, g, or t
cgggaggatcgcttaaacccaggaattcacaactaacctggacagcatattgagacctcatctctaaaaaaagaaagaaagaacaaaagaaggaaggaaggaaaagaaagaaagaagaagaaaagaaaaggacgggaaggaaggaaagaaaagaaaggaaagaaagaaaataaatcactcaaaaaaaaaaaattatatgattaccttggaatttaaacaatgtgctcctgaatgattggggtgaacaatgaatttacggcagaaatcaggaaattctttgacatgattgagagagaagatacaacataccagaatgtcaggnatgcagctaaagcagtgtaaagtgggaagtttataatgctaaatgcccacatcaaagttagagagat

SEQ ID NO: 632438 - DNA, 202 bp, Homo sapiens
tgggcaacataatgagatctcatctctattaaaaaaaaaaaaaaatgctgggtgcagtggctcatacctataatcccagctactcaggaggctgaggcaggagaaatgcttgaacctgggagacggaggttgcagtgagccaagatcacgccattgtacttttgtacttcagcccaggcaacaagagcgaaattctgtctcc

SEQ ID NO: 632439 - DNA, 857 bp, Homo sapiens
gcaaagtgtacaaaatgtttgcctcacggaggaagcagcgctactggccattctccatggactgcaccggcacagaggcccacatctccagctgcaagctgggcccccaggtgtcactggaccccatggaagaatgtcacctgcattaatgaatcggcagtcgtggtcgacgcttgtgtcgcctgggcatttcttcagccctgacggaccctacgagattcctggtaaagcgtacgaagcgagagcagcccctgtgtgcgactgagaggcggctgcctacatacgtgggagtggccgcggtggaggtcgctccaagcaatggcagagctggagtgctgactgtctagcgcacgcatcaagctgtgcgaccctgctgctctgggccagtgggtgcgccaccgtggccagcaccgaggcctgcgggctcgagggggacgctgacgcgcaaacgcacggacaccaatacgacactggccgaatcccgacgaagcaatggacgggcgaaagcgaggaatacgggcaaccacgagatccgcaccgttcgaaccgaacgaatgccccgaggggatgagcacctatgtcggcccgacaacttgcaccgtaacacatttgttcggcatacgtagtcctatagagaaccttgagggaacaacgaggagtgtagaggataagtagacacacaggaggtatatcagtcacgaggaaggcgcgcttaggggaaaccccactaggcaagaaaacaggaagggggcattgtccctagggacgcggttcggaaacgaacgttgcacacagccactgccgcgcattaggaccccatactaggggcgccatcatcgcacaccaaaaacagacag

SEQ ID NO: 632440 - DNA, 1506 bp, Homo sapiens
gttgcgtcttgggagatctggacgtgacgcaatggtgtagttggacgaagatttgagaccctgaggtgggctcccttcttagtatgtggtggaggtgtccgatgggtgaggtggctttcctacgtatgatcgatggaggagtgtgactaccacaagatataccacgagtgattggatcgccttgattgctggtcttgtcgaacgtgaggggtccgggcgatgtcctgcttgcttctccgtgttcttggttcacggcccgtacgaaccttctggacagcattagtgaaggaacagattaggtcatctgtgtgacaaaggatgatggtctttcacgtggaaggatgattcctatgcgtgctcgtgaagccaagagatgccaatctcatgtcacctactgtaaaggtgaatttcgcaagcagaggcttcgacttccttgaccctacgtgcaggaggaatctccaggttcgtgtatcgattcttgtaataagcggggagaattataaacaatttcactttgtaactccttgtccttgaacacccgctctcggaaatcattgctacctcttgttgacgactgacgggagaggggagaataactggggacaaaggagattaatgggactatatccttcactgggatcgtgaataggattgcggctgagtagaagtagcaattaagtggtaggtgaggatacgaattcggggttaccatggtattggtctctttctcatataaatttgagactagaatgtacctataattttggggtacatttgaagaggaattggtaggcattattggtgatccttgatggacatggaactaagagaaggttaattaataacgtagtaaaagacaataggatagtggagaagatgggggaaaatatttttgaaaacgattcaagatgtgagtggtgtagctttggatttagtgagtatgggaataatctttaaatgggaaaggtagagaaggattgtggggtgggaaaaagctcaatttggaacttagttgcacggaaggaaaatgggtgaccagaaagaggtcagggactttggcaggaaagatggcaaggaagtggaagaaagattaatgtaactagaaaggatggttttgatagatacaagtttgggcctctgttgggggaaaaaacagcacatgttatggaacattgggggaaagggggtaacaataggtttggacagtaaaagaaaaggggaacttacaagtcgccaccgcgtggacatcaacgcagccaactgtgcaagggaagtggaatccgagccacgaggctcatggagacagcaacaatttgatcagactatagacaaacgtggaaacttctaaaagagatagtaactccacagacgatgataacaaaccaaaactacacgaggaacaaagcgaagtgctggtaacaccagtgaactagacacaacggtctgtgaacacataagacaacacaaatcatgacacgagcaagatgatcagcagagaatgactaa

SEQ ID NO: 632441 - DNA, 226 bp, Homo sapiens
acgtctgctcccaccttaggcctctgggccagagtgtcctctggccatgctcatcttcccctggtttttgcacaactgtgcctacttcagatctgtcattcagatgtccgcttaaacatcactccctgagaggggcctttcctatcatctcagttccgcagggcccctcactctgctgctttgcctttttattagcctctctctgattcgtgtatcctctgacgtc

SEQ ID NO: 632442 - DNA, 666 bp, Homo sapiens
gatataactatcatacaaatcagatactacacaaaacatccacagaacttttttcatcttttattttttgaaatggtacacaaccattccctacttaacccaacatccaacagaaaaaatggtacatcttttccttccatttggcatacaatggaaaaccaagtatatattttttttacaaagttaaactaataagacactagagcaaattgacagttaaagtctataggtgaaaaattatctaataaaaataatcaatttttccagctattagtcactcccatacccaagtgttatcctgattaataaaacttgctgcgccactcaaaattctggtattatactcataccattactcaacttgtattactgctccccaccttattttcttcacaactaaactatagaaatattgttgaaaagtaggggcaagctattggcaaaaacaaacaaaaatatccccagcttatttataagctatgatttatgttatcgagggaatttctccccagcaatagatttccaaaccatcaagaattcaccagaactaggttggccaagtaatttggcctatgtccaccaagagatgcacttatttgtccaccagaggagctgacaaataaccttaggtgtaagatagggggtgggttgcgacctccagccccc

SEQ ID NO: 632443 - DNA, 1137 bp, Homo sapiens
cttgcgtttgaagcccctagttgattcaatcaccgaacacgttcgtgttgatagagcctcccgcacggacatggtcagccagcgcgtgtcgttggaaacgagtccctctgagaccgtctctttgtttagtgtgtgtcgcagaacgaagatgagtagtgtgttggatgaagaatgggggggagaaactaactgttgtctacattcactcaccccggagtgatatcttcttttacggggggggatttcttcctctgcggacgactcttcccccccaccacagaaggtgttgttcatcactgatgacatcgtagaaagtgtttccatacagagtgagagaggaggggcccacagacaacagcccacacgggggggtattacccacccccccggttagtaattcttctcacacgcgacactcttttgggggagggcgccgcccagtgtgataggccgggggtgtcacaattctagaggtgtatcagcgaggtgtctgttaaaacagaccccacaggagtggcgcgcacacacaacagaggggtggaaacgccgccccgcgtgtgtctttcatcctggtcgataaattcccacatctccctcgaaactcacactacacaccacacacatttatggtgcgcgggcgtgtgggtggcggacacacacacaccgctcgtaggggtcacgcacagcggggaaccttcttgtgagggaggccatctagtggcccacgcgaggagagttccgctcgtagacaacccacgcggaaaccccagagaggtgctgtcacaggcgagcccccgagagagtcctacatagggctctcgcgcagttccccacctcggggtaacagagagatgtggaatctgctcttttctccacaaagatcccccttgacccatcatagctccatctcacagcctcacccagatttattaagagggctgacaaaatcaaacacaactatggtggttgcaaaataagaggtcattgataaatggagaagtataacccaggaagctaatttttggggggcaaaaatttgggggccaaaaacccctattgggagaatatgtgaggggaaaattttttttttttataatagaagcacaaatatggggataaattttttttattttacca

SEQ ID NO: 632444 - DNA, 470 bp, Homo sapiens
agcggggataactgtgcgccgcggtgcgggccagtgcagctctgcgatgggccggagcgcggtggagccatgcagtaaccgcatcccgggccgggcggcgggcgctgtgtgggtggcgctgtatgcgcctcacgcggattggtgcaaagcgagcatgaaacacgaaagtcgctttttacagtctgaaggacactccgtggtgctcggcagggacgcgtgcagagctgcgacgacgccaagtgcgtccgaaaaccgaagatggttgcatcgagcaacaatagcaatgattattgaagcactgtcctcgttcgattggttcacgccccaatgatttgaagaccctccgcagaaaggtttggtaccttgcaaagggggcaagaattacaaaactcctagaaatttatcccatcccgtaagacaacaaatcgccacgccaggagcaaacaactggacacgaacgggcatatata

SEQ ID NO: 632445 - DNA, 231 bp, Homo sapiens
tctgtgcgttacaacacagtagccactaactattgaacatatcaaacgtggctgtcgtaagtaaataaaaatatcaattgtatatttctatctatattttattttggagagggagttggccctgtcgcccaggttggagtgcagtggcgcgatctctgctcattgaaggctccgcctcccaggtacatgccattctcccacctcggcctcccaaatgtgtggggataacag

SEQ ID NO: 632446 - DNA, 193 bp, Homo sapiens
gtggtccctgtgggcccacaagtaaaagtagcgcctatagtagtcccctctagcacagaactagagggcagagtcctcagatgtcagcctagtgagctccatattggctgcgctgtaggagttgttacgctcagtggggccctcgccttaaacttctattgtatcgtactccctctccggaaaatcatcatta

SEQ ID NO: 632447 - DNA, 895 bp, Homo sapiens
ggccgtcggagcccttgacgcctgtctcttgtagcttctctcaggcctagcccagcatcactatggtggacgcttcctgggcacctggaactagtggacagcaagaatttcgatgactactttgaagtcactcggtgtgggttcgctaccaggcaggtggccagcatgaccaagcctaccacaatcatcgaaaagaatggggactgttctcaccctaaaaacacaacagaccttcaagaacacagagatcagcttcaagtggggggtggagttcgatgagacaacagcagatgacggaaggccaggtccattgtgacacgtggatggagggaaactggttcacctgcagaaatgggacgggcaagagaccacatttgttgcgggagctaatggagtggaaaactcatcctgacactcacccaggcaactgcagttgggcactcgccttcttgagaaagaggcatgacctgactgcactgttgctgactactactctgccaatcggtacccctcgattcagacacattgctcaattcttcctctgcatttgtacaatccaggaattctcgtgggtcaggtgccctgaccggaatcagtcccaggacgagtggggtatgtggttgtatttcaagaaggtgaccataggggggccggaggcaccctaagggagcaaggccccagtgcttttgctcggtcccacaaaccacaacgaaaaaatttggggggctgcaccaaaaagtttaaaccttggggggggcaaagagagagaggacgtgcgagaccgggagagggggtcccaaaaaagcgcggaggtggaacaaggcaggctcggtaaccgcacacaccccagccgggcggaacaacgcaaaaagccacgacaatacactagcaggag

SEQ ID NO: 632448 - DNA, 901 bp, Homo sapiens
  misc_feature (1)..(1): n is a, c, g, or t
  misc_feature (109)..(109): n is a, c, g, or t
  misc_feature (158)..(158): n is a, c, g, or t
  misc_feature (247)..(247): n is a, c, g, or t
  misc_feature (252)..(252): n is a, c, g, or t
  misc_feature (269)..(269): n is a, c, g, or t
  misc_feature (325)..(325): n is a, c, g, or t
  misc_feature (333)..(333): n is a, c, g, or t
  misc_feature (339)..(339): n is a, c, g, or t
  misc_feature (342)..(342): n is a, c, g, or t
  misc_feature (376)..(377): n is a, c, g, or t
  misc_feature (387)..(389): n is a, c, g, or t
  misc_feature (429)..(429): n is a, c, g, or t
  misc_feature (435)..(435): n is a, c, g, or t
  misc_feature (456)..(456): n is a, c, g, or t
  misc_feature (479)..(479): n is a, c, g, or t
  misc_feature (528)..(528): n is a, c, g, or t
  misc_feature (533)..(533): n is a, c, g, or t
  misc_feature (536)..(536): n is a, c, g, or t
  misc_feature (543)..(543): n is a, c, g, or t
  misc_feature (552)..(552): n is a, c, g, or t
  misc_feature (566)..(566): n is a, c, g, or t
  misc_feature (568)..(568): n is a, c, g, or t
  misc_feature (573)..(573): n is a, c, g, or t
  misc_feature (575)..(575): n is a, c, g, or t
  misc_feature (577)..(577): n is a, c, g, or t
  misc_feature (579)..(579): n is a, c, g, or t
  misc_feature (581)..(581): n is a, c, g, or t
  misc_feature (584)..(584): n is a, c, g, or t
  misc_feature (589)..(589): n is a, c, g, or t
  misc_feature (616)..(616): n is a, c, g, or t
  misc_feature (632)..(633): n is a, c, g, or t
  misc_feature (735)..(735): n is a, c, g, or t
  misc_feature (892)..(892): n is a, c, g, or t
ncttttctcctctagcactggttggtaagataagcccctttgcttctctagtagccaggcattatggacttgacagtcttaaaatgaggctttattgtatttcaggctngaggcaggttgccttttctcctgaggaatcttcaggcagtggtaaatanttacttatcactcagtacttctgtgccatgaagaataagcttcaatttattcaatccttagaaaagttactatcgtcccctggtcagantactnaggtgtcttgataatgntccttgagactaccacttagtctttattctaatttgtatgtgaataggtttcaggnatatggtncttctncgntgggcctgaccctttcctaatctcattttttttnnacatcttttnnnttttttttcccccaacatttccagccagcatattaccctntttctnggaaattgagaggagaaacantattatttatatatatttctttnatattggaactgtgagccaaacctaataaataatatttattgtgtaggntagtngtngtagtgnggaggtcanggagcaatcccttntnttttntntntntnttnctcanggaacatcagttcacggggggaaggcngtttctggaacaaacnngggggctgcccgacgctcaaaggcagcaacattctgtttgacaacctcatcaaaaaacatggtggccagctgggagtgcagcagagaacgaaattcaaaggnaatcgaaaagtccacagtgcaggttcgaggataggcaggaataccagggctgaatcgccaaatagtctctaagtggttgaagagcttgccatcagtacaaacagcttgaacatgtgaggtttgaacatgggaactgcagaggtgtaagtttcctganaggtgggaa

SEQ ID NO: 632449 - DNA, 249 bp, Homo sapiens
gctccgaggttccgcgcgcctcatcgcgccgaggttccccactgccgtcaatgctcagactggatacatgcacatgtggtacatatcaccatggaatactacgcagccttgccaggaacatgatcggctgggcgtggtggcttccgcctattattccagcactttgggaggccaaggcgtgtggcttgcttgagcccaggagttcatcaccagacctgatgacagagtgagactccatctcaaaaaagc

SEQ ID NO: 632450 - DNA, 332 bp, Homo sapiens
  misc_feature (99)..(99): n is a, c, g, or t
  misc_feature (104)..(104): n is a, c, g, or t
  misc_feature (138)..(139): n is a, c, g, or t
  misc_feature (144)..(144): n is a, c, g, or t
  misc_feature (152)..(152): n is a, c, g, or t
  misc_feature (154)..(154): n is a, c, g, or t
  misc_feature (157)..(157): n is a, c, g, or t
  misc_feature (198)..(198): n is a, c, g, or t
  misc_feature (238)..(238): n is a, c, g, or t
  misc_feature (255)..(255): n is a, c, g, or t
  misc_feature (280)..(280): n is a, c, g, or t
  misc_feature (304)..(304): n is a, c, g, or t
  misc_feature (315)..(315): n is a, c, g, or t
  misc_feature (321)..(321): n is a, c, g, or t
agagagagagagagagagagagagagagagagagagagagagagagagagagagagagagagagagagagagagagaaaccatttatgacagagaaatngatanaggcattgggggccactattgaaattattatttnnggggncaacaagntnggnactttctgacttctgtatcttaacataaggggattttaggnaatgctaagtcagttgtctcattttttgtgataagttttngggatttttagttaatngaaataaataatgcttttacttggncaaaatgcatgtatagcatttctntcatcttagtnccttgngtttccctatg

SEQ ID NO: 632451 - DNA, 174 bp, Homo sapiens
ctctagaggatcctaccccatctctaccaaacatacaacaataatacaggcatagtggcgggtgcccgcaatcccaactactacaggaggctaaggcagtagaattgcttgaacctagggaggcagaggttacagcgagccgagatcacaccactgcaccccagcctaggcaac

SEQ ID NO: 632452 - DNA, 1384 bp, Homo sapiens
gagaggccagtgcccggggtgaggcggcggcagcggcggcggtgctggggcagccgcggtgcagcctcgagtctccggatcctgggccgtgtgctcggcgccattgatgccggcgtgtcgggcctttcggggcaggtcgggcccgtgggtggtctcggcgccgacgggggcagcgagacctagactctgttctgtggtagccctggcgtggggaggcgtgagtgatgcgtgctgtcgctgtttatccgggcgcctccagcggttggcgactaggacgagggctcagggcccgccgctagggtcagcggtagcccggcaacgctgccaaagtgcctctgagtcgtctacgcccccaataggcacccgcttggaataggctttagccgtttgacctcgccgactcggtgccatgtcgttggagtcgtcctttggagcctaggctacggggggaccctcgaaatatcagggaagtaatggttaggctggctactggatcatccagaagaaacttggagatttcccgaacacccactaggtttcgtaagcagtgtcctccaggaaatgtgcggagggaacgcactctgagggacacctgtctggggacgatactgatgcttgaaaagtcggggctcgaagggggggcattggcaggcggccggccaggagcaatgggtgcgctaccccaaaggcaatcggcacctggtgggcgccccgcaatgtgagggggcctaaatgccctaggattcgatcacctaatcgcaaaggaaaggaagacgttccgtggggtcggacactcgcgtgggaatttcttgggacctcgtggtgcgtggaaaatcgggtgccattgggagggggggtgtccccatttgcctgtgtggccaccatcacacgtttctcgacattgattttgacaaccgtaaacattttcggaaagtttttacagaccgaacaatcccgttgagccttgcgtggtagtaaatgggagagaacccacgggggtttggagaactgcgctgggtaaaattgccttttacttagagaagttgacttgtatagggtcggagaactacacgggtccccattgatagtaagacgtggaagccttgggagtggatgggcggaaatggcctgggttccgcaagggtatgtgttggccttgatttggaacgccctttgcacaaattgggttgggggggggcccacattggcgaataattgggcttggtttccacaactttggggtcggacaaacacattactggcggggtagatccccctgtgaaggagagagtggcgcttcccgtagaaatcgttgtttcacaacgaccgaagggcacaccccgagaacagggcttgacaaatgaggatttcgtggaactaccaa

SEQ ID NO: 632453 - DNA, 150 bp, Homo sapiens
ctatagcatgttggcccacatgaagattgggggcatgcgcagttcaggggcagctgtccagtgtattaggcccagtgtgaacacagccttctctgtgaagcctcccagctctttccagacccggttggagccgtgtccacttgctttgcg

SEQ ID NO: 632454 - DNA, 303 bp, Homo sapiens
aacacaaaaaagaaaggagatcctctctcctgtttactgaattttaaacaatcttgtggggttttttgtttgtttgttttgagatagagtctcactctgttgcccaggctggagtgcagtggtgtgatcctggctccctgcaacctcaacctcctgggttcaagtgattctcctgcctcccaagtaactgggactaccaggcgcacgccaccacgcctggctaattttcgtatttttagtagagatgggatttcactgtgttagccaggatggtcttgatctcctgacctcatgatccaacca

SEQ ID NO: 632455 - DNA, 158 bp, Homo sapiens
cccgtagtgatctgaatgttgttgtcatgcaatgttgcagaactgctgggaatggtcccccaggccccgtctgtgggagcagagtcgagatttgctggcaggatgtgccccctggggagctgcagatggtcctcgctctttctcctacgttgtagaga

SEQ ID NO: 632456 - DNA, 380 bp, Homo sapiens
ccgtactaggctgggacatcatagatagcagagactgagaaaatacagatcatacagagctcagaaatcaggggcagtgaggtaccagtcgggggcatcagactgcactgaccttatctcgaattatagccacaatttcaagcttgcccttaccttaaacccgaagctcatacctaatgcccttcctatactctcccagaagaaaaccttatctcctcttttactttgaagagctgaaatagagccgctactgtttccacttccctcacttcacttccacatttctctagctctctgcctatgtatattttcttatctgctctaatgacagagtaagttacctaaattctaaaactaacctcttagggcaaaagctctcc

SEQ ID NO: 632457 - DNA, 136 bp, Homo sapiens
  misc_feature (25)..(25): n is a, c, g, or t
  misc_feature (51)..(51): n is a, c, g, or t
tgttactgccccgcccgtgatcccncttggaccccctcgtcttccctccangatcccatgcccttcctggcttggggtcactggggtctcattctgggggctaaaagtttttggagactggctcaaattcctccct

SEQ ID NO: 632458 - DNA, 183 bp, Homo sapiens
tatagaggatccggtcagcaagtcagccaccagccccgatgggaagactgctgcacgcacctatctgccagttgatcctggaccccatcttcaatggtgtttgatgctgatcatgaatttcaatgaaatgaggagactatgcagaaactgactagagaaacttggacatacaaacttggacat

SEQ ID NO: 632459 - DNA, 172 bp, Homo sapiens
aacagcagatgaccaataagtgtcaggacgttgtaccagacggcaccggccagcagatacatcggctgctgataccagtgctcatacagtgatgttcccaacatagtgtaaatggcgatcagcaatgcaccgaagcaattgttgcatagcgttgacccagaccgccgagcaa

SEQ ID NO: 632460 - DNA, 477 bp, Homo sapiens
gagaaaccaaacaatgtgacggtacatgtgatgaaaagctctgggtttatttttctcctgcttatgaacatgtatttttatttgccgaatgaaaatcgtggtgtgttgctttgatgaatggaatttcaggctctccctgtgcacagccggtgggaagtcaacccttaaatgcctcttttctccatatctgtctgttaatctccacaaaggttgcgtttttcagatgaaagctgggtgtctgcaaatagtctgtccttgtataagagtcagtgtggtgacggtcaatccccaataattactggttattatggggcttagcacggctgtataatagataatatgttaataaagaagctatatttatgtggattctaatgtgagtttggttctgtacatgcaatattctgcatggagtataaaggggggtaagtgagccattatgaaaacggtttatctattgtgtttccagaaggaagt

SEQ ID NO: 632461 - DNA, 129 bp, Homo sapiens
tctgccctgactcttggaagcggggcagcaggtggtgagagatgacccctgttgaggatttcacttggtgtctgccacaagccgccatggcatacatgatagaaggcgtactggtccgttcgtaggagc

SEQ ID NO: 632462 - DNA, 649 bp, Homo sapiens
attttatttttgtttggggttatttgggttttttccccaacatttggtatctttaataacatacacaagggttcccagccatatacataacaaaatgttattcataaatggtttctaaaaataacatttttttccctttatcggggtgaaaagctggagaatgtcccagtggggaaggtgggtagaggtgggaggagggcgtagaagagggagaccctggcttccccgaagtctgaacccccaaatcccctccctaccaccggggccccgaacacaacccctcataaggaatcgggaccagaacagtcgtgtcggactcgtggggcgtgggacgaactcctcgtgggataagtagatataggtgtcccacttaagtgaaggctcatgacatacagtgggggagggaaaagggcgtgaaagcaaacagggagggggctatagggaacaacacccaaaacgccaaagcaatccccgtttccctaatcccagtgacccccaggtctcaccaaccagacctgggagcggcaaagggtgtgtgtcccggggggaaggggacgtaaagggcaccaagacttcctgacctacacgggataccctggttgccacctccaacctctactccgggtagccgggctggggacactggtca

SEQ ID NO: 632463 - DNA, 390 bp, Homo sapiens
tcacgagccactggtgggctcgaggcagtggtggggacttgtatttaaagctcaaatccacgaccgactctgctgggctggaagatggtctggcttcattttccatacaaactttttcaaatagctagtcaagtaaaaatttacctgttctaaagatgaggccaggcacggtggctcatgcccgtaatcccagcactttgagagcgtaaggtgggaggatcgcttgagcccaggaggtggaggctgcagtgagccgcgattgcaccactgcactccagcctgggtgacagagcaagactctgtctcaaaaaaactagttttcttttttatttttttttttgggtcctatccttttaaaatgtaccgttgaaaagttgtgggtaccgagct

SEQ ID NO: 632464 - DNA, 1052 bp, Homo sapiens
tgcccgctctcgcacataagttttatggtagcattgagccatcctcactcgctaggattatgactctactcgttcatactgcatgtcctcgctattatgcctagaacccgaatacattactacttccggttcatctattaatcgtacgctacaataatcccatcagaattactccaatgtccacgggcttaagcactgtattgtgggcgtatcgtcttatactagtcttaggcgtcggagaatgcggacgcgatgggtcgtttgcctgctccatctccaagtgctaccaggagcgtaatgaacactatatgtgaggcggttaacactagatccttataaatcatatgtcgcaagtgacgtgcacaactaatcagacccgcgaacacattgtatttcctgacccatcttgatgttcacttctgccatatatacgcatgcattgcactgcgatactcataggcaacggcctactacgcacagcaaggcatatatccctttgcgctctgagttcgctcactcctaacttgaattgtggatcttcccacaagttcaggcaacattcggctaatacgtaacagtgtttcacaccactgcttgtctgccatcgcgaaaacgcactcaaggctaaatcagcgcgtccctaaactagctccctgttcacgctgcatccacatcactcggccgcactagttcatagggcggccatccatgccctgcgcattcaatccgcaccccacggacagcgatcgccactcgctgtactacccttctgctcaccctgacttatgaaagcccgttcaccatacaacttcaccttccactggccgcgctatgcgcgtcgcttcgagatgacacttctacccccctggatcctctcgacgctcagctctctcgacaacctgcacagacgcctctcttccgcgactgcgggtctcccaacactcgccctactccagccccaactccgtccaaccatctacagcctatgcgatccgccgccaaagctacgacccaacagatccaaccatcaccaccgcccaccgcaccctatc

SEQ ID NO: 632465 - DNA, 138 bp, Homo sapiens
tgtactttcggcatcgatgaggatttcatgagatcatttgaatttcttcctgggtggtctctctcaaggatgaggttttgtagatatgtcatgttcagaagcagacccgtgccggccagcgcaccaggtgctaaggca

SEQ ID NO: 632466 - DNA, 234 bp, Homo sapiens
gtgactctagaggataccgacaccatagaatgccaaaaccaaggagcctgccacccaatgtgcctgagccctgccacccaaagtgctgagcctgccagccaaggttccggagccatgccacccaaggtgcctgagccctgcccttcaatagtcactccagcaccaggccagcagaagaacaagcagaagtaatgtggtccacagccatgccctttaggaggcggccaccagatg

SEQ ID NO: 632467 - DNA, 762 bp, Homo sapiens
gaatgagtcggtaccaagtatcagcagagaagagaggggtgtgggcgggaatgggtcttcctgaagtacatccccgtggggacttgaacagagctccatgaggagctggttagtgatgtcacgcccgtgcggtttgactccggctgagaaaacgctggggacagtggctcacacctgtaatctcagcattttgggagcctgaggtgggcagattgtctgagctcaggagttcgagaccagcctgggcaacacggcgaaaccccatctctactaaaaatgcaaattagctggacaggggtggcgggcgcctgtcatcccagctacttgggaggctgaggcaggagaatcgcttgaacctgggaggtggaggttgcagtgagccgagatcgcgccatcgcactccagcctgggcgacaagaaggcaagggaggaaaaaagcagggaattcaggggcagcacctgggcgaggcaggcagagtcggcgcacatgggcgtgtgccagggagagtcggggccgcactgccggtgagtgggcaatggcagggccttctctggtgatcccctgattcaggcgccccaggagggttgcctgttgcggggggcgcatgtagctgcacgcccctctgtaattgctgaaataaaaagatggtctgctgtagtgcagtgaatggtgtccccttaaaagatatattcaggtgctgaccctcagtcactgggaatgggacctatctggaaatagggtctctatggatgtcattgagt

SEQ ID NO: 632468 - DNA, 441 bp, Homo sapiens
agatgaatatctgggcaggatctgagggtgtttggaatgacaccccccaatccagttgcatagatgggatgtctttgcaggtttgaggagatcatcgacctgcagagccccctttgacccagtacctcacgttttatttaaaatctaaatctggggccaggcgtggctgtcacgcctgtggtccaggcactttgggaggccgaggcgggtggatcgcctgaggtcaggagtttgagaccatcctggccagcatggtgaaaccccgtctctgctgaggagaatgcagaaattggctgggcatggtggtagcgcgcgcctgtggtcccagctactcgggaggctggggcgggataatcgcttggacttggcgggtggaggttgcagtgagccgggatggtgccactgcactgcagcctgggtggctgagtcgagctccgtctc

SEQ ID NO: 632469 - DNA, 1041 bp, Homo sapiens
acaccagagactgagtcctgccaaccagccgggatccctcatcagacaacagggacaccacaaggcaacaggagctcaagtacgctctcggcgaaccctcctgagtaacttgtggactttgtcgtcttggccacttcaacgcaggatccggccacaggacgtacagctcagcgctggggagggggttccctgaaaaagtcacactggttttaaagacaaaaggagacacgtccttcaggtatggaagaaagcaatcctccccgggacagatcctgggacgccacccgcatcctaagtcagggacagagaagagaggggtgtgggcgggaatgggtcttcctgaagtacatccccgtggggacttgaacagagctccatgaggagctggttagtgatgtcacgcccgtgcggtttgactccggctgagaaaacgctggggacagtggctcacacctgtaatctcagcattttgggagcctgaggtgggcagattgtctgagctcaggagttcgagaccagcctgggcaacacggcgaaaccccatctctactaaaaatgcaaattagctggacaggggtggcgggcgcctgtcatcccagctacttgggaggctgaggcaggagaatcgcttgaacctgggaggtggaggttgcagtgagccgagatcgcgccatcgcactccagcctgggcgacaagaaggcaagggaggaaaaaagcagggaattcaggggcagcacctgggcgaggcaggcagagtcggcgcacatgggcgtgtgccagggagagtcggggccgcactgccggtgagtgggcaatggcagggccttctctggtgatcccctgattcaggcgccccaggagggttgcctgttgcggggggcgcatgtagctgcacgcccctctgtaattgctgaaataaaaagatggtctgctgtagtgcagtgaatggtgtccccttaaaagatatattcaggtgctgaccctcagtcactgggaatgggacctatctggaaatagggtctctatggatgtcattgagt

SEQ ID NO: 632470 - DNA, 255 bp, Homo sapiens
agctgaggatttcgttcgcgaatatacagtacatccttaggatatcctagagcagctctggttccaggaccccctgcagataccaaagtccgcacatactcaagtccagcagtcgtccctgtgggaactcatgtatacaaaaagtcagacctccatatcggtgacgtttcatactcctgcaaactatcgccacttttccatccacacctagctcgtgcgatgcggacacacacagactatggacgagccaaactg

SEQ ID NO: 632471 - DNA, 1115 bp, Homo sapiens
ggagagaactgtctcggttttttctgatgggggattcctataaattaattccattttaaattctctgtaccaaaatttctcaatctatgaaaataaagttggcaaagggcacaagtagcccaggagcctcaggtcaggaggctaagcacgctgacctaacactatattgtacacgttctctctcccacgaacggaaagaagaggcctactggggcaaagcccgagttgcaggtccgggaaaagccaatgttggtctaaccgtcagcacacagggaaaagtgtaccccttcatatttcccgtgataaacacaggaggcaaaaaagccacataagggtgccatgcagaaccaaaggaggggggccccccaaaagtggcttcgagccccgtgaaaggtgccccggaatggggaccaccgagaaggttccaagcaccactcagtgggccgccgcggcacctaaagaggtctcacaggaaatcgggccccgataggggcccattcacacgcggaaaaaaggggccacacagtgaaggcgcgcgagggtaccacaacatgtgtgtgtgaaagtgccaccaagagccttcatcatatggaccacagtggcccattctagggccctttctcaagagagactttacgacaacgccagtgggatacctagaaacagcccgtggtcagcgggtgaacccaaagagtgtggctcatacggagacaccacgggtggtgtgccatatagacgccgggtggagaacacacaaccagggcgggaatcaaaaacgcccggtgaagaaaagcgacgcaccatggtgggcagacaacaatgacacaagggcccgagagaaatcattacccatcctgggcccgaacacccgccacaagacacagaagcccccacacattcagcgcacaaagaataacaaccacatgtggggcgaaccagaggatacaaaaagcagcctgagaaagatcaacaccgggaaaatatgaggggcccgcaaaaataggggcggcgccccgatgggacacacaccaccaggagggcagtggctattgaaaaaccctcgagggccaaaaagagcggggcaaatcaagaagaagcacaaacaaaatgaaccc

SEQ ID NO: 632472 - DNA, 481 bp, Homo sapiens
tcgaagatcgagaaatagtgcaggaatatgagtcggcataatgggagctgtcgaagcaccattgtttatggtggatagacaatagagagattgtagagcaaatctgatgataaaagcctaagagtttggaaatggcgagttgccatcagtagaatatctgatttacataaagcaagctgttcaaacatatatagacaaagatgaagcctgatcctatgcaaccatttgaatatttttagcaactgtgatcctggcttgctagtcaaactgttctaactatttaagtactgacaatatggggattacatcccaacatgctaccatttataatcgttggacagactttccaaagaatgtgtatcttgagttgtcttacttatacggataacagcttagtatattgctgtcttacattctttattaggtaccttattcatctctgtaaaataactggcaagacagtagggggacagagcataag

SEQ ID NO: 632473 - DNA, 137 bp, Homo sapiens
actgacctcaagtgatccctgccctcggcctccaacaggactgtgattcccagtcctgttgaagattctggagaccaccctttgcggcgttttttgggggtcccgaagcctgacaagatacctacacaatattcaga

SEQ ID NO: 632474 - DNA, 218 bp, Homo sapiens
  misc_feature (43)..(44): n is a, c, g, or t
gctgactcagaggattaagcagctatccaagagagcgatagtnnatatgcagcaacggggcgggtagtaaattcaaatgacgcatgatttttccttgagttattgggtagaggttattcggctgctggtgcattcatgcggccgccaacgctgaactgcgcaacggcgaccaacatcactatcacggccagaaacaaagcgctggtccacatggcacc

SEQ ID NO: 632475 - DNA, 975 bp, Homo sapiens
  misc_feature (885)..(885): n is a, c, g, or t
ggtctctggcaatggcggctctagactccctgtcgctcttcactagcctcggcctgagtcgagcagaaggcccgcgacgacgctcaagcaagtcggctctgtagcgcgcatctgcgcgaggtcgctactcaggctcagcagaccctgggttccaccattgacaaagctaccgggaatcctgtgatatggcttggccatcccgactcagggatacccggcagtctctcctttccttgtagagcttacatagccagtaagaagatcccacacatgagccccaggctaagctgggtggtggtgccaggcgttaagcgtttacatggaggccagactatccttggagtgtcatgagattaggaccctgtctgtccacttcttggagcagagatgccacaaactcacgggctctttcttctcagctgcccttgagtatgtgcggagtcaccccttggaccccatcgacactgtggacttcgagcgggaatgtggcgtgggtgtcattgtgagcccagagcagattgaggaggctgtggaggctgctatgaatcaggcagcggcccaggctcctggttggaacgttaccagtttcaacatggggctgctgatgggagaggctcgggctgtgctgaaagtgggcggatgggctagatgatcgcgaagtggctgtggacatgcggtcctaccagtgttctgggcccacgtgggaggctgatctggagaagaagtccaacgtggcaagagctcggtagaagaacagaccgacggcggcaagatgtgtggagaaggagactgtgcaacccgttcggagggccatcgggggagcctaagtccgaggccgtgaagttaagaccaggaggtgggtctcaaccggtctttgtcccggantggggagtaccgccggcacaagggctgcttgacgcgccatactgggcagccggtttggcaaccacgagatctggcgcgccaacagtgagt

SEQ ID NO: 632476 - DNA, 377 bp, Homo sapiens
  misc_feature (114)..(114): n is a, c, g, or t
ttacttttaaccaaatcatcctaggctttggcagtcttcttctgtatgcttctttaaacaagactttaaagatacataggtatgtgtttgtctgtaatccctccatcccccacnttttttcttttttttaaattttgagactgggtctctttatgttgtccaggctagtcttgaacttatggattcaagtgatctacctgtgtcagcctgttagctcctaccaccacacttgactttgcttgtaactttgaaaggttcattcaaaattgagacttaagaattagggcttgctccttaagagacttgaatggaaaggcaatcttgtctgggagactagcatttgcagattatacttctgggtgcttctagggaaaaat

SEQ ID NO: 632477 - DNA, 408 bp, Homo sapiens
  misc_feature (22)..(22): n is a, c, g, or t
  misc_feature (120)..(121): n is a, c, g, or t
  misc_feature (127)..(127): n is a, c, g, or t
  misc_feature (218)..(218): n is a, c, g, or t
  misc_feature (339)..(341): n is a, c, g, or t
  misc_feature (408)..(408): n is a, c, g, or t
ggagagagagggagagagaagnggggggagaagagaggggagagaagcgcgcggggggcagggggggggaaggggacaggaagaaaaaaggggaagaggggccagaaaaagggagagggnncagacngggaggagggggggggggagggagaggggaggggggggagaagagaagaaaagtgagtgtggcgaagagaggggtggtgtgaaaagaaggngaagaaggaagggtggtggtgggtgggggaggggacaagtgggtgggggaggaggtggaagagtgtgtggaggtgtgtgagtgtgaagaaaggtgaagtgtgaaaagtgaaaagtggaagnnncccgtggaaaaaaagaaaagtgagtgtgtaggaagaggagggtgtgagtgtgacaaaaagagaaaan

SEQ ID NO: 632478 - DNA, 678 bp, Homo sapiens
  misc_feature (11)..(11): n is a, c, g, or t
  misc_feature (22)..(23): n is a, c, g, or t
  misc_feature (29)..(29): n is a, c, g, or t
tggaatggganaaggggaaagnntccttnttttgggtaaccccaagctgggaccggaaaggggccacattggggccccttttcccccctggggccccaaaggggggctcccccccccctaaaccccccccagagagagtggggggaaaaaacaagggggcccgcccccccccaccccccccgtttgttgttgttttttttttttttttttaaaaagagaggggggtggtttccccccccttgcccccccaccagggtgtgtttttgtgcctccctcccgggggaaaaaaaaaaaaaacctcttctctcctttgttgggccccccacaaaaaaaagggggggggtttttattttaattgggggcgccccccccccccccccgcgccgggggggagaaaagttttttttttttgggggagaggggggggggggggcttttctccctcggcggagaagagagggtgggggggaaaaaatttttttaaaagccccccccccccccgggggttttttttttaaaaaaaataaaacgcgcgccccgccggggggggggggggggtctcccccccttttatacacaccccctcggtgggggggggggggcgggggggggggtttttttttttgttggagaaaaacacaccccccccctccgcgttgggagtgagacagccccccc

SEQ ID NO: 632479 - DNA, 258 bp, Homo sapiens
  misc_feature (62)..(62): n is a, c, g, or t
  misc_feature (79)..(79): n is a, c, g, or t
  misc_feature (121)..(121): n is a, c, g, or t
gggtcaatgttaacattgtagacgccagttgaggtcatggatagatttacattacttttggnctttggaaatggatctnctgtttcatgcataagtaatttggggtaattatatgtgagtntgtcatattaaaaaatcttttgagtttggtgattctattggattgggggggtctatttgagttagtgtcagctgcttatcccaaagaattcttgaattcttggccctagtgagtgtccctcagaatacttgcatttt

SEQ ID NO: 632480 - DNA, 267 bp, Homo sapiens
agcttgaggatcttgtcatgcttcggatggggtctgggcagtggggaaggggccaggcaggggggagctcatacgagtctggctggcacaaggctgagcaggagcccggggtcacagtggccgaggcagggctaggaccaggcccaggtgtgcgggcagaactcagctgctgtggtagatgcggaggcgctgggcgatcgccttggggcaacagcgggcaagggtgcggcagatggcttggcaagcacttgtttggcaaaaggcaga

SEQ ID NO: 632481 - DNA, 917 bp, Homo sapiens
ggagagagagagtactagtctcgagtttttattttttcaatttttgggctctaaagggggtaaaggggttgctatagggataaatgggggcccatattccaacagacattataaggggaaataaatttcctaggaacgcagtggcgcattaaacacgtggggtagtgcaatcccacagaattcacagaacgctatgaaccgtaaagataataccccgaggtatagatgtactagccggttgaaacagatagcgtggaggtatacagaaaccactacgcgaagaaatattcgcaatatagtgagtattttacaaagtcactaaacagtgagtggcgacaacacatccatacatataaagttgtgtaaaacatcatagactagtaggtgatagaatgtgataccatacttatattcatcaccagaaaagatagctgtcgatatataacaaatacgaagccactatcaatatcatatataaataactaatgctactaacattaaaaaacattcaaaattttcatacaatttattaaaatacatgtgaaactaatcatattgaaatatactcaatatagtacgtaacaatcattatcaacataacaaaaatttaacacaaaaataaaataaccaacatatccaatcacatatatacataaatttaaaaaaaaataacacaaattctttctactaataacaaaactacaaaaaacacacaacaacaaccataactaatctagttattgtttacaccaatcactacatttaacattataaacataatcatctattctctaaactcactatacattttcttttatcaacaatcaataataaacacaaaaaacaataagtaaataaaaaaaacacaaaaaatacaatatctaatatgaaaataaattaccaagaaaactaaccat

SEQ ID NO: 632482 - DNA, 195 bp, Homo sapiens
ctgctcgttatgagagttcgctgcgacaggtctctgcagctgtccagttctgaccctactggctattgtaggccagcccccatgtactcaggagggagctgcctcctgcgtaacagctgctgatagacaagagtagtctcctgcttggtgcttgttcgcaggtctgagcaagaggtgttccccggacatgttgcg

SEQ ID NO: 632483 - DNA, 92 bp, Homo sapiens
gcatcaaccttatttccatgttgcgtaagagcctgtgcgagaacagcttaggaccattcagtggttgctcctaccccttctgtcgtcttctc

SEQ ID NO: 632484 - DNA, 384 bp, Homo sapiens
ggtagcagcggtccttcatggctgcagtgcgcacatccagctgtccgtacatgctcacggtcttcatatctgggtcgcagctcagcatagcgagcagaataggagggagcggtatatacgagccatcagggagctttagttagccgatagccaccagttccacatagctcatcagcagcttatcatctgcagcagcaacttccatcatcctccagatttagcctatcttctccaggccacgcagtcacatctatgtacttaaacagcgtagttagggccgccatctttcaaccagaccccagaccgcagatctcgagagtgttctgggaaggaaggcccactaggcaaggccatgtcaccagcagcaagcgcggcgccggttcc

SEQ ID NO: 632485 - DNA, 541 bp, Homo sapiens
gtggcggagattgtccacgcgcaggcgttcaagctcaaaagcctaacccatagactcccacataactgctgaaccccgcacacgcgaacagtccagtgtgtccccaagatgtggccgcagacctagacagctgcagtcctctactgctatctgaaggttcctgacagctctgcatagtacaatttatcaaaggaaatgagtaaagtgccagattctagacccattttggctctgaactgaaggggaggtgggaagcacagtatctcattatgttgcctatactaggaacagatccacacaacacacaggcaacagggatggggggaaacgctgcgtcagccccgcagtcagcccagtgcagcaccagcaccaccccctccacccccaaagcgccttggcccagcagaaaagaaacccgcaggccattcactgcacccagccagagaggccagcctccaccacgcacggcgaaaggagtgaactagctgggacacacacacgtgtgaatgcatgcaagcattcactgcatcttctccgtgaa

SEQ ID NO: 632486 - DNA, 350 bp, Homo sapiens
taaaagtacaaagattagctgggactacaggcacataacaccacacctggctagtttttaaaatattttttgtagagatggggtttcccatgttacccaggctggtttcgaactcttgggctcaagtgatctgcctgcccaggcctcccaaagtcctgggactacaggtgtgagccacgatgcccagctatgtatctctaaaataaagacttttttcttttaaatataatcagaatttcatgatcacactccaaaaatatttaaccgtaattgtttcataccatcaaacatttcagtcaggggcacaaaccagtatctttacatctggttttgaggctctggaggaagcg

SEQ ID NO: 632487 - DNA, 135 bp, Homo sapiens
aggatccccagactattccaagtgatgtatcaggtatgatcagctgatgagaggctccagaaggattctagatcgcttcaagcgtatactgatggccttagctttgtacagtcattgtaactgggatagttgtca

SEQ ID NO: 632488 - DNA, 374 bp, Homo sapiens
tttggtgcctgggatgagcaaagtagtgcggcaggcgaggggaagccggccaggaggtagaggccagccacgcacagcccaggggcacagaccctggtgcagtcccaacgccgagggccacagcgcttccctggcaggctgtcaccccccttccagggaccctggaccgagagaaggggagtcagacagctgaggggagagacgaataaatctcgaggagcggcctctgagtcagggtttccagggtgattaaatgacccgaggcccctggatctgcgtgattgcctgacctgctctccttgtaaatgtggagctgtgttgggttaggatcaaatgtttcaagtttccaacccagctgaagccctgaatattta

SEQ ID NO: 632489 - DNA, 140 bp, Homo sapiens
gaaatctaaaacttgtttccgagactgggaggtaaagtaggctttcttttgctgtattgttttataaggctactttacctcccagtcttggaaacacgttttagttttttattggtttggagactgccttacaaaatacc

SEQ ID NO: 632490 - DNA, 205 bp, Homo sapiens
agtatcagatgttatcagcctcaggagcttacataactagaggcagaaatcagatgtacatgtagactcaggcagcatgtgacacacacaaatgtgggcagctctgagcacaatggtggtcaagtgaccactgaggcccagagccgtaggaacagtctcttagaacagggtggaggacttaaaactgggatggtattgctcagcg

SEQ ID NO: 632491 - DNA, 104 bp, Homo sapiens
tattggcaagcttgcaagttactgctggtggggctgtagccgtctctgctgccccaggctctgcagcccctgctgctggttcttgccccagcttcagagtcctc

SEQ ID NO: 632492 - DNA, 342 bp, Homo sapiens
tcgatgagggcgaactgcaaggagcattgacccgtgttgtggctagaccagagccagaggacagcggcgtcggtgactcgcgcaacacagtgcatggaggcagcagccatctgctcgaagtggctagcgcagtctcggcagccgaagaagtagtgcacgtagcctcggatggctgggaggacctccttggacttggctgcttcctgtgagtggtctacatattgccgagctggctgcacagtcaagaagtggaagaggacccacaggaagcagggaaagccccggaaatgcggctcactcccctggcagccaatccagttcgcccccagcgaggggtaccga

SEQ ID NO: 632493 - DNA, 99 bp, Homo sapiens
tataaatgggggtttttttttttttttttttttcccccaaaaaaatttttggggggtctctgggggctcaaaaaaaaaaaatagccaaaatttgggggg

SEQ ID NO: 632494 - DNA, 114 bp, Homo sapiens
cttggatgtccttttttctaacataagcatttaccagaaatgatccaagttaagttttgcttatgctcggatgtagtatgaccccacgaagtgttgcttgtgtttgtagtttaa

SEQ ID NO: 632495 - DNA, 146 bp, Homo sapiens
caggaagtattatacgcacgtactctccaccagcaatgcatatgtaactcacttgcacaatgtgcacatgtaccctataacttagagtatacataaaaaacaaaacaagacaaaagattggtgtgtatccaatttatttacaacac

SEQ ID NO: 632496 - DNA, 110 bp, Homo sapiens
acggagccgaaactgccgcagcaagaaaagccaagaaccagccggaccaggaaggggaggtttgttccacggccaaattacatgcactaagaggaacagaccaagtaatg

SEQ ID NO: 632497 - DNA, 298 bp, Homo sapiens
gccagagagagatatagagttgattagggagttggctcatgtattgtggaggctgagaaacccaccacagggcattcataacctggagacttggatgctggtggtctggctcagtacaagtccaaaagccttgaaccaggtaaactgatggtgtaatactcagtccaaggctgccttttcaagtctgagaaccttgggaactccaggaactaaaactataactctcacattccacccccaggtcagaggatctggggtcctaatgctcatgggcagttggagaaagagtgtattcctg

SEQ ID NO: 632498 - DNA, 255 bp, Homo sapiens
cttagtctctgctgatatctcctgtcacatgcctgcccgcagtccgctccaacccagcagctctgtttgccctgcgtggagggcttctaccgggccagttccgacccaccagaggcccctgcctgttcctccatcggctccccaggagctttggtttgaggtgcaaggctcagcactcatgctacactggcgcctgcctcgggagctggggggtcgaggggacctgctcttcaatgtcgtctgcaaggaaccacg

SEQ ID NO: 632499 - DNA, 152 bp, Homo sapiens
  misc_feature (39)..(39): n is a, c, g, or t
ggcaacaggcccaaaaaaagaggggaggggaaaaaaaanttttttataaatttttcttggagaaaaaaaaaaatttgttgttgtaaaaaaaacccccccccccccgggggggagaaaaaaaattgtggggggggggaaaaccccacccccca

SEQ ID NO: 632500 - DNA, 118 bp, Homo sapiens
  misc_feature (59)..(59): n is a, c, g, or t
tgtcgatcgagctcggtaccttcactggacactgagtgtaaaacttctcctgtggcaanaaacccggggaaagccaatttccatgatgatgaaattttttgagtaaaccataaatcca

SEQ ID NO: 632501 - DNA, 278 bp, Homo sapiens
agtattgagaaaatccctattgcgagccttacacgtagacctcgctagtaactcttcaggcaatcaagacggaccatgtgttatggccccagatgcacgcatcctgccctcccctcaaccttagttcatcctaacagaccaacctgactcctgcattcatatggaatgaggaaaacagaaaaacaattcaatagtatgtaccaaaagacaataacagtagcaaaccataagaaactactcttagtacatagtaaccaaaaaaaactagaaacgagatc

SEQ ID NO: 632502 - DNA, 1004 bp, Homo sapiens
tcacactaaacacaaaggggctcatgtctttcctaaagggggaccgatcatttgacgcaccgctgcgaaaactccctctgtggggtgacatcaacgcgctgcgctcacctgatggtgttccaatctgatgcccgcagcaattgtgcttgttctgctatccaccaccagacaaagaagtgttggggggtctcacccccccatcctcccactgcgaccttgttgggtgcgacatatcttgctcgcccgtcttctgctttgaaacaaaatttctgcttactctccatgacgatgggtttgttgtcgctcacagttggttgatctccctgcgagcacctcgtatgtgcattcatcatatgtgggttgctgcatcattattctcccctcatctggctgccttctatttggatgtcttgcccctgtcattgtcgtcaacctagtgagtagttgtgcccacccctccctctgcattagcccttcttcttctccaatgtctcgccgtgggtggtcttcctctccctcgccgccacaccaccacaacatactggtgtgtcacccccccctcgattgttttgtcgccgttctccctctgtgtcgccaccccaccgcgctgtcttttgttatggtgggaccaaaacaacaactatacaacagtggggtgcgccgctggggcacacccctcgtgtgtctcttcgaatgatggagtagtttttatgtgctcctcgtttgttgtccacaccactccgttgtgtctgctccgataataccacacgcgcttcgtagttttgtcgacgcaaaacacgcagtgggttgtccctttcctctcctaccccccgtgggtccccccttttgtgcgggggggggtggtgtgcccccccctctaacagatccccccacccgccccctttgggttccccgcccccgcctcccctttttttttgggaaattggggccctttttttaacaagttttttcccccaccaaccccccaaactttgtggggggga

SEQ ID NO: 632503 - DNA, 494 bp, Homo sapiens
  misc_feature (22)..(22): n is a, c, g, or t
  misc_feature (34)..(34): n is a, c, g, or t
  misc_feature (58)..(58): n is a, c, g, or t
  misc_feature (167)..(167): n is a, c, g, or t
  misc_feature (200)..(200): n is a, c, g, or t
ttcgcggatctcaaagatcttngagcatcacttngaataaaccctgcctgggcttttnggtcctggctgccctgtttctgctatactgcattctcaccggccccagtttatgggatcagaggtggatatctgaccaaggagaaacaagctatttcagccaatcagantctctgactcaatattttagtacctgaactgcnttaatgatgcagcactggactctttgtactgacagtccagaactgtattgattcttgtctttcctgagatcattccatttccttttccttgtagaccatggggtgatatttttataatgctccttttaaagtaatttattatttaaagacacatatacagatggtaaaatctataaagaataacgagaataattatctcaaagagcagcataatggttgcctctgaaggagagggagggagatattttcagacaggggcaaatatggactttttttttttttttttggggccaa

SEQ ID NO: 632504 - DNA, 151 bp, Homo sapiens
  misc_feature (143)..(144): n is a, c, g, or t
atgacggttctccattacgtcgatgacttgtgaattaacagattccagaaggaagactcgaagccgtctcagttaacagttctacacatttcccactagtttttggccttggtttttcatggcattttcagaagtgcacaacnnttccctc

SEQ ID NO: 632505 - DNA, 815 bp, Homo sapiens
  misc_feature (423)..(423): n is a, c, g, or t
tggcccgatcctttgattttaagacggtattgttggccaccccagattacagtgaccccgctctcaactgtcttggtgtggttggacacgggcacacaggtacgtcacacggatctcctccccacggaggcgacgatattgaaacttctgtcgtgagtaaggatgtaaacccaccctcacagtgggtgtgcgagagattccccctagcgctgagaactagcgaggctctctcttttcagaggaatagcagtgttccccccacactctcctcacaaacgctctatttccacacacgacactgtctttcgacaataattaagaataaaatgttgttgtctataggactcagtgcgcgtcgacagtttgggtgacactctgagtgccgtgtatgattctccacccacctactgttagtgggagacncagtcacttcagggcccagcggggttgacttcccctctctagtggaccctccgccgagagttttcaccaggccctcgctcctctgggtggctacaacgactgtgcgcgacaaacactccctcactgttggtcttcttgtagagcataattgcatcacatctatagttctggagttttagaggacaacaccccaccgtctatatcccctcctatgcttcgggagagctcagtaggacaacaagatttaggtaataacctcgggtagtccccagagggatccgccgtggtgtaggaatacacaacaccctgtatactcccgccccagcggcgaaccaccaatttgtagtgctctccttattacaaaccaactatataaaaaataccataacaca

SEQ ID NO: 632506 - DNA, 237 bp, Homo sapiens
tgagataatagtagagtacacatgcaaatgtaaaaagaaaccccatgtacagagatccagtgtgcacatatagacattctacccactggtcacatgttgcaacaacaccaagaagactagagttctatatagatagtcgatacgaagtccctccacagggtaccttaggggcccttcacaactgtgtatcccttcagagtgatgttcacattttctggaatgtcaacagtctgatag

SEQ ID NO: 632507 - DNA, 455 bp, Homo sapiens
  misc_feature (106)..(106): n is a, c, g, or t
caggcttcagtgtttgtaggaggaaacacagcaatcacactattaatagtaaattaaaataaatgggcaactgctgcatggtaatacttttttttttaaggcaaanaataaaaaatagtgaaacagagaaacaaaacatgaaacaccggcagtcaacaggcaggcaaagaacctgggggtgggggtagcagcggtcccaccctcaaaaggcccgggctgcccagaccaagagaaagcgatgaatctcttctggtaacgtcccttcctgtcgcatggattcaaggccgacctgccccagcaccaccaccagcagccttctgctggggccggcacagctgggagcaacctcctactctcaggcagacgcgcagcaccaagcagagaggcccggtgcaggatcccagcgccgaaccagcgccggctcagtggacgcggaaggggccggcggccgcaag

SEQ ID NO: 632508 - DNA, 940 bp, Homo sapiens
  misc_feature (351)..(351): n is a, c, g, or t
  misc_feature (456)..(456): n is a, c, g, or t
cacttatcagtctgaatctaaatatggtttatcactttaaacaagagtattgtatctcgtagtaggctccagggatcattctacatatatgtacaaccactagattgcagctgggtcataatactatggttgaccaagagccagtgtggtgctgttggaaaatgtcctagtggtcgaagcacatacaccacagcataacagaggcgtcgccatggagaaagtccaccccagtggagtagcaatggtgtgagagaactggttcacatcatgttacagtctacgagggacatgaacgagctaagatctgcttcagtaagtgttcgagtgctagacaatgactgtacgaatagngactgagctgatgatagcaatatcgtaggtgtaggtggcaggtgggattcaggaggaaggcttgctaggctacgaaccatgagaagcagcagcactatctattgncattaaccaaaggaatgcatgcttgtacttttgaagaatccaattctatgttcagaaggagagccaacagggagccattgcatgtgagcagggtcatggtaggaacaaaacaagtgttataaggtatagatcaagaaataggttctataagatggcactttcgaatacttactgagtcctgttcgccagtggcactttttgtggtgaagtagcgtaactatctcaagtgaaaagattagattgttcctaaggcgagagagattggaatctctattgtgtcctgtaatcgagggctactagtgaacggtctgggagaggattgatggtacatccaaatcttaataacctactacttctctcttcagctaaaaaatggacagaacaggaattaaatgcgggactttcgaatgaaatacgggacttattaattcagggaatccaatttggctgtatatacaggtaggaggcattccccgaagtccaa

SEQ ID NO: 632509 - DNA, 631 bp, Homo sapiens
cttcccggcggctgattcgagggcttgtttggtcagaaggggggcgtcagagaagctgccccttagccaaccatgccgtctgagggtcgctgctgggagaccttgaaggccctacgcagttccgacaaaggtcgcctttgctactaccgcgactggctgctgcggcgcgaggctggttgtggtgactcatgcccataatcccaacactttgcgaggctgaggcaggacgagtgcttgaggccagttcaagctgggagccaggcttggtgtctcacacctgcaatcccagcactttggatgttttagaagaatcctcccctgcaacaccaaatggaaccaagggcaaagatgagtcccagcacacagaatctatggtacttcagtcctcacgggggatcaaagtggaaggctgcgtccgaatgtacgaactggtacacagaatgacaaggaacagagggcctgaggctatggcaggaggagcaggagaggaaggtgcaagccctctcggacgatggcatctgacacaactgaacgcggttgatgaatggacggaacctgaaagcagcataaaagaattcccaggacttgcgggaagtacatggacgaacagctccagagaagcctgggacac

SEQ ID NO: 632510 - DNA, 530 bp, Homo sapiens
  misc_feature (106)..(106): n is a, c, g, or t
caggcttcagtgtttgtaggaggaaacacagcaatcacactattaatagtaaattaaaataaatgggcaactgctgcatggtaatacttttttttttaaggcaaanaataaaaaatagtgaaacagagaaacaaaacatgaaacaccggcagtcaacaggcaggcaaagaacctgggggtgggggtagcagcggtcccaccctcaaaaggcccgggctgcccagaccaagagaaagcgatgaatctcttctggtaacgtcccttcctgtcgcatggattcaaggccgacctgccccagcaccaccaccagcagccttctgctggggccggcacagctgggagcaacctcctactctcaggcggccgctcccagcaccaccaccagcagccttctgctggggccggcacagctgggagcaacctcctactctcaggcagacgcgcagcaccaagcagagaggcccggtgcaggatcccagcgccgaaccagcgccggctcagtggacgcggaaggggccggcggccgcaag

SEQ ID NO: 632511 - DNA, 885 bp, Homo sapiens
cggccacactcgactgcccccaaacaaattgaaaaatagaaattttcagcaactcgagagaggaggtcttgtaaagctgaaacctcatgaggaacctcttcgttctgagattttcagtggaaaattcaccatcttagtccacctaatcatcctgtgaaagtggattctctatggaaagctctgtttgctcactacaaatacatgcttattccttaagggatgcgacacagtccctgtgcacctcaccataacaacccccccaacacaaccttgtcagggccctcaatacccctcttacagaatgcaaacctattcatctcccacaatccccattatcctcatttaaacaccctaatccacccccccaccccccacaacacctacaaaacagcaccacgaccccacccccacacactcaataacacccccacctctcttctctccacccaccccatcaaagtaaaaccctacattcattcatatcacaaccaccttcccacaccaccccccccccttaaacactgataaaacgttatatcccacccccaccccaccctaaccacaacacaccaccacacccacgctcaccacattaacccctacgactccgcgacttagtacacataacactataataaatctcatctcagcgaccaaatgaaatactatcccgctctacacgcccctgatccatcgcgtgcatctgtatcgtgccccacgcactcctcctgtcgatctttcatagtaagccaatcataaatcgtcttcactgccctccactccttctcaacattacaacaacagaacactcttagccccaccacgactattattcgatatacccaagatcaccatcgcaagttgtatagtttagtaatggtgagt

SEQ ID NO: 632512 - DNA, 411 bp, Homo sapiens
ttggaaaaacatgtatttttaccgtgcacgtaaattggtcagcagaaaagtgatcccagttatggctgcagatggatcatgtacttgctgggttttccttttctttgggactttgaggggaaatggtttttagaggtgagggttggtccatgtgtaggaaagaatgtgtctctgttggtggacagaggaatcttgggattccatcgtatttctttcaatctgctcttagacactgcttgtcaggtgagtctgcccttagactgcatgtccagaacccctgcctccatttttccaagctccgtggtgaataaccactaagtgaaagtaagaaatatctatatatatataatataaaatcacttggtgatttaaaaaataacttctttataaattaaactccttaagtcaaaa

SEQ ID NO: 632513 - DNA, 862 bp, Homo sapiens
gcggagaagatgcaggacctgggggtgatctccagcatctcgctgtcctggttcctgaccctcttcctcagcgtcatgcccttcgagagcgccgctggtcatcgtcgatgtgcttcttctatgagggcatgaaggtgatcctgcaggtggccctggacgtcctggacgccaacatggagcagcctgctgggctgtagagagaagggcgaggcatgagcatgctgggacatgatacctggatcattgtggtcaacaagccgagagtgtctctcctcctatacccgaacctccgtgccttgttgagcaggagcgatgaccgccacctggcagaggtggacatctctgagctcctgtagaagtgtcctcatgcagtaagattcagcgagcctgagggccgtaagacattgtagcatgatgcggttccaacagaggctgaaagtgatccagtccttggaggacacggccaagaggagtgtggtccgagctatacctgtggacataggtttctccattgaagcgctgagaggacctttacatggtgtttaaggcaagcacctggactagaccagctactgggggtgcagcctgcacaattggacggaccgtctgggaacacagacatgacctacctggagcaagtaacgagattgatgccagcaagttccgggaactctttgccagcctgaacccatggacctgtgggctcaccatagcactactgctgggcaagggagccatgtacacggctacctggacgaaaacaaggactcggtgatacaacttcaaggaagtcgtgacaggattgacgggatgtaccaagggacctgaagagaaggacaaggtgatcaaaagtagacataca

SEQ ID NO: 632514 - DNA, 1179 bp, Homo sapiens
ctctctccccggacagcatgagcttcaccactcgctccacgcttctccaccaactaccggtccctgtggctctgtccaggcgcccagctacggtgcccggccgttcagccagcgcaggccagcgtctatgcagtgcgctcgggggctctggttccccggcatctccgtgtcccgctccaccagcttcaggggcggcctggggtccggggtgcctggccaccgggaatagccgctggtctggcaggaatgggaggcatccagaacgagcaaggagaccatgcaaagtcctgaacgatcctgcctggccatcttaccttggacagagtgaggagcctggagtaccgagaaccggagtgctgtgagacgcacaaatcccgtggagcacttggacgaagaagggaccccaggtcaggacgcacgtgggagcctattacttcaacatcatcgacggacctgtgggctcagatcttcgtccaatactgtggatcggatgcccgcgatcgtttctgcgtgcattgacaatgcccgtcttgctgctgatgcactttgagtcccagtatgacgactgattctggctcatgcgtcccatgtctgtggcggaccgactatccactgggctccgctgggctctttgctgtacaccagatatcacactgactgcagctgtcagacctgagatcgaggctcatcaaaggaatgagctgatcgttccctgatggaagaaacgactgaagtagtgaagttgaaaggccctacatagcccgagaattgccagctactgaggttgaccgtggaggtagatgcccccaaatctcaggtactcgccgatgctccttggccggacagtccgggcccagtattacctaggctggctcggtgagaactcgtcgcggaggtatccaaagtgcgtgtctcggcagcactggggggggaaaccccccaaatgtgcgttcgccacaacagtactgactcgaggtttgcaacacggcctgtaacagaaggctccagagagaagtgtgaccagtgtaaggtccatccctgttaaagattatgcccgtgcgaccttcgagagacaaacactgataggtgacgctggtggacaaagcttcgtgatagagatacagacgaaatcacagccacgagaggagcactacgagtctagtgcaaaaagaagaagag

SEQ ID NO: 632515 - DNA, 266 bp, Homo sapiens
  misc_feature (43)..(43): n is a, c, g, or t
tgatgtcaggataatcacctgatgcagtgaagcagcgcttccnattggtggtcaccttttgctccagtcaaggttacaacggacgtagaatctgtctgaaatgcaccatgaatgctttgatgtgaagctctatccgtggggacgaatgttgggctccaacagtcaatgaatgtgtctgtcaagagatgttctgtcgtgacaacgtatgctaggtgacagcgcaaaagtgacccaccaagtggaagcagctggcgttcactgctcag

SEQ ID NO: 632516 - DNA, 674 bp, Homo sapiens
agaaagaagtagtgggaaggttatttaaagactctacttttaaatcaggcgtggcagctcacgcctgtaatcccagcattttgggaggctgaggcaggcgaatcacttgaggtcaggagttcaagaccagcctggccaacatgtgaaaccccatctctactaaaaatacaaaaactaaccgggcatggtggcgggcacctgtaatgccagctacttgggaggctgaggcaggagaatctcttgaacctgggaggttgcagtgagctgaaatcacaccactgcacttcagcctgggtgacagagcaaaactccacctcaaaaaaaaaaaaaagattctacttttagaaatttcagacctagatggattggctttgggataacaaatccctacctatagccatgtggaagcagctgtgtcactgttttttaccggtgtaccattttttggagggcgaaattagacagtggggccctctttgaacacctaccttttatcactgaatattttagacggtcctccagtatctgcagtcagagttcatggtacttgtgtcttttacccccaggtggcattcttagtctaccttcagtgagacttgcgttgcacgggagggggcgtatgtgcatcctcggcctccgttgtaaccggctgtccgtcatgctggtgcctgccc

SEQ ID NO: 632517 - DNA, 176 bp, Homo sapiens
ccaggttagagtctacgagagtaggtataggtgcggtgggtgaaagagtatgatagggtggtgattgtgataacttgaatgagtgtagaagctgaataatttatgaaggagaggggtcagggttgattcgggaggatcctattggtgcgggggctttgtatgttaggtctacctgg

SEQ ID NO: 632518 - DNA, 187 bp, Homo sapiens
gccgcccatgcacttcggtaacgaaaactggacaattgtatgaggcatgctcgttaccttgcagctagggtgccattatgctgcaaagagcaccagcaggcccttgatgttcttgacatggagagcccatcaataaagattatttgaaaatacttgagggacgaaagtggcttcaaagatccttccg

SEQ ID NO: 632519 - DNA, 316 bp, Homo sapiens
cacagactaaacaacatagcaagacctcatctctaaaaaaataaataaataaaaaacaaaaacttgtgtgccttcgcattctatttaccaatataaccaaatgatctcggccttcacaccatcttcttggacacctctgcaccatgagagcctagtggaggacgcgactgcgcaggctgaagcgcaaaagacgcaagatgaggcagaggtcccagtaaaccacacgctaatgcacccatggaggctccaggagcagaaacatggaatccagaggctggggatagctggtacagttattgggctgcatgctactgtc

SEQ ID NO: 632520 - DNA, 487 bp, Homo sapiens
  misc_feature (54)..(54): n is a, c, g, or t
  misc_feature (78)..(78): n is a, c, g, or t
  misc_feature (92)..(92): n is a, c, g, or t
  misc_feature (94)..(97): n is a, c, g, or t
  misc_feature (99)..(99): n is a, c, g, or t
  misc_feature (111)..(112): n is a, c, g, or t
  misc_feature (114)..(114): n is a, c, g, or t
  misc_feature (135)..(135): n is a, c, g, or t
  misc_feature (142)..(142): n is a, c, g, or t
  misc_feature (177)..(178): n is a, c, g, or t
  misc_feature (180)..(183): n is a, c, g, or t
  misc_feature (185)..(185): n is a, c, g, or t
  misc_feature (189)..(189): n is a, c, g, or t
  misc_feature (208)..(208): n is a, c, g, or t
  misc_feature (211)..(211): n is a, c, g, or t
  misc_feature (214)..(214): n is a, c, g, or t
  misc_feature (216)..(217): n is a, c, g, or t
  misc_feature (220)..(220): n is a, c, g, or t
  misc_feature (225)..(225): n is a, c, g, or t
  misc_feature (229)..(229): n is a, c, g, or t
  misc_feature (232)..(232): n is a, c, g, or t
  misc_feature (240)..(240): n is a, c, g, or t
  misc_feature (243)..(243): n is a, c, g, or t
  misc_feature (264)..(264): n is a, c, g, or t
  misc_feature (266)..(266): n is a, c, g, or t
  misc_feature (275)..(276): n is a, c, g, or t
  misc_feature (286)..(286): n is a, c, g, or t
  misc_feature (319)..(320): n is a, c, g, or t
  misc_feature (322)..(322): n is a, c, g, or t
  misc_feature (351)..(351): n is a, c, g, or t
  misc_feature (357)..(357): n is a, c, g, or t
  misc_feature (366)..(367): n is a, c, g, or t
  misc_feature (371)..(371): n is a, c, g, or t
  misc_feature (386)..(386): n is a, c, g, or t
  misc_feature (415)..(415): n is a, c, g, or t
  misc_feature (457)..(457): n is a, c, g, or t
gcgcgggggaaaacagaaaatatattattgattcaagaatattttgcacttgantgataaactgcgatagctttttcngggcccctactggngnnnngngggggggggtgnntnggggggggctccgcctccggngggggtngggggggtcggtcggggtccctggggccggcgggnntnnnngngttnggcgttggtgccctcggcnggngcngnntgnggggngggnggngtgcgtgngtngggggggggtccggggctgtngngcccctgcnnggggggtctncccggggggggggggggtcttcggtggcgtttnngnctgcgtgcgggttcggggtcggggtgggngggggngcggtgggnntggnaacttcatcgatatnattgttttcagactgattttccattttanccagagcagaactgagttcttcatccttctttttcaaaagtnctatgtttttatcaacctcggctacttctt

SEQ ID NO: 632521 - DNA, 233 bp, Homo sapiens
ccatcgcttagagccttaccctccagtgctgaggagtatgacagtactttgatatttatatactctaaagcattcttcaaacttttctacttgtattgtcgttgggatttaggtcagcccaggagagaaagataactgctaaaattcccctataccccatcctttcttgtccttaccccttcagatggagacttcattatgttactgaacaagatatgaagaaaatggcactc

SEQ ID NO: 632522 - DNA, 178 bp, Homo sapiens
caggctggaccaaagccgacatacacccatcccttttttcttgttgttttgtgaaaacaaacggaaactgtttcttttttgtataaatgagagattgcaaatgtagtgtatcacgtgagtcatttgcaggttttctgccacagacctgtgggctgccttatattgtgtgtatggtcgg

SEQ ID NO: 632523 - DNA, 917 bp, Homo sapiens
  misc_feature (1)..(1): n is a, c, g, or t
  misc_feature (3)..(4): n is a, c, g, or t
nanntgtatgtgaggaatagttgttagttatatagtagtccgcagtgaatacaaattggctgtgtgttacggaaacgtacgcaacatgtgaaccaggactgttaacaactgggttctggcagattcttgtccgtgccgtgtgtacccaccgtgcttagttctgtcacgacacctctatcggtattccccctccgccccggtacccagttcggcccagggcctgggccgcttggatcgggctaacaagcccatggacaggtggcaagcaatcatgtgggaaaacgctctcgtgtgtcgaaagccccgatatgccaacctgtatgggccccctccagggaatgccactgggtaaggaccccccgttaatatgcttttgctagacccgtatgccaagagatgaataaagcacggggccactcggttctaatttcaaaccacctttttagacctctccaccttcatttactttgcacagggaaccttttcccaataaatttgaaaaaaaggcgacacaccctgtgatattaggtgactaccccgctgtaagtatctgtgcaccgatttataaaacaccaccggtgggccaaacttgcacatatagcagtaaaatgtgtcatcaccgtgttagtactgaacttctcactgtgagatcggttagattcacccgctggacaaccaccctgcattattttatgaagtcgcacccctgagtgtctttaaatagttgcccaaagccctttgttttacaggctatgtaaaatgcttctcttcgcgtattgagaataacgaattgctttggctcaacaagcccacttagacttaaatcacgagagcccgttattaacaattaccacatttttaaattttgaaaaaaaaattttaaatccccaaaaaaacaaaaaaaacaaagataaaaa

SEQ ID NO: 632524 - DNA, 1584 bp, Homo sapiens
gtgcacgggtcggggtcgtcttcctgttcctcgctattattctttcgtgcggtaggtggacgactgtcgttttcctcgcgtgtggtgtggttttgcctcccccacctttttgttgtttcgacttcgccccatcacgatggttgttgtttgttgtgttgatcggttctaccttcactcgtctgcgtcgccatccgcggcgcgtggttgttttttgtttatgccgactgatagttttattctctgttgtggtctgcgaccgcgttctctctcttctttttttgtctgttgtccttcccgcctgccgcctccgtcttcctgccaatagttgcgcctgatgggttgttgttctgctgcgccgtccgcctgcgtcttgattattgcgcgtcccgttgtttttggttttggtggctcgcgtgtgggttcctctacccctccctcttcgttgttgttgttatggcgcccctctcctttatacttccccttcatgagtgtctgttggcggcgtccgtctccgtggttacttctgcttccagcatgagtggatctgtgtgagagggatgtgtgtgtgtgtgcgatcccttctcgtgcggcgccgcgtttatagtgttctttctttttcttcttctgttttttgttgttgtgtgttcgtgttttgttttgtgtgttttttttttcttcttctctcgtctttgttgtggcgcggctgttgtgatgcctcctctcgacgcgacatgttgttgtagttaaaataaccactgtcgtgtgtactgccgccgcggcggcaaatgagggtgtgttgctactcgccactcactgcttcttcgtccgccgtgttgttgtgaggttgcgcgagactcttactcttctcttccccttctcctacactattgttttcctctgcacttactaagtggtggtggggccgccgacgacgatgagattctcgtagtcgttgcgagtagtcgcactcgactcgtggtgtgcgcgtgttgtgtggtgtgagagtagtatagtgtctcttctgtcgctctactatatatagtagaggagatagtagcgcctcgttgtggtgtggacacaccacgagagactatagtctccctcgtttgtcgcttcttcgtctctcatagaatgaacgccgcaccgctcacactctctgtcctctgctgctcacacagagaagagtagagtagtgggcgcccaacactctctctctctctcgcacacacagtctctcacacacacacagcgcgagagagaggtgagaagagcactctggtgttcgtgtgttctctctgtgagaaagtagagaggtagagagagcgccgacatatatctttttctgtatatgtgtgtccccgagaaaacctttttatattgtgtggtttatatgtttgagaatagagagagagcccttttgggcgcccccccttctccccctttttgctctcccccacaccttgagagaaattatgaaagcttttggttttccctcggggatgggtggagcctccccaccggctttcccgtacacccgaacttgggacccccttgtaaatatataaaggcccccccctttataaa

SEQ ID NO: 632525 - DNA, 791 bp, Homo sapiens
gtctctgaccccaaggagtggcagaagatcccttcactcagagaagcaaggctgatattagcttgtgaagtgtaagagacacaaatgaagaagaacaaagagcctgagaaagcagcaagaggtacaatgagtgaaaaatacgtggagttgatgagaaaggggagccaaggtctttatacgtctagagaaaatattcagtagctgagatccggccagtgatagcctgtgggcaccagcagcaagggctgcatgggatacagcacccatctacaaagactctattacataaacagctgcttcttacaggaaacaaactcttctgggatctcctttgtgaaaaccagttgatgtgctaaagagtaaaaagtctattgtccagtgtggtcttgtgcgagaagcaggcagattggccaagtgtggtttttgcccctccacgtcagaaagccctgcctttcccttcagaaaacgatggcaggcattcctctgagtttacagagcagagactcactccagccaaagtgagctgggagttcagaaccatggtggaataaagaaatgtgcatcgtggtctcttctgtggttgaatttcatatcagattaaatttctttagcatgttgggtaagtctagatattagagatgaggtgtgcctaatccctggcaggtctggtgaatagactatgatgggttccatgggaaaatgactcttttactattaaaagacaaagaaaggttgatgcggattttggtgaaggatgtgatggacaaggtccaggggaggcgctggaagga

SEQ ID NO: 632526 - DNA, 557 bp, Homo sapiens
cgtcatagctgttccttgagtaacaccgttacctgccaggtatatacgcgattactgagatggctgtgtcagatggtatttcttggtgtctaatcctcaatgaaatcacccaatgtctttcacagtggttgaacgtaactttacactcccaccaacagtggttcaagcattcctatatctccacgtcctctccagcatctgttgtttcctgactttttaatgatcgccattctaactggcatgagagggtatctcattgtggttttgatttgcatttctctaatgaccagtgatgatgagctttttttcatatatttgttggccgcataaatgtcttcttttgagaagtgtctgttcatatcctttgcccactttttgatggggttgtttgcttttttcttgtaaatttgtttaagttcattatagattctggatattagccctttgtcagatggatagattgcaaaaattttctcccattctgtaggttacctgttcactctgatgataggttcttttgcagtgcagaagctctttagcttaattagattccattt

SEQ ID NO: 632527 - DNA, 232 bp, Homo sapiens
tcacatgtatctacataactatcttgtcagataacacacaatataaagagccttatgaaaaacagagattacatatacttctaaagtcttatggggaatatcctgtgggcatgggataaccaatcataggtgcagctgcagtagcaggatatgcatatgcctgtgggttcataccatggtgcatattgggaacattacttccgtatggctcagcgctatcataaccattctg

SEQ ID NO: 632528 - DNA, 738 bp, Homo sapiens
gacagaactcgccccgccaccctgccgccccgtctcgcccgggcactggcccccctcgtcgccgcccctcccgcaccctccgcggcactatgcccgccctcgacacgcccgtggcagcgcaccgctgcgcacgggccgatggtcattggctggctgccgtggccgccgcgctggcgtgggcggggtccggctcggcggggttgctgtgggcggctgcgtgcgggctggctgcttgggggctgcgcgtggtggggccgggcgggtggtccgctgggcgctctcggtgtgccttggtggggggccgtggggctgtcggggccggggcgttgtgcggtgcacggcacgggtggcggccgggtggcccgggctggctggctctgccggggtcgtggtctgttgccccggtgggcggcctggtggggtgcggtggctcggtgccggtgcggtgctcgcgcctgcggtgtgtctgtgcggcggtgtgcgtctggtcatgtgtgaatgccagggcggtgctgcttggctacgcacatacccgtgggctgcgcggcggtatgcacatggttggctcgcgcatcgtggatgctcgttgctccctatgtcgtagccaccgtgtcgaatctcgtgaacgttgcagaccgtgcggcgacatcgcacgttcgtgcttgtgtcaaccgcttgccttggcaacccgtccgtcatgggcgcgtgaagcaggagtccgcactgctgactgcgcga

SEQ ID NO: 632529 - DNA, 196 bp, Homo sapiens
  misc_feature (111)..(111): n is a, c, g, or t
gactacaaatgctcggagtacactggaacgtagagaacaagctagcagggctatgaggaaactacttcttcatcttccgagaggtgacgggtttactacatgagttgaaancaggttcgccttagtaagcgccgggccaggctggggttcagtcaggcaccaacgccctgcttgtggtcaaacatcgggacatgaa

SEQ ID NO: 632530 - DNA, 122 bp, Homo sapiens
agcgtatcccctatatgtcgccagccgctattgcgaatcggaccggttggagggctttgtgcgtcggcggttcggtggactatcgggcggcgcgatggccgccgcgctggccgactgggtcg

SEQ ID NO: 632531 - DNA, 189 bp, Homo sapiens
gaacaaccgccccccacagctgaggattgtggggaggtgtgtgctgggtgtgtgtgtgtgtgtgtgctgcatgcactctacaggcagggcagtcctggcatggggctgttctgggctagaggggccggtgtgtgctctgggtgccccatggccagggctctcctctagacacaggctcagtctgctgga

SEQ ID NO: 632532 - DNA, 1350 bp, Homo sapiens
ggccctgtggggtcaggcccaagcgggcagagcattccatgatctacttcttccaccactacgagctgcctgccatcctgacagcaggtccgcatccaggagatgctagcttcaggcgccgccactgggccccgggaaccccaggagacgcccgatgacatgaacaacaactcgggacggcccggactacagaacactgactctgacggaacagcaccacacaggccatgggaaccacgaaatcgaccatggaggcaaagcgtggaagtcaccgaggacctgatggaaagcggacagcaccaaaaacacaatgaataggaacagcaggaaaaaactacagacgagacaacaaagatgaccagagaggacattgaaacacaatggggggataagagaacatgggccacagcacagaacacagccagggaaaaacaatcaaaagtcaaacaagcacagacccatacccgtaagccctgactcacgggaaacatgacaacggccacacaacaataacatgacaaaccagcaaacgacacaagaacacaggacccaggaactcgagcagcaaccatatgcccatcagcgcgggcccatcacgcggccaagacaagcgagaaccaaaaggaggaaaacagaaggagagcacggacagaaagagggaagaacaaaggaacagcatagaacagacaaacacaaagaccaagacaataggcgagaggacgacagggaaaacgacagggagagaaagacaggagaagaaaaacaaaggaacacaaagaagggcacacagaaaacatagacaagcgccggaagaagatacaaacaaaacaagaaaaagaaacgacggacgacaacagacaaccaaagagacacgacaaagaggacagtggcaccacccacaaacacagcaagacagagcagaaagagacaggacaaagacgcggggcaaacccgcaggaaagaagaaccaacagaccgagcaaccagaacaaacgcacaggaaagaaaaggcacagcgaaggcacgagcaacgcagaagacagacccgcagccgagaacgaagaaccaagagacacacagacaaacacaccgataacaggcgcaggcgagcgacaacaggaaagaagggccatcgacacgacgcggagaagagcagaagtaagagccacaacgcaaggctcagaccagcagcaggcggcggagacaaaatgacaaacaagcggaaggcaaaggcgcaagaacgaaaagcaagggacgagagacagggcggacggaacggagaaaggaggatagcagggagcaaaagaggccgcgagagcacgagaaagcaaacaggacggacggaacgac

SEQ ID NO: 632533 - DNA, 121 bp, Homo sapiens
gcgccgatatagaggatccccatcgcgtgctgagcattatccgcgtcagaccatgaatcagataggggcatgcatccggcaatggggagtgacacttctcttgcttgctgtcttcacctcc

SEQ ID NO: 632534 - DNA, 151 bp, Homo sapiens
  misc_feature (2)..(2): n is a, c, g, or t
  misc_feature (95)..(95): n is a, c, g, or t
tntatatgaagttttattctcaaaatataaaaaaaaaaaaacaaaccccacacaccaagggactaagatgatgttatttacagtcacttgcttgngaagaacacaattcaaactaatggacaagttcctccatgtgctctaggtattcaaa

SEQ ID NO: 632535 - DNA, 102 bp, Homo sapiens
ctccccaggtaggcgatgcatgtttcaaatatggtgactggctaactggatgatacctgggaagatggtgaaaggaatgggaggtgctatggatttagtgtc

SEQ ID NO: 632536 - DNA, 457 bp, Homo sapiens
cggcgttatcaacacacacaagcttctgatgacctggatgaagagcagacacaggtgcacacggtgctgtgtacctctcagcaccatgatgatcccaaagcaaaaagtgtgtttgaggtgttgaaagaaaaggctggacctggctgtgatgttgaattgactgctagttctgggtggtgtaaacaattcaagaatcgttattcattacataatgggaaagtggtgagtttgtgagtgctgatgtaaaggcagcggaagaattttgggaaactctagatcagctgagtctggaggaaaatcacttgccagaacaaattttcaatatggatgaaacctttctattctggaaacagatgcctgaaaggactttgatccatgaggtagaccaaagcaatgccaggcttcaagtcttttagggactggatgacagtcttgcttgggggcaatgttgcaggcc

SEQ ID NO: 632537 - DNA, 167 bp, Homo sapiens
atttccaagtcaattttcttttacactaaaacccaagaatctatctttctaggtctcatactcagttcttaatgtagtcacttagtaaataacctgaatatgcttgtataatccacactaatttaagggtgaattcctcattccgcttttcagatcatggggtacgg

SEQ ID NO: 632538 - DNA, 326 bp, Homo sapiens
  misc_feature (34)..(34): n is a, c, g, or t
  misc_feature (48)..(48): n is a, c, g, or t
ctgcttcagacggaaggagtttaaagggaagatntgggcagaattganagagcagtgggcagccaggcgcagtggctcagcctgtaatccccgcactttgggagggccgaggcaggtggatcatgaagtcaggagttcgagaccagcctggtcaagagaccagcctggccaacgtggtgaaaccccttctctactaaaaatacaaaaatggccgggcgtggtggctcatgcctgtaatcccagcactttgggaggccgaggcgggcagatcacgaggtcaagagatcaagaccatctggccaacatggtgaaaccccatctctact

SEQ ID NO: 632539 - DNA, 442 bp, Homo sapiens
gtgacgcgtaggtcgatgctggttccctgtggtgttggtcggaattggggggcagagctggttccctgtggtgttggtcggatgggggggcagtgctggttccctgtggtgttggtcggatgggggggcagtgctggttctctgtggtgtaggtcggatgtggggtggggcagtgctgtgttccctgtggtgttggtcggatgtgggggcgtgctggttctctgtggctgttggtcggatggggggacagtgctggttccctgtggtgtaggcggatggggggacagtgctggttccctgtgcgtgttggtcgtgactggggggacagtgctggttccctgtggtggtgtcccttcttgctgtgcagggtggagggcatcttgccacgaccaaaggagccattgaccttcaccgtttctagaaggtatgttgtatgttcacc

SEQ ID NO: 632540 - DNA, 471 bp, Homo sapiens
  misc_feature (3)..(3): n is a, c, g, or t
  misc_feature (121)..(121): n is a, c, g, or t
  misc_feature (132)..(132): n is a, c, g, or t
  misc_feature (278)..(278): n is a, c, g, or t
  misc_feature (291)..(291): n is a, c, g, or t
  misc_feature (334)..(334): n is a, c, g, or t
  misc_feature (460)..(460): n is a, c, g, or t
  misc_feature (471)..(471): n is a, c, g, or t
ctnaaagtagggctggtgtcttaagttgtccttaacatgcacttagggtaaggaccttggggaggaaacatcatcatttcccaaagattaaggactagccccagacatccctagttttaanactcatttganctgtcctcccagagattttttttttttttttgagacaaagtctcgctctgttgcccagactggagtgcagtggcatgatcttggctcactgcaacctccacctcctgggttctcatgcctcagcctcccaagtagctgggattacnaggtgcaccaccnacgcccagctaattttcgtatttttggtagagatgaggtttcncatattggccagactggtcttgatctcctgacctcaggtgatctacccgcctcagtcgcccaaagtgctgggattacagcatgagccactgcatctggccccagatattaaagttaaacctctgancaacccacttn

SEQ ID NO: 632541 - DNA, 248 bp, Homo sapiens
  misc_feature (41)..(41): n is a, c, g, or t
tccttactgtaagagccatttaaacgattaaaatcccactngccataccgtaagatgataggaccaaccatacctaccgatcaaaaatttatcaatccaagccaactacactcccactgctaaaaagatgaaaggaccaatcaaagatttaattaaactaaagggaaagaatcagagacagagaatgaagaaagaaattctaagttgcgacggacaaaccagaacagacaatgaagcctttcaactgc

SEQ ID NO: 632542 - DNA, 130 bp, Homo sapiens
acacagtcaagtctttgagtcaatgtgtgttacgactaccaaggctcattagactgaacaatgttaagttggctctggatgcagatgatatgcatgctaatgtcatgaagaagaaatccctatctaagac

SEQ ID NO: 632543 - DNA, 885 bp, Homo sapiens
ggtctccaggcatcctggtgctacaatatcggtccccgcgggttggaatggcagacttcggctcaagcgtggcagactccccggcgaggcctcctgtaccagctagagccccacccccgaccccagcccggagagggcggaggcaagaagaaggctcattagaacctggagtgggaacccagacgggttctggacctctttggtgcagtcccctggaagaatgcagggggtccatgcaggatgcgcagagactactgcgaggatccgaggggatggcgttacagctgtgcgcgctgtgtggatgcgtgacgcgcgcatatgctgcataccagtgcagcatgaagccgctgcacccatggtgaaggaccccatcatgcagtgacgcctcaggtctaagtctctggcttcaaagtagagctgaggaaacagggcccgacaagagtgaattcacagatgcgcgacgatacttgtaaccaatctctgcattgcggtcactgcgacgtacgcatcaagaccacaggcaaccctttagtgcccatttcatgggacatatgtcacctgaaaaccgacattaacgaggtcagaccgtcgctggggcagaggtcggtgacaggaaaggaacagaattgtagtagttctcgtgtgatgcaattccccaagtgcagatggtcgggtgggaaactgaaggctgagttccttcacggtccatgagccctgtgcccttgcgagaggtgtggtagacccgggtgatggagcacgacagggaccaccaacgtgcaacggacaaatgatcccactgggaagacagctattagagagaagccatggcaggatgccatttcgccgggcctgacaaggtgctgagagccaacaagagaaggacac

SEQ ID NO: 632544 - DNA, 205 bp, Homo sapiens
acgggtttcaccatgttggccaggctggtcttgactcctgacctcaggtgatcctcctgcattggcctcccaaagtgctggaattccaggcatgagccactgcgcccagtctacacactaattcttgttagcccacagctgttctgttctatctaccctcatttaacgctcaaggggtcatacctagatagttacacacaagggg

SEQ ID NO: 632545 - DNA, 167 bp, Homo sapiens
catggcccaggtcaccccccccctggtccacatcatgaggaagtagaagaaaacaggacccaagatggcaagcctgagagaattgcccagctgacctggaataaggcctaaaccccaatttttttttcctaataaacagcctcctagaggcctcattttatttttta

SEQ ID NO: 632546 - DNA, 137 bp, Homo sapiens
tcgataaggggcaaaacatgaatttatttctggaattttccacatcatatttttggaccaagggttgcctcaggtaacaaactacagaaagtgaaattgcacgatgaggggattactgctcctctgctctaaaattg

SEQ ID NO: 632547 - DNA, 553 bp, Homo sapiens
agaatcttatatttagctaccttactaaattatcgtattctagaattctattaaccagagtattagtattttctttctcttttttttttttggagacaaagtctggctcggtggccaggctggagtgctggggtgcgatctcagctcactgaaccctccacctcccgggtaccaagtgattctgcctcagacctgccgtgttgttagctggggattacaggcagggcgccaaccacaccgtggctaatttacgagtattctcttaggctagaagaacggggatatacaaccaatgatatggacacaggaatggatcctcaaatccttatatgacacattcggtgactaatggccccgaggtcataggagccctaccacaagacatatgagctgggagaatatacacaaggcaaattgagagcttacacgggaaacccccaagccagaacgtcatttatggtaatataatactggtggtaataaccaagtaccaatatcaaggaaaaaaacagggtatacataataaggatttcacctaggtaacacttatctc

SEQ ID NO: 632548 - DNA, 181 bp, Homo sapiens
cacgaggccagtccctctccctcccctccccactcccttcccctcctctccaggcctgcgcgcgcgcctcttcctccggcacgcgccgctgctagccgagcactctcgccagaacctctggctcgcgcgtgcccttttcccctcaggttgtggggagagcggaatcctggctccgccgtcc

SEQ ID NO: 632549 - DNA, 1232 bp, Homo sapiens
gagcccgcggacaggcagccgggaggagcgggcgcgctcggacctctccctgccctgctcgttctgctctccagcttgggatggcaggatacctgcgggtcgtgcgctcgctctgcagagcctcaaggctcgcggccgtgcctgtggcgccggtggccctgagagccccactcgcaagagcagcctgtgggccacatgtgagtgccgcgcggagggtccaggcaggcgcagtgcccacagctgcgacgtggtgcgtgttccccagtgctggggccgggaaagacacgtaccgcacagacctgcatgccgggggaccggcggggtaaacggcgccacaaaggggcctgcaggctggcaacgtttccgactcccagcggataccccacagacaacgggctcgcaattccccgggccttgtggacaaatgcgacgcactggcaggttgcgccacctttcgacgccagaccggcagtgggcaacttttgagttgggccctgggggacagacggccaaagtatattagaaactggcaacgaaggcatcgcgcgacccatggcccgccggcagaccccccgaagaggcaaaataccccgggccacaggcgcaggatcccaatggaaaacagcgtgtccacacggggaacaccccgaacacggggtaggcacatggcaccggacagcatggagacacacttggacaccaagcagccacaagacacccccagcagcgccaggcaactgggaaacaccaccacggacggcggcacccccttggccgcacaagcgaaagaacacagggagccgagagccccggcccaacgaaaaaaagggcaagggaacggccgacgagaaaacttgtgacagacgacccccacagcccaatcagcagcacaccagcgatgcagcagccctgaaaacagaagcgcgccaacaggaccgcggaaagtatcaagggcaacccactacacacaaccggcaaaagcacacgcacaagcaagcacatccccagtcactacacgttcgagcacaccgtaaccggcatgggggtaggagacacaaccagacacacgcagccaacgatcagcacccatccacactggaagggcaacaggtaggcgacctccaaccagaggggcgccgcacacgacggacgacaagaacacgcggccgtaggcaccacagaaaacaacagcactaaaccagtacaccgtggcacaacacgagcggacaaaa

SEQ ID NO: 632550 - DNA, 391 bp, Homo sapiens
gtttgacgcagctgccgaggagcgaagacggtagattggtgacaggtatcttatgaagggacaatggattcccccaagaagaggtactatcaaaagagagtattgtcctgatagggatagaatagtaaggtgtagatatctaagacatataggaaaaaacaagctgtgagaagtaatccaatattataacagttgacaatagtatatagtgaaatgacaaaacgggcattataaaaatgattgtgatataaatacttgatagtacaaatataagcttactcataagtatagtagataatataatgaaatagggtaatgaatagaaatagaagtataaacatataaagaaatatgagtgataatttaagtgtatgagtatttattcgttccg

SEQ ID NO: 632551 - DNA, 146 bp, Homo sapiens
tagctgtagaatgtttatgatatagattattgaacacagtaatgaaaaaaaaaaagaaggaaacagttatggagatttgctcattgaactgagcttggtctttctcttaattatctcctgtccatagtgatgatggaatttttatt

SEQ ID NO: 632552 - DNA, 205 bp, Homo sapiens
cgattgttcttattgtatgtgctgacttccttaacaatttcctcatatctcttcgggcatgtacgggtggcatcagatggaatccattttgttaacaccgactattagttatttcacaacccagtgtgtaagccagaagggcatgctctcggggtctgcctctttcattggagcatgccagcgttcaaattcacgcaacaccagc

SEQ ID NO: 632553 - DNA, 117 bp, Homo sapiens
agataaggcagtttgacctgacaccacattttccttctatgcaatcatgcctgtctagataatcttgcatatgctttcctctgtagctttagtagggtcctaagttgcacactgggc

SEQ ID NO: 632554 - DNA, 339 bp, Homo sapiens
ggccggtacctctccctactgtatctatccaaaggtcagtacctcaaagatcaaggcagataaatccacaaagatgagaaagaatcaatgcaagaacgctgaaatctcaaagagccagagtgtctcttctctaaatgattgcaacacttctccatcaagggcagagaactgggctgaggcagagaagaatgaattgacagaagtaggcttcaaaaggtaggtaataacaaacttcgctgagctaaaggagtatgttttaacccaaggcaaagaagcgaaaaaccatgataaaacattacaggagctgttaaccagaatggctaggatacagtagggaga

SEQ ID NO: 632555 - DNA, 610 bp, Homo sapiens
  misc_feature (224)..(224): n is a, c, g, or t
  misc_feature (274)..(274): n is a, c, g, or t
  misc_feature (353)..(353): n is a, c, g, or t
  misc_feature (377)..(377): n is a, c, g, or t
  misc_feature (384)..(384): n is a, c, g, or t
  misc_feature (470)..(470): n is a, c, g, or t
  misc_feature (474)..(474): n is a, c, g, or t
  misc_feature (485)..(485): n is a, c, g, or t
  misc_feature (492)..(492): n is a, c, g, or t
  misc_feature (495)..(495): n is a, c, g, or t
  misc_feature (514)..(514): n is a, c, g, or t
  misc_feature (542)..(542): n is a, c, g, or t
  misc_feature (545)..(545): n is a, c, g, or t
  misc_feature (555)..(555): n is a, c, g, or t
  misc_feature (574)..(574): n is a, c, g, or t
  misc_feature (576)..(576): n is a, c, g, or t
  misc_feature (599)..(599): n is a, c, g, or t
aaccggaggcccaaagtttaaaaaactgtgcggaaggctcaacaaaggcccccaatttggtttagcccagggtggattcccaagccaattatgtgcctttcccatatgaagtcagaggttttccccccatatacttcttccagcccccaagaagtttaatccaaagaaatatgaaggtggccgtgaattaagtgtttttattagctatctccaaagagaagctnccaccccccctgtaattcaagaagaaaaaccccagaagaagaagaaggcncaggggggtctttaaagcagtagcccaacccccctttgtaaaagggctcttccctcaaagatgggaaaacccttggggngggctaggacccatatgggaattntttcctntcagggccgagagggcagaatggatataatttgaatcctgttaaattttctttaaactgttttttagctgccctgtttatggaaanaccngggcccgtttntgtttgnggntttgggaaaaattatttgngttgggggaaatgttgtggggggggggntgngttggggggnttttttaattttttttggncntttgggacaggggcaataaatgnggcccctttta

SEQ ID NO: 632556 - DNA, 561 bp, Homo sapiens
cttgaacctggagttcatcacattacgtcacagcttcccatctggtggctttcctgagtcagctacttcacactatgtcaaggctgttgtaccccaaaactcagacgaggactttctatgcatgttttccgctcctccccccaatatcccccccccgagtcaccattatgtccacaggacagcacttgagaagtagctttttgattcctagtaggtgtacatttaaattcgtaaagaaggttgcaatgtatcatgactagttgacgaaactgttgtatggtcttcttgtgacagaataatactatattgttacaagtggtacattgacgcctagttccggaagctgcagccgcttaacaacacacattaatgacaactggcacgcactggaatgcatctccagggcaactacacacaacactactcacaacataccaaaaaactatgcaaacactacatgcgcgacagaacaagaacagtcgccagcacgacgaatcagcaagccagcgcacacacctaccaacatacagaccacccacgactgaccaccaccagccagga

SEQ ID NO: 632557 - DNA, 1534 bp, Homo sapiens
tctagatcgcgagcgggcctgcccttttcttttttttttgggcaggcaatgacaaaacctcagttaattaaatggtgtgcaaagtcggagacagcttgacgggtgtcgctccttaccgccggagacagaatggctttatcatttatatgggaaagtgacaggctttcacctactttaccactattatacactgtcacgttataacactggcaagagacccgggtacaagaaaccagtgggaggtgggcggagcctagggagaaactcaagaccaagacccaaggcggcagcggccatctcacgggcatgagaccgggtggcaaacaagaagtgggcgccaggagtagacggataacatagctagctcagagacgcctcaggagagagagcacccaatagacacagagcagtggaacaactgagcgaagaccccccgtgaatataacaaagcaaaccacaacagatagatagcacacactagtagtgagagagcgcccaagtagagaagagatacaacaatgaacacaataaaacgccaatcagagagacaaacactcacaacaccctcacacaataggagaatcacatcaaagaacacctatcaaaaagtaatcccaatatagagacatataggagcccccaatgaagaagccaaatgtagaaagagagagcaaaagcaccaagacgaagacccaaatgtagataacaacccattgagtgtgacaaaaacaaaagcgcacaaagagaggagaacaaataggacaaaaggagcgcccaaaccagcggaaggagagaacgcgagaacgcaccaataagcaaacacaaagagaacacatacacacctgaagaagataacagactaaaggacccaaagacaacacccacgcatgacacaagcgaccatgagcccacccacacacacgtagcaaagaacaaacgcaggggaccatgggagcatagcgaacacagagaacgcggcacaagagggccccccccccaacgtagacaacgagcacacaaggcaacacaacgggaacaaaaaaggagaaaacacaccaaaagaaccatccagaaagaatacaacggaaccagaatcacgataaatagacaaaacccaaggaccagccacaccaactgaaccaccagagaaaaagaagccagacccaggagcacgagaacaccaaacacacacaaccacaaataccaggaagacaaaacagagagataccaccccaaacactgagcagccaccaaagccaccccccaaagtgaacacgagagaaacacccaacgaccaaaaagagggacaacaaaacacaagcactaggaagaagaccacacaccaaaaaactaaatgaacaaagacccaaccgactgaaaaccaagtcctatacaaacacatgtctcacaaccacaccccagaaggaaatcaaaagaaccactaacatgaacatactagcacaaagcaaaaaaacaacaacacaaacagaacaaaccacaaaaaaggacacaaacacaccccaccctatccccc

SEQ ID NO: 632558 - DNA, 746 bp, Homo sapiens
gacaagtgtcttttgaaataaagaaccagtccctccaaccctcaaaaaaaaaaaaaaaaaaaaaaaaaaaaaaaaaaaaaaaaaaaaaaaaaaaaaaaaaaaaaaaaaaaaaaaaaaaaaaaaaaaaaaaacaaaaataaaaataaaaaatatgataaaaaaaaaaaagatattataaaaaaatgattgagatcggggcatagtatagatataatgttgattgagacgtggtgatcagttgtgctgttgtgatattgttgttaagggtagcgttaagtgcgaggggtacgtagtggaataatctattcggagggaaacgccgtgatcatattaaggatactattacaagaggttagaaaggaggataaattataagaattgatcaacgagagaacaataaaggctcgtaaaacaataaacggtgtaaataagtgtgaaggaggttatggaaagaatttgtgcgtagtcaagaggtgtgagtgttgaggtatttgtggggaggaaacgggttattttgtgtacaaggaaggagtagatttagtgagagcgaagagggggggagcagaaggaggagggggcgagagggagtggaggagatgagagagaggagggaggcaggggggtgccgagagggggagaggggggaggaagagaggaaggagaggaggagcggacgaaggaggagagggagggaggagagggagggggaggacaggaggagggagacgggagcgcagtggaggagc

SEQ ID NO: 632559 - DNA, 109 bp, Homo sapiens
tctgacattgatctaccaagtgagataaaaaaaaaaaggagggacagtgagagggaaaaggagagggagaggtagagagagagaaaaggtagagagagagaatcttact

SEQ ID NO: 632560 - DNA, 1087 bp, Homo sapiens
  misc_feature (29)..(29): n is a, c, g, or t
  misc_feature (43)..(43): n is a, c, g, or t
  misc_feature (325)..(325): n is a, c, g, or t
  misc_feature (377)..(377): n is a, c, g, or t
  misc_feature (385)..(385): n is a, c, g, or t
  misc_feature (422)..(423): n is a, c, g, or t
  misc_feature (426)..(426): n is a, c, g, or t
  misc_feature (428)..(428): n is a, c, g, or t
  misc_feature (431)..(431): n is a, c, g, or t
  misc_feature (440)..(440): n is a, c, g, or t
caggtatgcctggtgtaaatcggacgagnctctggcgcttgtnctcctctcccagtcggcaccacagcggtggctgccgggcgtggtgtcggtgggtcggttggtttttgtctcaccgttggtgtccgtgccgttcagttgcccgccatggctgagctggatccgttcggcgcccctgccggcgcccctggcggtcccgcgctggggaacggagtggcctggtgccggcgaaggaagaccctggttgcggccttcttggcgcagctaatgagagcgagattgcgtggcatcgagaacgacgaggccttcgccatcctggacgtgnggtgcgcccccgggccccaagccgcaacggggaagccgccgggggtgtccgnatgctgtngatggagtaatgaatggtgaatactaccaggaaagtnntgntncanacagacagntatgcagctatattaacgaatgtggatcgattgcagtcagagcctgaaagtatccgtaaatggagagaagaacaagaatggaaaccgcttgtgaagcaccttggatgccaattctcgggaagcacagaatactagaagttgaaacgaaaaggcatagtaatagggagctagagtgaatggtatgcaaacataggacgagcagttacagaaaacaaaagcagtcaagcatgacagcgagaagaaggccttggtaaatgacattgacgagtcgtgcccatgcactgagtgggaccggctggtcgattgtgtgagttaagccccaagtctatgagcaggccaagatgtttctcgcatgggctaagtcattatctccctcattaggcgacgcggatgactgaaagcaatctggtgaaagactacatttgatattatctactaggaaactatcaatgcaaagcttaattatttaggcctttggcagaccttagattaaaggtattgttggatgatttctcttaggttccggttaaagcagaggggaagaggggaggcaagattgggtggatagagatgtgagataaagagaaaaacgatgtgaggagagtatctaaaggaaaaaaaaggaagattataatatatattataat

SEQ ID NO: 632561 - DNA, 276 bp, Homo sapiens
tccccccccccccccccccccccccggggcccccccctttgaaccgggtcttttttttatgtttcaattctgtgacctcacccaggccctctcctccttgggggtctgccttcggggtttttatccctgggttttgggctggggagggtttgccccggtctttacgctggtgcttttctgtgtggtgtgctgtgtttttgtctttttttctgtttttttttgtcttttttttcccgtttaaattcctgcctctttggcttgttctttggcatgtta

SEQ ID NO: 632562 - DNA, 559 bp, Homo sapiens
  misc_feature (168)..(168): n is a, c, g, or t
ggaaagcgttcggatcccaaaacactctacctcgtcatcagggtgtggtggcgcaaaatgtccttgctggcgcgggttgcattcctacccatttgacaccgttccccgccgcattatgatgcagtcaggggccaaaggaatttacatcatgtccccaggcccgcttgnctggtggcggaaaattgctcgttaaaagagaggcaaagcttttttcaagggggcatggtccaattttctcaaaggcatggggggggcttttgggctttttttgtaagaagaaacccaaaaggacccaaaagttttttcccaggatttttccccccgggaacaggcatgttggattaaaaaacaaattttgggcctttttggcaaaactccggggggtcagttttccaggggccactatttacgggttgaaaaagggaacccaaaaaatttctttgccccgtttttttttaaacccctttccctgaagaagaagagggggccccattggattttttttttccgccccccctgataaaaaaccaatttggggaaataaaaattttttaattta

SEQ ID NO: 632563 - DNA, 1196 bp, Homo sapiens
  misc_feature (29)..(29): n is a, c, g, or t
  misc_feature (43)..(43): n is a, c, g, or t
  misc_feature (325)..(325): n is a, c, g, or t
caggtatgcctggtgtaaatcggacgagnctctggcgcttgtnctcctctcccagtcggcaccacagcggtggctgccgggcgtggtgtcggtgggtcggttggtttttgtctcaccgttggtgtccgtgccgttcagttgcccgccatggctgagctggatccgttcggcgcccctgccggcgcccctggcggtcccgcgctggggaacggagtggcctggtgccggcgaaggaagaccctggttgcggccttcttggcgcagctaatgagagcgagattgcgtggcatcgagaacgacgaggccttcgccatcctggacgtgnggtgcgcccccgggccccaagccgcaacggggaagccgccgggggggtccgggtaatggtccaagcagacagttatgcaatgctataacaccaaagtggatcggatttggcatgtcagagctctgaaacgtatttgcggttagactgtgatgaggacggaaagcaataagtgtgaaaccgcttggaaggcccttatggatgccaaattacttcggaaggcaagaatgccaggagtggaaagggaagaagtgcattaaagggaggctagaaggaattgggtattgccaacgaccagggaccgaaggcaggcgataacctgagacataccataaatgtcaaatgccacagcgcaggggctgctctgccgatttgaaactcgcgtattctaataagcacgaaatgccatttcgggttgaccgggttgaatgcgggctagtggtcgaacgagacgcactttagaccaaattcccctgttggcctaaaccacggactcgttatggaaaaaagcaagtgtcgcatgtcacaggaaaatgaagagggcgccttttgtgcttagcaagttggaccccattttggcacacggacagcgaacggctatcccgcgcagagtagccaaaccgtgtagagttttggggcacaaacgcggtgcaattgaccgcccgggggcactggttgtatgagcgactttaaaagagcacacccaacaaaggtaattaaagcacggaaggtcaaggggcccacaagaggaagtggcttgtacccacgggagaatgccagcccccaaacagcaccctccaatatcatacgccctcacagagggcaggggccgcccaggaaggagagtaggccggtgcacagaagggccgcgccg

SEQ ID NO: 632564 - DNA, 951 bp, Homo sapiens
  misc_feature (590)..(590): n is a, c, g, or t
  misc_feature (619)..(619): n is a, c, g, or t
  misc_feature (689)..(689): n is a, c, g, or t
  misc_feature (737)..(737): n is a, c, g, or t
  misc_feature (781)..(782): n is a, c, g, or t
  misc_feature (807)..(807): n is a, c, g, or t
  misc_feature (811)..(811): n is a, c, g, or t
  misc_feature (823)..(823): n is a, c, g, or t
  misc_feature (836)..(836): n is a, c, g, or t
ggcagcagcagcagaaagccttaaacagggacgaagaactcataactctagaagaggtggcagatatagcctaaacggcctaagatgtacacagagaaaacacatagctgcccatagacacagaaagcggaggaaacgaattaaatctcgaagtgaaaaaaaagccataaaccaccaccgctataatcccggccgcctgccggcgtctatacgttactcggcccgaccacgctcctctcaaaggccttacccccatgccagaccccggagaagtcctaagcgcttcccccgtcacgaggcccgaggatcgtcctatacaaggcacgtcggcggcctctgcccgcacccccgccacactccccctacagcccccaacccccaaccccccgcccccaacgcaacccccgctttaaactcaaaatcggcacaagcatccaacaagccaaaaaggaaagaaaacactccgctgccaaacgcgaacgcactccatgttatacgcaaccaacaaccaaccacacgcccaccccgagaaaaatggcccaaaaaccgacaggggacagcacgtagacgcgtacacccactcaatctancatcagcacccccgccccgacgaagcaanatctccccacccacgcgcccctaaccccaatcaagaaacaaatcccaaaacttagccaaacccccacacncacccccagctagtctctcacccgaagagccccacccgaccccaccgnaccactaccccccgcccgacaaatcagacaccgatttgtgccannttgtacgccgaccacccgtgccagnaccnaaaccaccccgntaacctaacactnctcacacccacacaaccaagccacaccaacccactattccacccacacacagacccatccccaacgccacaccagcacgcgcccggcccgaccccggcccggcaagactcgtcgg

SEQ ID NO: 632565 - DNA, 416 bp, Homo sapiens
aaatcaaaacttacataataagggcaagtaacacaataggcccacacttgcatgacatgctgtgtagaaagtgtgcacagatctgtgactcagaccagatgtcctacgcaccatgagcaggtgctggtgctaaagacactcacagccttcgccttcatccaatactaataaataacctacagaaagagcagcgctggaggctggcccttgagccacccactgctaccgatgcgcagccaggcctgcctcatagccctctgtcttcatgtcattgagccctagctcctcattgtggccaaaggtgcgcttgtagcgctccaccttcatgtcaggatcatgttcaggcgcatacacattctgcaagtaactgttccctgctggatcatccatactaaagagtgcctgtatgtcacctt

SEQ ID NO: 632566 - DNA, 820 bp, Homo sapiens
ctcctgaaagtagctaaagaatctggcaaaatctcctgtgattgtaagagcatggtactggcacatggacggtctacctattgcctataagccgactggaggtcgagttggggtgtctcacagcagctgcaccccaatgacccatcgacccatgtgttaccgagtgggccaatgaggaccttagctggaatagctgagcttcatccatgagtagctcactcgtgaagtcctgcaggagagtgtatgcagaggctggcagggaccagggcatggaaaatgaccggtggcaagaaaggcagaacgttggaggccaacagtgtgtttcgtcaacacggtagcaaatgtttcttatccatgccgtgagtgaggaggaactcctggcatgcacattgttggttgattgccagtcccatccggagataaaggtcctgctatgacgggtattaagccgtaattctcgtgatatagttacaggagatgaatcccggaggtatacaatctggacgcaagggttgtcccacgattcttaaacgtaaggattagcatggttggtattgaacaacgatacttactatacacaggcatatttggtagattgcaggttgttctcggaaaattgtcatgttactgacaagcgactgtgagtggttggacaagataaaacatgtgacgaaccagggtcatctttaaatctctacctatcaggcgcagtccggtgaccccttcctctcgtgaacttggatgggacaccgggctatccaaccaaaagggttacgctacttccatgcattgttccaagtgaagaaggccaggcgaattg

SEQ ID NO: 632567 - DNA, 645 bp, Homo sapiens
  misc_feature (572)..(572): n is a, c, g, or t
gccggggggggccagcgaggcacgttttttttagcgcaggtcctgaaacgcggcctggaggagatcaccggccacggcggtctccgaggctatctacggttttttttcaggacaaatgatgcgaaggttggtacattagtggcggaagacaaatatggaaacaaatactatgaagacaacaagcagttttttggccgccaccgatgggttgtatatactactgaaatgaatggcacaaacacattctgggatgtggatggaagcatggtgcctcctgaatgccatcgttggcttcacagcatgactgatgatcctccaacaacaaaaccacttactgctcgtaaattcattcggacaaaccataaattcaacgtgactggcaccccagaacaatatggaccttattctaccactagaaagaagattcaggggcggtcccccatttaccaccttacaggcaagacaatgaagaccaggggaaacatgccaaatttcgagcgtttcctggaactactcttctcctggttacccattccctatcaatcgacccttcgatagtgggggggctttcnagcaaccgtttcgcgccgccctcggtcagggttctgggcctcgcccggcgactccaaggtcctaactgggccg

SEQ ID NO: 632568 - DNA, 318 bp, Homo sapiens
acccacagcttccacagtcatgtggtgaaaggtgtgtcctctggctgggcgtggtggatgcctgtaatcccagctctttggaaagctgagatgggtggtttgcttgaggtcaggagttcaagccgagggtggtcaacatggcaaacccccttctctactaaaaacacaaaaataagctgggcgtaatgatgcgtgcctgtaatcccagctactcgggaggctgaggcacaagattcgcttgaatccagaaggtgaggttccagtgacctaagattgtcccactgcactccaccctgggtgacagagtgagcctctgtc

SEQ ID NO: 632569 - DNA, 99 bp, Homo sapiens
acagccgtcgtaggcagtgatcactgcctacgacggctggcaccgcaaccacagtcattgagatacaagtttccgaacaggagcccccctccacaggta

SEQ ID NO: 632570 - DNA, 84 bp, Homo sapiens
gatccttcgaagcactcagttcactcttccccaccacagtggttaaaaggcgtttgtatctgccactatgtgtgtgttttaaaa

SEQ ID NO: 632571 - DNA, 1233 bp, Homo sapiens
agcggggggcggatccaagatggcgacggcgatggattggttgccgtgcgtctttactgcttttctccctgactgtgtgcaacacaagcgccttctagtgtgacctggggttcgcgcctattcaacttccaccagatggagactccggcaaggaaactcaatggcctgtgaagtgcgtcaacagtctctgccgatgcccagactagccttgatgaactagctgattcactgatccgttctgtgcagacccagtgaagtataacctaccaaggtcagagatatcttgggcagcatggtagctgtagtaggcgtgatccggcatttgtctaacggacctcttatcggaagttcttcattgaacatctgacgtagagcaatgtgtgcacagtacttgggcatgcccatttccgagctcaagccgagatgaacccgtgtacgcgatggcagctgagaagccggaacatccgttgagccagctgcgggctttccactaattaacggaaacttaacttaaactggtcacaacccccttcgaatttgaccttgaacaagacctcgtggacccacttgttcggagttcgaaccgcaccagggcgtttttgaggttaatgcccttttcttttaggctgtttccaccaaaagcagtcttgtcatctgacactaatatgacttgaatctttggaaccccattaggtgaagcacagaacactgctggtattagtctcacactgtgaatttcgttgcggcccaaccgcctttcgtgtacgaggacacatccttcatctcggtagtgggtttaactataccatagtgtagtcaaataatccctgtgtcacattattttacaagaccaactggttaatcatagctttcccaaaaaaaccaacactcgcaaaaattccctataatacccctcgtttgtgcccagagcactatatagaacccctcacatcaccccgtttgccgattaccaaacactgttctcaaaatttttccccccacatatgtttactacaatctcctttcaacattttcgctatatatttccccgatacccagttcaatgcatacagaactcctcaccatttgtgcggtcacctcaactgctccaacttgtgcactgattcatcccccacacgtgggacaaagcatatcccaaccctatatctcgcgcttttacatccacacacaatcgttaggacacttccgcatcactaaatcatccgtagcact

SEQ ID NO: 632572 - DNA, 156 bp, Homo sapiens
tccagagagtgtgaggccctgccatacaaccatagattttggacttctgaccttcagaaccagagagaatatatttctgggttttgtccgttcatttgttttactgagatggagtcttgctcttgttgcccaggctggagtacagtggcgtgaccc

SEQ ID NO: 632573 - DNA, 133 bp, Homo sapiens
aggactgaagcactgggggtggataataatgtcccaacactccatatccttccgtggctttcaaacgataaaccctggagtcccaagcagctgccttgtctccctcaactgcagtcctcccccaggctcacag

SEQ ID NO: 632574 - DNA, 496 bp, Homo sapiens
  misc_feature (1)..(1): n is a, c, g, or t
ntgatcgagctcggtcccactatgttgatggtacaatcacacccatcatagctttcacccacatgactatcctactgcatcgctaaccccagtaaaacactcaccaatgaactcaaaccgctgatccccatgcctcaggatactcctcaatagccatcgctgtagtatatccgtaagacaagcatcatgccccctaaataacttaaaacaggctgttaaacccattatatctcgcccaatagttcagaattctagcatgaggtcaggtggagaggggcgggagccctgcaccttgcagctggttggtgtcgagcatgggtggtgggtgggcccagagcacacgcgtgtgcattcagaagtcgagccgctgagccactgtcagtgccagaatgtcagccctgggatggggatgagccggtttttatctcttccggctgtgcaggatttacatgcttttgaaacgcaggattcttcagaagaggccggtgttttaatc

SEQ ID NO: 632575 - DNA, 237 bp, Homo sapiens
aactatatcgctttcaatctactgagggataagactaacatttttaatccccattttaggaacctgtcaatagaagagtaacaaagaccttattggcaatcttataatgctcaggttctaactacagagcttcttcacatatcacgagcagaccaccctaccttaggaaatctttaaaactgctttataagagagtagccttggtaggcaaaaaaaggaagataagaatggaaactt

SEQ ID NO: 632576 - DNA, 391 bp, Homo sapiens
tgtgaggttggataatgttcagacagagtgattacatctttaacagatagttaacattaattctcttaattcttttcttaagggggaattaattctttaacaagtagtactaatgctcaacatacaacagtgagcgagacttaatctctgccctccggaagcttatacggtagttcttttcagcgaaagaacttgtaagtccgaaaaatgtacagatggcattcacgagagtgtttagttctgttgtttgcgttccttctttaataatgttttaatatctccacatagttgaaaaaaagaaaaaatggaaaatatcctggaaggtttagtaagcaattattttctttattagaacaaagtgttgtttggtttgaactctattgtcatgggc

SEQ ID NO: 632577 - DNA, 337 bp, Homo sapiens
gctgtggtcgcagaatgctatcgctgcctgtatcggagacacattcccgtcagctggatgctccgcgctaccctgagatgagtcggaaaacttcgaagacagctgtatggcaagttggacaagactccccttattgctgatgtttattacattgtatggtggcacgtccccccgggagggggtggtcatcacgaggaaccgagatggcaccagcagacatttggcctctagatcctttgaatggagccgtggtttccgagttgagaacaaataacgaccactggacagccagcacccaaggaagatgaccggagaaaatctgccatcacggccctta

SEQ ID NO: 632578 - DNA, 84 bp, Homo sapiens
ggatttgctggtgcagtacaactaggcttaatagggagctcgaattaacgttagaagcttgaattcgagcagtagtagtagtag

SEQ ID NO: 632579 - DNA, 425 bp, Homo sapiens
aacaccacgatgacatcccaccggaacaaggcccagaaccacttcatcatggaacatcttattagtatcctgctgggcagcaagccatactgccaagacccctcccgcccatacctataagtacccccagcctgtaagcagcggtgggctctggcattaggcttgtcccccacttctgcaggttttatcctgggcagaaagcctgcatttgctgttgagccaccctctttctctctctctgtttgtgtgtgtgtgtgtgtgtgtgtgtgtgtgtgtgtgtgtgtgtgtgtgtctttctttaacccttgcgttccctttcaaacctaacaatatgtatcaggagctaaatgttttcccgaatccctattgaatgtctgaatacacgcaatcatataaattcaatattcttgattagaaacttaaaa

SEQ ID NO: 632580 - DNA, 420 bp, Homo sapiens
gcctactactactaaattcgcggccgcgtcgacactgcactccagcctgggcagcagagtgagtgagactctgtctcaaaaaaaaaaaaatcctcatggaaggattacttctaaatcgaggctgggcatggtggttcacacctgtaatcctaccacattgggaggtcgaggcaggaggatctcctgaacccaggagttcaagagcagctgggcaacataacgatatcccgtctctaccaaaaattaaaaattagctgacacaaaaaaattagccaggtgtagtggcatgcaccttatagtttcagctactccagagggtgaagtgtgaggatcactggagcctggaaggttgaggcagcagtgagttatggttgcttcactgcacttcagcctaggtgacagtgagaccctgtctcaaaa

SEQ ID NO: 632581 - DNA, 232 bp, Homo sapiens
tcaatttggcgggatggggtgagtgtaacagctttattgagatataattcctgtaccatacaattcacttaaagtgtacaagtcagtggtttttagtttattcacaaaattgtgcaactatcacctcgatatattttagaactcttctctattccttcaagaaacttcttttctgtcaataaacacctctttagtctgtcataccctgtaaaatttctgtagcccatttcaa

SEQ ID NO: 632582 - DNA, 791 bp, Homo sapiens
cgataccagggccactgaagggatagttgttggctcaacaagagactgttctcgatacacgtcgatatctcctaaatatttattctttggtgtcttgggacatgctgcagatcacagcacattgtcacacccggctcatgtgtttccaagcctggggctccactctcctctccactggccgtcttcccagagttgtgacagccaatcggatggctgaagcagatgcttctcaggtattaaggcttacatttggctgcaggtccctagtctttagcggggagtagattgttagtctggatcctcacctctacatgcagtctatcctcactggactcaactgactaatgcctgccttagtgttcaccagtgggttctggcctccttggcatgcaactggctgtatctcgacagactacacgtttaggcccagaccactggatggaggacggatatgcccaagaatcatggtcgatcgaatgccatcgcagctggcatcttccaccgatcctgggctccggatagcaagcaattgacctctgcgtcatcacgcaacgtatcaatgcatcgattttctccgcccatacacagtgcccaacaagaaggggatccacggcttggccggtacagtgtgtgagtaagggacactactgcgagtcctcaatctgagataaatcactccctctggtagatttgatggtgactggaaggagacagtcctaaacaatgacacttccatgaatggcatcagtgggtggctgcctcggttctggaagacggtgagcattgaagcc

SEQ ID NO: 632583 - DNA, 1284 bp, Homo sapiens
  misc_feature (946)..(946): n is a, c, g, or t
ccgtagctaacgagttcatctcggtgacgcggaatgcgcccgactacaaattttttcgttattatagcacaacacgcttttattctctaagttatattctcttggcctcgcggttttcctcgagaaactatatttccctcctgtggaatttttgcgggctcattatatccggccgcgctgttataatcgtgtttcatagtgggggccataacatacctcactttgtattctaaactttatgtgataactcccctctattgtgtgtagtacacgatcatcggagagttttgtccagatattatgtcgcccaaagttcatccaagtatttcccacatgttgttacaaccggggttgttatctccaatgttcttattgtggagtatactagttggtataacacttctgtggggatcaagggtgttggaaaaatttgtgagaatattttcagattatttatcttcaattgtgagatcgtgggtttcttccaaactggctttaatattctgtgtgattgcgtggtttttgttgactggcataaatgggggaacctcgggttttcctaataaagtcccgctagagctcctcttggtcccggctaaatgtgcccccaaaagtagataactctttgttccacattgtgagaaaagtccgggcaactttttgtggtgtttccacacaactcgtcctcgtgctattttcccggagaagatttttttaaattttgtttccgtgtccccctttccccatgtttctctctttaattggtaatctttatatgtgttatctcttggtttatatttgtttttctattttttttttatattttttttttttttgaaactaaaacacggccaaatgtgaaatggttattgaatctgagacactcagatggaagaacgcgggaatggggaataaaatgagactgtagtatttctgtgtgagaaantaagacccccttcttttccacctataggtggcaagagcgtgcaattcacgccgtactctatagtccattagtaaatcccagctaaggtataatgtttgcgatcatcagcttgcgtttgtgaaccaaaacaaaagaaaaaacatacaaacaataaaaatcctttgcataccgttgttcaattggagaagtatttaatgtttttcatttatcattgtaaaacaaaggagctaatgatgataaattatctttagtacgtagatgtaaaaatgtagggcaatgctgtactttaagtaagggaataaaattaggctgctaaaatcaaaaaagcatcggtagac

SEQ ID NO: 632584 - DNA, 116 bp, Homo sapiens
gtctgacacggagtcctggcttctttcctcgggggagcccattctcttcaattcctcctctgtgtgagtcatagctgcagccctctgggcattcacaaacagtttgtgaatgatcc

SEQ ID NO: 632585 - DNA, 633 bp, Homo sapiens
cggcagtcctccgcgtgggacccgggcgcggtggtcctttccctcgacggttctgccccggtccctagccattactcatctcgtgccctcaggtcgcatcagccatctactatttccccctacttaggacaggacagatgcgtgtgcgactggacagtagaggagcgcctcccaagtgggcatccaacggccaaccaccaaagcttcacaccgctgctcccgctcagagaggacggtatagatgcacgaggcccctgtgagaggctcattgacaagcctgcccctctgggtccccctgagcagagcctgcatgacccaattgcccacctttgcggctttgatgcctatgccatgtctagcctacatcctcaggcggctaccaccaggtatccatcgtgtgggaagaacggagtaacgagatctcacagcagaaaaaggtcttgagagcaacttgtggcgcaaccagtgtaactgtgacgaaatctcacaagcgaggaatgaaaggggacactgtgaatgtgcggcggagtgtccgggtgaaaaccacgaatccacctacatgcctggagatcacgccaccatcttacagaaaagctggatcacagcagatgcggcaaaaggtgacctctctaa

SEQ ID NO: 632586 - DNA, 1623 bp, Homo sapiens
  misc_feature (278)..(278): n is a, c, g, or t
  misc_feature (311)..(311): n is a, c, g, or t
  misc_feature (388)..(388): n is a, c, g, or t
  misc_feature (906)..(906): n is a, c, g, or t
gccgaggtgcaccgatctaggcagacgtgcgcggcatgtgttgcagtaggagggtgcctccgattcccctcggttgatgtgtgagtctcgtgagtggtgacctgtgcggacgccggtttcgaggaggacccaaggcccaccatggtgtcccctggctggtaactcgatggcacaaagcgatcagcccggcgttcgctaacggcgtgaggaagctgctgttccagcgacagcgcaatggatgttgagactgtaccatcgctgtcgctcaccagctgagnttccaagtcatccccgtggagcatatcgtgcancgtcctgcacggtggcatggtaactacggaaagagtatgagcgccttgtatcatgcttatgcatgacaatgtactgncccctatatgtgtaagcatgtgaactaagatgttcgagcctcggttgccacagcgcatttcgcggagaggaggcggtctcgcgaattagaaggggttcccttgcgacctcgaaatgcctgagatcgcgagggcctcctattcggaaggaattgtgtaccaacaaggaacgggtaaatataccattaggagtgccattggctggcacccccaaagttcttgacataattacgcgcgtgatgtcgcagcgtgtggatcgagagaaaagagagggatcaatccaaggggtgcgatggagatacccacgttgacgtgagagagatacagcttaggaaagagagctgcgtcgagatgtgtctatcgcaaaccccccaggacgtcggtgacccccgcgaaacggaaaaacaatgtccacgggccttggaagcttggccccaagactttactcctagttcgtaacaggcacgacatgcgtaggggttggccctttttgtgtgccaaaaactgaaaagataattcnctctcccggaagcccgaatcccgattgaatccctgaacccggtgtgccccgcaagagccttccttggctcggaatggagcagtttgttttcgccaagactggaaggtagttaagatatggcgacttcgggaaccatccccccatggtcagaggcatttaccccacggaaaaaggatcggcaatttctggtgaaaggggcgcccgaattccccaaaaggaatttaattcttaaaaggaccaccttacacaggcattacaggcccacagaagaaccttccttgtgaactttttctgcgtgtggacacagaacactgcggagtgtccccaacgccacaggtcatttaccctccaaacgtctgtcaagaagaacaacctttggacgccacacacgacttgggagctactttaggccaaagagggagagcctactcaaattgtggagacggaaagcagtctcaatccccggggaaacccttcacccaaatatcaccttggagacagttttccttggcacacaacgagttattattgagacacaccgaattgcacttcccccgcgggggcagtcactggtcacacaggattccacaaagaattcactgagtggacgagccaaacactcccatcatacataggttgtctcagacagccatccaaacattagtaagagccttctttgagtcacctttcaaaaacacagtcaacgaacagagtcta

SEQ ID NO: 632587 - DNA, 205 bp, Homo sapiens
tctagagatctcccacgctgctcacagaaacacctagaatatgttgaccttatattggaaaatcagagcaaaagttaaatctcaaaaaaaaaaaaaaaaaagttttgccccattagctaggcccttgtggcccggccagttggacacttaaaataacctgccacagtatcttctaaaaagtaaaaaaaccccttttatcttgaag

SEQ ID NO: 632588 - DNA, 799 bp, Homo sapiens
agcggaactactcccacaggggggcggggaaggaagatggcggcgcccagcgtcccgtgaggagagaggacacagggaatcccggggagcggccccagactcgtaaattatggccgcatctccgcacactctactcctcaacgccatcctgacagggttgcgtaggaggctctgtctggtatcttgaagagaagaagctatacaggactcccctcacaagttcttacatcttctcaggaatgtcaataagcagtggattacatttcaggcactttagcgttcctcaatacgcatgtatgtcacgacgagctgaacagaaggcacaacctagcaaagtaagacgccaagccagaacctagtagctatcatccatttcctggcatacaaaacgtcgtcaggtcaagccaaagcagaaatatatgagatgagacctctctcaccgcccagcctatctttgtccagaaagccaaactgaataaggaagttgatagaactagagccagactcggtaattgaagacgtcaatcagatgtagggacaagagacataaagaggaaacagcggtggcaaagagatgaacgctgcaagtgtatgatttgccaggaatttaggctcgactatccaaatatcaaactcacaggtctggtgtaagtaccactgcaggtggattagcattggctcgggcccttttggactggccctgttacctgcttacttactgtatgggacaggctgggatcctgtgctgcaactccatcaatcagtggtaagagatgccatttgacttcaaacatgaatg

SEQ ID NO: 632589 - DNA, 393 bp, Homo sapiens
gtggaaagccaccctcttttagcttactgctgtgtttttcagctttattcactttgctttttttctatattttcgtttcaactcaacttttaaaaaatcatacttgtatatttgtatatttatatttattttccaagacctcatttgcctctttttcataatgggctattattgctccatggtacagaatcttctgttctttcctaaactattagttatttttaaaatatttgttaactttctcccccttgctagttctcaggtacccgctttctcccagagtgctggctttccttaattatttgctgacttgtgctggtgtgtaacccttcatacttaggtatttctatttgtctgactgctgatttgattccaatccagtgtttcttctga

SEQ ID NO: 632590 - DNA, 129 bp, Homo sapiens
ccagcgtggctgcagacaggcccggcatgttacgagaccccttctcagtaaaatctttttctggtctctcttctacctccttctcgtgccgctccagctccttcatgcggatctcgcgagcctccgcgg

SEQ ID NO: 632591 - DNA, 730 bp, Homo sapiens
tactgtttagtgctcctcactttgcaatgttgtgctacgccagaatttctccagtttttttcattatcatccccctgagaaaaaaaattacattgaatttaaattttccctaataagagaaattaaatatgaaagaataggatttgttgggtaagattgagctttggaaggtcacgaaccattattctatctaaggtgtgtgtttgtttgttttttttggtttttttttggtttttttttggaatccctttccccttgaaccaatttcacttggggattgcggacctagatggtgattaaaaagctattcttctataatggtcaggttctctccaatttctcagcttcctcaaagactatggggttggagtggggtgtgccatcactggagagctcgggaactttggactcttagggacattttagattaggggttcatggcttccacttgttgcaccaatgtgatctctgccccttcatgctggatcaagaaagtagaaactcctcgtcgcttcaggtttgcagtcgcagaacatggcctggtgtggattgtcagacaaatggaactggtgtcattaagattgtagcaggccgctgatgtgcgatagattccaggaacatgtgtttgttgagattgaatttggccgaagaaaggtgaggttatcaattgtaccaggtgtcagtgggtccccggactggtgttggacggggttaaaaccaggaatttttg

SEQ ID NO: 632592 - DNA, 1754 bp, Homo sapiens
gggccgctgtagctcagtggtgtggggtgcgcaagggcacggacctcggagctctccgccggttgcggccgagtttctcatgctgccgttccgccagccacaataccaggggttctcgccagatgcggtcagcacatcagagatgcaggcccgacgctggtggccggtcagataaccagcgaccaggggccaggtatgagttgccacaaaggaaaggctgtcgttgcttgttggtgccccaagaaaccatgcacgtgagacacatataatagtagacccaggggtcccccgttgacagccatctgcaagtaagggcaatttcgacacgagcctgagccgactggattcgtgcagtgcttgcgaatcccggtgggacccgggacgccacaaacctaggcggtgaaacccggcgagcaacgcgcgagcaggtctgcctagagcaagagtaccccagggcaacacaaaggcccagacaataacaacacaccaagactagacggccaataggcgagcatcccgagcaaggggaagcgctgagaacacaagcggccacagcagagcgtaccaaaccgacactaaacataaatacaacggaggttggcgataggaacttatggagtaaggcgtacaagatagagcgtatagaccaccaagaaatcactattcaatccagagaaagactcgttcgaagaagcaaggaagaggctgggtagaacccctatgcggttacaggcgcagtacaccccagttgcgagttgaaccaagagacacgggagaccccagccgttactggagccaataccacaaagaggacaatatggcgaacacctaagtggatacgagggacacaaaatgaacaaaggagccaattcacatacgcaaacattagcgaaacatccacaacatggaagtaccaagggagatacccccaaatacgcacaaaccaagttgaaaccggctacattgcggaaaacaggaattgatcataaccacaagataatgaacgcaaagaaccagaaaaagcagacgagtacccatataggaggatagagaagtcaaaggaaaggaaccgcctacaagcgggaccatgggcacacgacagaaacaaaattacagcccgctatgcgaatgggcaagcaatcacaccgcgagagtataacaaatcagcaggagaacaagaaagatagacagaacaacatcaagaggacgcacacatggacaagtgacccaccagtacctaaagcatcagggaccagagcacaggggaacaggcgcacaaaaagacccgacacgcagaacacccggaaggaacgcgacaaagcaacatccaggacagtgggcaagaacaccatgtgaaaccagaaagtagggacaacaaacaaacgagagaaacagcagcccacgcagaagagcaatagacaagcacagacagaggcagacacatgtaacacacaagacaaaagcaagaaggagcaacgagagaaaacgaaacaacaagaagcaagaacaagaacaaaagaaaggagaaaccagacagaaaagagaagaataagaaagaaagacgagaaagacgaagaagagcatagcagcaaaagaagaaaacaacaagaagcacaaaagaaaagacgaacagaaccaaccgaaaaaaaagcaaaacgcaacaaaaaaggagcagaagaacaaaaaaacaagaaaggaagaaaagagcgcagaaagaagaaagaaaaagcaaaaaaaaaaaacagagagactgc

SEQ ID NO: 632593 - DNA, 481 bp, Homo sapiens
aagatgaagctttcattttcatatcagctgaagatgacggtaaatatattcgcacaccaataaaaaaacctctaagcgaatcagaaatctgcagccatcactggaacgttctgcctcctgggttcaagtgattcttctgcctcagcctcctgagtagctgggaccacaggcatgcaccaccacgcccagctaattttagtgtttttagtagaaacggggtttcaccatgccggccagtctagtctcgaactcctgacctcaggtgatctgccagcctcggtctcccaaagtgctgggattacaggcgtgagccactgaacccatccctacttatttctttcctataaaattaaaatggaaagatagttaagggtcagttagcgtttctcaaccttttctattatcacttacccttccccaaggaccgtttgtaggctattttttcatttttaagtggtgcctgcgggaattcggggatcct

SEQ ID NO: 632594 - DNA, 121 bp, Homo sapiens
agccccctgcgagaggagcatgtgacctgcgtacagagcatcttggacgaattccttcaaacgtatggcagcctcataccctcagcactgatgaggtagtagagaagctggaggacatttt

SEQ ID NO: 632595 - DNA, 287 bp, Homo sapiens
agggagccaagtagtctggcaacttcttgtggctcagtgcaatgtgaccacagaacttccactgtggatctgtgaccctgggcgctgaaaatgggaccaggaatccccccgtcaatatctaggtactcagataggtccccaaggtcattcatatctcggtatgagctcatatcttataataacacaaagtagccacagaccgtgtctggttagtatactagcacctggcaggggtcactccctgggcccgccctcctcgtactccacctccctccctattccctaag

SEQ ID NO: 632596 - DNA, 1227 bp, Homo sapiens
agcgggtgtaccccgcatcttattagcaaccagggcagatttctccattttcctcttgtctacagtgcggctacaaatctgggatttttttattacttctatataaatataacgaactacacttgggctcctttatatgtgctcgacatttaccacccttattatccctccctcctgtgctgctgcatatttcagatactacttacgactaaacaatttcttataatacccggagtagtatataaaataccagagttctagtaactcgtacctcctaacacaactcaacacaacaaaccccaccttaccacataccgacactgtagatgaagcacgaacagacaagacaagcaacgcccagcaaaacaagcaaaacaagaatgacacagaaacgacacaccaacaaaaaaatcaaaaaaccaaaaaaaccaccacaacataaacacacacgagaacaatagaaaacacacacacccaacatacgaaaccgaaaaacccacaaggaataacagaaagacgcaacaacatacaccgcacacagaacaccaagcaagacaaataagagaaatcaccaagccgtgcctacctcgaacgaagacccatacacgctagactacatcaacaaaagacatagcaatgaaaccagaaaatgtcgcaaaacagcacacaaacaagggtacgacacaaaaacacaatgtgtaacaataagaaggaaaggaaagaacgaaaagaagcaagaccccgatacatagaacactaacaaccagaagcggaccacgcacatcgcaccgtcggacagcaaaccaaaggcacgagaaccaagagcagatagaacaggataacggacagccaactgaaaacgtaaaaagcgaaaacaggcagagcaacgagtaggctgaagtatagtacacagcaaaggacaaggtcgaggaggcgagagaaagagaacagacgcaaacggactaagaacaaggccgaacggcgaataaagaccgaccagaaagcaagacaaagaggggggcaaacaaacacctcatatgtataaaaccacaaaataatattgaaaacttaaacacaatcaaaaactaaacaacaatatctcacacctactcagcaacccacgacacaaaagaacaataataactcatctacatacccataacaaataacacatacataaaccttaattttcaaatcaactacacagctactacactaaataaaaaa

SEQ ID NO: 632597 - DNA, 225 bp, Homo sapiens
gtctctggcatcttggacttctggcatacctggacttctggcatacctggaccttctggcatacctgtgacgcttctgtgcttacctggaccttctggcataccttgaccttctggcataccttgaccttcttggtagcgctcgggttaatatttaagttgtcgatagataatgtgtccctggtcttgtggcataatataactgaatttcatgagaaggtccagg

SEQ ID NO: 632598 - DNA, 185 bp, Homo sapiens
  misc_feature (9)..(9): n is a, c, g, or t
  misc_feature (19)..(19): n is a, c, g, or t
  misc_feature (38)..(38): n is a, c, g, or t
  misc_feature (46)..(46): n is a, c, g, or t
  misc_feature (63)..(63): n is a, c, g, or t
  misc_feature (90)..(90): n is a, c, g, or t
  misc_feature (99)..(99): n is a, c, g, or t
caaatgagncctgtatcantgtatcccctaatctggantagtgccntttggacagtagactgntctgtaattaaaatgtagtatactgcntttttgtanagttttgttttaataaaactttttttttttttttttttttttagtattgtacctattagagaataaaatgtataactgaaaaaaaa

SEQ ID NO: 632599 - DNA, 171 bp, Homo sapiens
acccactccaccttactaccagacaaccttagccaaaccatttacccagtagctgggactacaggtacacaccatcatgcctggataattttcatattaatttagtatttatgtagagccacatttcaccatgtgcccaggctaggagttccagaccacctgggcacgtgt

SEQ ID NO: 632600 - DNA, 702 bp, Homo sapiens
tcgatgccgcatacctcatttaggcaaggcctgggataccaagtggaggccggtcaccaagatggaccgcttgatcacggacatgacgatccagtccctggaggtcatctatctcttatccatgcccatgaacgaatcagagatcattgctttcattctgctggactctgtcaatgatgcggttttgacgattgtgccagtgcagaagccgacccagaccgcctcagtgacccggttccagtcatttcgatgcatcagctactacaatgatacacggctacctgcatgctaagtgctgcgaggatctggccatcggcatccgcaaggacatcaccatggccaagcgttagatcgatcacgtcgcgacatactgaggtaacaagatcgccaactctcacactagcccttgcaagacgacagtccactgagcttccatgctgctccgactcaaccatgcacccatggcaccgccaccgctttccgacattgcactaacatcttcacacacatgcttacaccgacgagtcgtcgacctatcacctcactccactgtcacccttggcaccttgtcaacgccaccttgctagccttgcccctacactattagacccctacaccctcaatgccactcgctctcacccacttgcctcctatcacgataacctgaccacccctttcgaccccacagtccttctcttcccg

SEQ ID NO: 632601 - DNA, 718 bp, Homo sapiens
atccctgagaatccaaaattctccgtgccacctatcacacccagaaaaaaaaaaaaaaaaaaaaaaaaaaaaaaattgggggcggacaggagccccaccggaaacaacctccaaacacacaatccgaagaggggcccgcgaggcccacgcagcgcacacgcgaaacacgggccaaaaaccggtacaccagagaaaaaaaacggactaagacaaagggagcggagaaactcctacaccaaaaaaatagagaagacagcccacgggcgggcaacacgcgagaggccaagcgaagacaaaacaaacacacagggagaagctatagagaggccacataacgcgggacaaacaaatacacaagccgaggacacccaaaagacgaacaacgaaaaaacaaaataaaagccaagaaagggagaaaaaaaaacaaaaaaaacgaaaagaaaaaaaaaaagaaaaaaaaaaaaaaaaaacaaaaaaaaaaaagaacaaacgacagagaagacagacagagaaagaaaagacaaaaggaagaaaagaaggagaagaaagacgggagagacaaagaaagcgggaaaaagaaaagagaggggggggggagagggggagggaagagagaagagagaacaggggagaagagggaagaataggaagagaaagacaggaggagagaggaggaggcgcgagaaaagggagaagggaaagaggcaaaggaaacgaa

SEQ ID NO: 632602 - DNA, 585 bp, Homo sapiens
gctatatctgaacttcagcctttctcaaaatcggggacggtcatcgtggagcggctggtggaagtgtacctgctgccggtggagggctggaagctgcgcttgacgggacatcgcgtctataagctggtggaggacacgaagcatcggcccaaagaaaacctggagctcatcctgacgcagtcggtggagagtacggcccgggctgaggggcttcctctcaggctggtccggtttggcatcagttttttctaagcctgtcccccctcaattattttgccttgttttttcttgtgtggaaacaaatccaaattctattatgtgagaaggagggaaaggcattaaaaattattggtgattggttgacactgggcctccaaggcatttgaaattttaaaactataatggcagcaacatcattaccggtgtgttggggagaggagcctgacatttggtgccacagatactgaaatcctccatgggacggacaactccctctatacaggggatattaacatttataccatcaagttctaaagaaactaattagcagtctctaaaatcttgtcctagggaaatgagttagca

SEQ ID NO: 632603 - DNA, 1578 bp, Homo sapiens
aagtgtgttcgacaaccgatagtcgtgccttgcagagctttcgtgtgtttccgcgaagagttgtccttctatcgcagctcgttctctgttgggtgttaaccctcgttgacaagcggggggggggccgctcccgagggcgctcactgttggttccccccgttggaagttggggaggacaccctgctggtttgttttttcccgcgctgggggtgttttttgccgaccagtgtgggaatacttcctggcggacgaccaagcggggtttctatcacgtggcccctgtgttggtgaccggggggcccacctgggaggttcacagtagtggctcccccgcgggaggtctctcctcgccgggaggtggcctgacagcccggcgcgcagagataattaataagagggaagatggtggggatgtgcccgccgcgtcgcccgcgcacgaagatgttgggggcgccacccgacgttgtgttgtccacaaggcgaaccgtgcgtggaaaagacatttccctaaggtgcccccccttgggagggggagaagaattctgtgagagtcggtgtcgtgtgttcgtgcccgcgattgccgcccccattttatagggggagattgcctcggggaggaattcctcagtgtgggagaggtgtcgcgtgtccccttcgggggggggcgccttcttgtcgttgcagacgagagattggagagcggtttgttgtggaaaacggattgttaatgtccccacggtggcctcagagaagactacggatacccccgctggtcgcgcggctcacgggcggtgcacaccacgaggtgttcaccaggcgcactttgtggtgtgtgctaatttcgcggtgagcctacaccaaatggggcccacccgctgcgcgcttctgtgtgttgtctttatagattggcctccccacaagggagaggttgtgggcgccctccgcgcacatcccttgggggcgccttctatatccctgggccacacagcgtgcttcgcactatctgttcccccccgttgcgcgcacagagaggctgtatcttgtggggggggacacacaacagaggtctcgcgcaacatagcgccgcacgcacacttgtcccccttggcacaaggtgtacacacaggcccgctgtccggcgtctcttgtgcgtgtgtatccgcgcctctagatccccgtgcgacacccacagggcgcacaccgggcacatctcgtcttctccgcacccctgtgtgcgcctatatgagaagctggctcacttgagatggctcggtatatcgagatgagctgtcgtaacacccctcacagcccgcgggctcgcacctggccacaccctgtggcacacacttctgccacacaggccacccctttgagatgccacattttctatagaacctatcacgctatcctgagacccccgagaccttctggaaaggagagctgtaattcaccccaagtttccctatcacggaggttcacctgagccacacctcgtcaaagagcccaccacccacagaggttctccgtgcacgcggactcaggctcccgctgtggctaccacatagggtttttatacca

SEQ ID NO: 632604 - DNA, 868 bp, Homo sapiens
tcgtaacaaagaaatttaaaggcttaaggcacagggaaaggcgggaatcattaagcatcctcaaacacaaggggcccagcgggctgagcaaaaaaacagagactactctccctcattaccatggggcgcccgggacagtccccgtgaggagtagggggcactccagctcttgggcacggggccggggggcaggaaggtgactagcatgatcccagcatacccctcgtgggggaatacggccaccaagaaggcagctcttgggctcgggataaagttcaggcaatggtgtccaggggctccaagctcgggaggaatgaggggggcacagtgcccatagggcggggcagtctctgaacagtctcctcagccctcagggcgcaacaggggggcttcttctggcgggcagtaaggtagaggtggctggtcatcacggtggaggcgggacaacatccccaagggtgtagagccccgcgatttctccagctcagccagcacatgggcctcaaaggtcagggctggccacagggaagaagaattctgggacattctcaccagtgagagatgagacgggccagtactcaagccttacatctcgggggccaccgggagggcggtcttcctccatcagcgcatactgagcaggctacggacagaaaacaagccggcaagggcacctcccgttcagggaatcgccagccaggttggtatgtccagaaaatgcccatcatcgggtggacacccaggagaggtggagccccaacagagctgcggaggttagaccctccggccaggtacccaagtgaacgaggaaggcaaccaaaggtcaccaaaaccccaaggggcggatccacaaggttgggaccaaaga

SEQ ID NO: 632605 - DNA, 1024 bp, Homo sapiens
ggtggctgtttgctgtgtgcggctaggccctgcgttgctgctggatgacctcctgctgcttggccccctgctgagcctcctgtccctgtgcccctgtgctgctgcgtgttctgcctgtggctggcatgccattggtgtgtgcccccgttgtctgcgggcttggtgtggctggctgtggccttgcttgctcgtgtgtcttggtgcgccttgctacttgctttttacattgtgcttaaatccacgggcgatgggctcagtcgacagcgcgatggtacagaacactgactgaatactcacgaggcctaaccggcttcttctgaaatgttcccctggcaaggtgttgccccttgtgacagtcaatttgtggatcgttcacgagccgggtcaatgtctcgttccccgtggaccgcctcctggccccagtagctctcccagagatacggtgcaagtgttaacccattgggcgaaaggctcatgccatcggtttgggctcccacaaggcagccctttcgtgcaacgcccgctgaaaccgaacctatcacgcctggaacgtgcggctctccattacttgcaccttgcactcttgtttcccatcaacacttgtccgtggcaacacatcataccttttcacagtcaacaaaaccctatccccttattataccccctgatcatggctgacaggctcccacacccgcgcgacctggacatcctgcgttgatatagcacgctccacgctttacgtgcgaccaccgcgcatgcgcgcttgctttgcaatcatccgaacacgtatgagcgagcgcgctcacagcctacacctgtgcccactgcgcccattcactctccagcggtactcaacagcggcaacactgccctaaatttcaactactccgtcgtgcaccctctggccgcgttgcgataattgccccacacgtttggcttggccgtaacatctaaagaacagctccccccccaaatttacgcacacccccaggacagtctcatttccaacacgtgcacgtaacaa

SEQ ID NO: 632606 - DNA, 238 bp, Homo sapiens
ccgatggcactggtaactcttggcagacatcaagtcccaactgaataggagttcccctgcacagacagagaaacatgctatcttcatctgaatagctgtcgccagccatgtactttgcccttccgttaataagcgttcgcgtcttggttcatcctctataacctcgattttcgtgcatcctatctttgataccactcctcgttaaacaactttcttgtttggaacaaacccttcggca

SEQ ID NO: 632607 - DNA, 317 bp, Homo sapiens
ccactccccgggtaccatgcatccccaaaaccaaggagccctgccaacccaaggtgcttgagccctgccagcggaaaacgaatgaccgctgctgcacgaagatgccaaagacctaggaactgatgggcagtgagccgtaccatttgacccagctacgctgcgagatggagcagaagacccaggagtaccagatcttgctgaatgtgacgactcggctgcagcagaatattgccacctaccgccgcctgctgaggggcgaggacgcccacctttcctccaagcatgcatctggccaatcctattctacccggggaggg

SEQ ID NO: 632608 - DNA, 212 bp, Homo sapiens
  misc_feature (41)..(41): n is a, c, g, or t
  misc_feature (169)..(169): n is a, c, g, or t
  misc_feature (174)..(174): n is a, c, g, or t
  misc_feature (185)..(185): n is a, c, g, or t
gggtcattacacattgtggccaggcatagatggcccacggntgagatttttgtttggctgttttgtgaggtctgcacagtgttttaaaaggcaggttggggttcctgtcatggctcagcggttaatgaatctgactagcatccatgaggatgcaggttcaatccctggnctcgntcagtgggttnagaatccggcattgctgtgagctgtgg

SEQ ID NO: 632609 - DNA, 401 bp, Homo sapiens
  misc_feature (16)..(16): n is a, c, g, or t
  misc_feature (24)..(24): n is a, c, g, or t
  misc_feature (59)..(59): n is a, c, g, or t
  misc_feature (82)..(82): n is a, c, g, or t
  misc_feature (132)..(132): n is a, c, g, or t
  misc_feature (226)..(226): n is a, c, g, or t
  misc_feature (373)..(373): n is a, c, g, or t
  misc_feature (382)..(382): n is a, c, g, or t
  misc_feature (388)..(388): n is a, c, g, or t
aagtttagcaaaactntgactcanagacccaaatcccaaccatccggtttttatatggncccatgaccccaaaaaaatagtnccttacatttttaaatggttaaaaaaaaaattcaggccccggttcggtgnctcatgccctgtaatccccagcactttgggaggccaaggcaggtggatcacgaggtaaagagatgcagaccatccctggctaacacggtaaaanactgtctctactaaaaatacaaaaaattagccgggtgtggtggcacgtgcctgcagtaccagatacatgggacgccgaggcaggagaatcgtttgacccagggaggcggaggttgccgtgagccgagattgcgccactgcactccancctggcaanaaaagncggctccgtctca

SEQ ID NO: 632610 - DNA, 122 bp, Homo sapiens
gcgcgcatgctgtgtccagcagctggtgggtgcgggttgtgcttgctcctgccatcaggcgcacggtggcttcatgcagtgaacaccttgcgtgtatgctggtgctggaagctgtgtgctgt

SEQ ID NO: 632611 - DNA, 1221 bp, Homo sapiens
tcccctaataatcggtgcccccgatatggctgtttcccacgcataaacaacataagcttctgacatcttaccccaccatctcatccatacatcctgctcgcatcatgcgtatagtggaaggcctggagcaggaaacaggttgaacagtctaccctcccattagaagaggaactactcaccacacctggagcctccgtagacctaaccatcttctccttacacctagcaggtgtctcttctatcttaggggccatcaatttcatcacaacaattatcaatataaaaccccctgccataacccaataccaaatgcccctcattcgtctgatcctgtcctaatcacacagcagtcctacttctcctatctctcccagtccatagcatgctggcatcactatactactaacagcaactcaaactcaaaaccaccattcttcgaacccgccggcagaggagacccaattctataccaacagcctattctgacttaacggtcaccctgaaggttatatacttatcctaccaggacttcggacataatcgtcccaatatcgtcaacttactaactccggacgacaaacgaccccctaggcctaccatacggtatcggtctgaggttcatgatcatccactttgtatttccttagggattcatcagcgtgagcacaaccatatcgtttacagtacggccgtagacggtagcactacaatgaggcaatcattgcacgatcgatatccaataatccttggcgtatcaccaacaggcgagtacaaggtaatatagatgtagcgggtcacaatcaaggaagacaaacttacaaggtaatgtatgcagtggctctgagcccagagaccacatgcctatccccggaagaatcacctgacagtagaatgacctatggaccacacccactcattcggcgtctccctacatcgcaagataatacaaattacaacctaataccacaatttccataaaaacacagactcgtattacccaacacaaagagacaaacatcattcacaattacacggcgacacactaaaaagctcacaaaccttcactactcctctcgcccatcactaccacacgcatactatcacagccattcaatcaaacatacaacctctacatcagtctctcacatcagcatttccttctgcccttctgtctcccttcccccccctcccatcgccgctgctcctatccacaagaccaca

SEQ ID NO: 632612 - DNA, 230 bp, Homo sapiens
gtgcaggacaccatgcagattggcctgtactcggcgatcccatacgtggccgcggcggtcttcatgctggggttctgcgcgcagctccgaccgcctgcgcgagcgccgctggcacacgctggtgccggcgctgctggccggcgtggcgctgtgcattgccaccgcggcgccgacgcaattcgcgctatccctgacggccatcacgctcgccacgggcttcatgtgggccg

SEQ ID NO: 632613 - DNA, 1189 bp, Homo sapiens
  misc_feature (498)..(498): n is a, c, g, or t
ggtgaggaccgagccggcggccgaggcagaggcggtactcgtgcccgtccgagtcgccctcgccggccggtcgccgtagtgagctgcccggtggttcggctatgctgaggcctcccttgtcccggctactagggcgaggccccagtgagtagctaggctcagggactgatgcgctccgacatgctcgggcccaggcggtgtcggaggacgcgggaggaaacgagggcagagctggccgaggtccgaaccccgggcgctggagaatggcgatcgcggtacgatgtcctccttcagtcgaccccgaggacttcgttggtacgacgatgagcgaggaagaattactgggaagaatgtactcataagatcggccccaggaagcagatggaatcgattcggtgattgtagtggacaatgtccctcaggtgggacccgaccgacttgagtaaactcgaaaatagtgtcatccacaagatcttttccaagtttgggaaaatcacnaatgatttttatcctgaagaggatgggaagacaaaagggtatattttcctggagtacgcgtccctgcccacgctgtggatgctgtgaagaacgccgacggctacaagcttgacaagcagcacacattccgggtcaacctctttacggattttgacaaagtatatgaccgatccagtgacgagttgggatattccagagaaaacagcgtttcaaagacctggggaaacttacgttactgggttgaaaaagggcgaatgcggagatcagtacaggggtgacttttgaggaagtggggaaccggcttcactctttctggcgactgtagcgttacacagaaccccgtttttcactcgtgcgcacagcacgagcatttgtaacagaagcctcgtagttgtcggtgaggttgtcccctaaaggggggaccaacccacggcggtcccctttctctccgaagggtgagcctctctgctgagagcggagacgaaaaccaaatgcaacatactcatgaccacgatgcgatcacaacgagggcaacacatagtcagcatcccccccctgacagcagccggatccacgtatgctccatcctgccagatcacgacgcctagcctcaccatacccgcaccccaactgcgcgaagcacaccagcacatacggcatcgccaccatgcgacactcagctcaaccacct

SEQ ID NO: 632614 - DNA, 317 bp, Homo sapiens
tccctcctctttccccacactagttttatttttgtgagaaggagttttgctctgtcgccaggctggagtacagtgacacgatcacgagtcactgaagtctcaactgcctgggctcaagtgaacctcccgcctcaacctcccgagtagctgagactgcaggtgggtgccgccacgcccagctgatttttaaagattttgtaaagatgttgtcttgctgcgttgcccacgctggtcttgaattcctggactcaagccattctcccgcctcaagtgtcccaatgtgctgaaattacaggcatcggctcccgaaagaggag

SEQ ID NO: 632615 - DNA, 653 bp, Homo sapiens
ccatggcaattcgtggcctaagccataaaaccgccataagtttctaagttttgggataaagaaaagtctcccttctaccagtaaccaatagcggtgggctttttttctgtcggccagtttcaaggtgaccatccacaaccacacctgttctttacagggttaaagaagccgctgctttgcagaatatgaatggtctccactatttagtccttctttttctcttccaccaatgtctgttggaaaactgcacgattggaaagccaccactgatggaattcgtttataagctgagggtggatagagccacttagctgtgccacctcatcaagggtagaagtaataaagatccctcgcactgtttctaaggcagcgtagtggaaaagtgtgttctcaggaccagatgtcagtttctctgtgttatatatttctaattctttttctggaaggtcctttttcaagtttcccaaatgaaatgtatttgcaagagtaactttctttttagtgtccttaagcaaggtccccctttctggataaccatcagagccatgagattctctttgcttccgtactgcatccggtgtagtatgggggctaaagctataatattctccactttcccaacctttgccagatccaaaaaaaaaacggtaggg

SEQ ID NO: 632616 - DNA, 552 bp, Homo sapiens
  misc_feature (9)..(9): n is a, c, g, or t
cgcggcccnccgacacggcttgcgagaagcccgacagaaaggggacttccccctacaaccctctctcctcagcgcttcttctttcttggtttgatcctgactgctgtcatggcgtgccctctggagaaggccctggatgtgatggtgtccaccttccacaagtactcgggcaaagagggtgacaagttcaagctcaacaagtcagaactaaaggagctgctgacccgggagctgcccagcttcttggggaaaaggacagatgaagctgctttccagaagctgatgagcaacttggacagcaacagggacaacgaggtggacttccaagagtactgtgtcttcctgtcctgcatcgccatgatgtgtaacgaattctttgaaggcttcccagataagcagcccaggaagaaatgaaaactcctctgatgtggttggggggtctgccagctggggccctccctgtcgccagtgggcacttttttttttccaccctggctccttcagacacgtgcttgatgctgagcaagttcaataaagattcttggaagtttt

SEQ ID NO: 632617 - DNA, 1064 bp, Homo sapiens
gttgatagcggagtgtagtcgatgaagtgaggcagatggaagagtagagacggtgtccgtagagtcgagtgagtgaagtgtgtcgtggcgaagattgataaagcgtgagcagagagcaaagggtgagagcgtgagtagagggatcagtagagtagagcttgctacgtgtgatgatgctatgataatggcagacacgtggacatgatagtgacagacgtgtatagagaacggagacgtgatcgatgtagccaatatatagatacgctagagaagatgcggcgataagtgtggtagagaaggatcatgtacgaacatgagaacgagtgtaggtgatcgtgaatagagcgaacgttgagcttagaccgctatacaatgagagtgggagagtaggcggatgcgaagaggttgtagctgcatactgagaggttatggtgctagagagacgcggattggtatcagatagacgcgtgttgcagacgatggaattagaatgatgaggtgggcagcgagacgaaggaacacgtgcgagtaaagggatgaaatagggaagcgagaagtgcaccggctaatgagagaataaagggtacagttatgagacagtcaaagatggctagtagataggatgagttcgagaaagggaagacagatggtagatcgtgtaaggataggtggtaagatgtgaggagtgaggagtaagaagagaagggggtgtgagattatttgtcgaaatgacatagagagttgaggcagacaaggaaaaaggtagggcgataaactggaagcagataaggagaggggagtaaaaaagtaaaggaatgtgcgaggtctaggatcttaggaattagtaatgtcggacgcgaggtctaacagcgatcacgatacggatccgccatgataaaagcagcccaggccccaacagcgcgctgctgtctggccggatgacagcaatcgtagcggctcgggccagacagcaccggtcctccaaggctgtccctggcccggctggcatggaaatcagtggagaaccaaatgattaatttaataaaaggccttggctttcggag

SEQ ID NO: 632618 - DNA, 897 bp, Homo sapiens
  misc_feature (9)..(9): n is a, c, g, or t
cgcggcccnccgacacggcttgcgagaagcccgacagaaaggggacttccccctacaaccctctctcctcagcgcttcttctttcttggtttgatcctgactgctgtcatggcgtgccctctggagaaggccctggatgtgatggtgtccaccttccacaagtactcgggcaaagagggtgacaagttcaagctcaacaagtcagaactaaaggagctgctgacccgggagctgcccagcttcttggggaaaaggacagatgaagctgctttccagaagctgatgagcaacttggacagcaacagggacaacgaggtggacttccaagagtactgtgtcttcctgtcctgcatcgccatgatgtgtaacgaattctttgaaggcttcccagataagcagcccaggaagaaatgaaaactcctctgatgtggttggggggtctgccagctggggccctccctgtcgccagtgggcacttttttttttccaccctggctccttcagacacgtgcttgatgctgagcaagttcaataaagattcttggaagttttgacacaaaacacaccaaacataaacacaccttttgggccgccttgggctctggaaaaacttttcacaaccttcttttgggcccgcggcccccacgagggtaacgtaaacctggcgccaaagcggtgctccccgaaggaagaaaaccaggagcacacagacaacaagggggactaggatctgccccgcacagtttaaaaaaacggccccgggggcgacacacagaagcgtttttaggacaagtgctcccgcaagtgggaggccctcaggggagcacatcacgggacgatcaaactaacacaagcgggcctccgaaacgagaggccgagatattacaagttttcgcg

SEQ ID NO: 632619 - DNA, 976 bp, Homo sapiens
gtgagtggcaacatggcgaggttgctgccgaaatcctgcggaccgatgttctccgataatagacgtggacaagtctccgactacgtgaccggcgctcttgcccagggcgcagtcgcaggacttcgagtctgtgtattgacctggtggaaagctgtaggagtgaacctatatgcacagaggtgtccggcggacatgcaaggcatgacgcaggtgcaatcacgggaccagtgatgcccagtcgacactgtcaccaacagcaactggcgtctggccattgaggccgaacaataggctcgatggtggaaatcagacgaggttgactcactggtcaccagcgccctagtccaagattgtctaagagaatagatcggcagtagactgagagacactgctgggaaacccaataagtctagcacgggacgtggctaaacagtagcgcgcatccatagttcctcgaacccatgtgcagagtggcaagagcacccggttcctccagtacagagccggcagcgcatccgaacttctcacaggggcaagagccagctgcacgcagatccgcctcaagaaacacaggcaccacgacgtccaatgtaacctaggccacagccatcataagcatgctctaagacacgacggtgcagtgcagaacaagcctcagggcagggccacggcgcggaaaaagggcgaacactcggggcgggacactcagatcctggggcaaggaacacataactccctagtgatggtcgcctgagagttggagcgaaccattctgactggtcggtgaatcacagggacgaatagaaccataggtgccgtgagcctgcggcgccggcaattgtgtaccccgtggcgcatcgggatcccgcataattaccccgggcctgaggcgcagcgccgggaacactggggtggggaggataaccccagaacagcgccacgaggacaggaatcgacgacaacccctcaacgtacc

SEQ ID NO: 632620 - DNA, 658 bp, Homo sapiens
  misc_feature (9)..(9): n is a, c, g, or t
cgcggcccnccgacacggcttgcgagaagcccgacagaaaggggacttccccctacaaccctctctcctcagcgcttcttctttcttggtttgatcctgactgctgtcatggcgtgccctctggagaaggccctggatgtgatggtgtccaccttccacaagtactcgggcaaagagggtgacaagttcaagctcaacaagtcagaactaaaggagctgctgacccgggagctgcccagcttcttggggaaaaggacagatgaagctgctttccagaagctgatgagcaacttggacagcaacagggacaacgaggtggacttccaagagtactgtgtcttcctgtcctgcatcgccatgatgtgtaacgaattctttgaaggcttcccagataagcagcccaggaagaaatgaaaactcctctgatgtggttggggggtctgccagctggggccctccctgtcgccagtgggcacttttttttttccaccctggctccttcagacacgtgcttgatgctgagcaagttcaataaagattcttggaagtttttgtgaaaaacacaaccccccttgtcagtcgtcattatcccaaaatcctctgatcttcgcttaaaacgtcgaaataaattacattgaatattccttaattacattca

SEQ ID NO: 632621 - DNA, 530 bp, Homo sapiens
  misc_feature (9)..(9): n is a, c, g, or t
cgcggcccnccgacacggcttgcgagaagcccgacagaaaggggacttccccctacaaccctctctcctcagcgcttcttctttcttggtttgatcctgactgctgtcatggcgtgccctctggagaaggccctggatgtgatggtgtccaccttccacaagtactcgggcaaagagggtgacaagttcaagctcaacaagtcagaactaaaggagctgctgacccgggagctgcccagcttcttggggaaaaggacagatgaagcaacttggacagcaacagggacaacgaggtggacttccaagagtactgtgtcttcctgtcctgcatcgccatgatgtgtaacgaattctttgaaggcttcccagataagcagcccaggaagaaatgaaaactcctctgatgtggttggggggtctgccagctggggccctccctgtcgccagtgggcacttttttttttccaccctggctccttcagacacgtgcttgatgctgagcaagttcaataaagattcttggaagtttt

SEQ ID NO: 632622 - DNA, 475 bp, Homo sapiens
gattctgactgttagtttggtagtaggtgagatgttaatggtaacatgattgtatttgtttatatctttctattctcatatttctaatatgtatttaggttgtcttgtttatgttgtgcacgtttgggctgaaggtgctgttggcccggagagctgtccaggtgtttgggggaaagggcaggatgaagctgctttccagaagctgatgagcaacttggacagcaacagggacaacgaggtggacttccaagagtactgtgtcttcctgtcctgcatcgccatgatgtgtaacgaattctttgaaggcttcccagataagcagcccaggaagaaatgaaaactcctctgatgtggttggggggtctgccagctggggccctccctgtcgccagtgggcacttttttttttccaccctggctccttcagacacgtgcttgatgctgagcaagttcaataaagattcttggaagtttt

SEQ ID NO: 632623 - DNA, 266 bp, Homo sapiens
cctcgagttcttggggcgcagagaacttaggagagaagcacggaggagcccccggcagagcacccgcccccgggcctcagccttcctcctgtgctagcagcctggggcctccactctggccggaggaaggaccgcaggcagacagcttgggcctttaacagcttttgtccgaagataaaattagtgtcctttcaattggtaaatattttatataaaataaataatatttatttatttaaatataaaattaataaaaataaaaaaaa

SEQ ID NO: 632624 - DNA, 238 bp, Homo sapiens
ggtatccccagccattgggagggcaaaaaggggaggagggttgggccccaggagtccagggttgcggtgacccaggttggccccagtgccccccagctgggacaaaaaagtgaacttctgtctcaaaaccaaccaacaccaaaaaacacttgagaaaggagagggaaattaaggggccaccagtggtagagagaaaattccctctctctctttctttatctcttcccagtttggcccg

SEQ ID NO: 632625 - DNA, 253 bp, Homo sapiens
gtggtaattttctgtgagtcacttattatgtcaaaataaaaagttaaactccacatattcaggaggcatacatactttcttctataggaaatgaccttgtttcttttagccctacttgaggcaggggaccaggaatgagggggaagggacaggatatatacacacacacacataaaattttaaagcatggcccacaacagtaattttttttattgggtttgtgtatatatcctgtcccttctgtcgtcttctc

SEQ ID NO: 632626 - DNA, 447 bp, Homo sapiens
  misc_feature (214)..(215): n is a, c, g, or t
cggcacgaggaaataatcccaaagagagaatctcctaataaaaactactgtttgggggaaaaaaagattactgaattataaacatttgaaatattaccttgagaactcagcattcactgaacagatgtattgagcagctgctgtgtgtgctggatattggggagatacatctaacagatgaaaggagacagagtaaatggtagattacagaatnntaaggactacagttgatataagtatagggatatatgggaacatagtcttggtcaagaaatagcttttaaaaattctgtgtgtaggtttaaagcagtatttttggatggagtaggattgtggaataaaaaaagtaagaaagtgccatcatatttgtgtgctatttgcaaacccatgttatttttttgttaccaccaggcaatttccccagccagaccctggtaccccatggct

SEQ ID NO: 632627 - DNA, 921 bp, Homo sapiens
accgcgattgcggggctctagtgctgcccccgtgtgacccccccccgttggtgtcagcacaagggtgtgtggcccaggtgtatccgcggcccggcttttccacgcggtgatctctccccggccaacagggggctttctcgggagagccccagcgtggctcaacgctctggatcctgtgggagccacctctttgtccgccatggccctggcttttgggagccctcttatacttggtccccccctggaacttctccacacaatgggacacatcagcggtcatgcccgttctttcggcagaagatagacccgccctgtcgggccgcacccctggtatctcaaagatcccccacggggagttttcctcccccccccatgaacccccttggctgcaaattccacatcaatcggaaagtactacaactcttttattgctcaggacccccattcgtcgaatacctgcttattagagaaaaggctccaaacccccccatttgaaaatacacaagaacttgcggagttctctacaaattgtcgagaagtcaattctaatacaataacgtagtctcactcacccccgcaagaaaagtttctaccttatcgattgacagtcaccgcccgtcacatacaaatatggacgacaaaaaagtaccaagagacttagttcaaaatcatgtccaatgcgacccccctgttcctcccatatatgaaaagacaccacccgggccacaaaacatgaatcttctgcaaacatccctaccaccgagaatactctagaaatcttggaaaatcataaatggaaaaggaaaatcactcttccgctctcccaacccaaataagagtattgttccctttaccacccgccccaaccccgggtagacaccccacctaaataaaaacaaacaaatagggcaaacaataaca

SEQ ID NO: 632628 - DNA, 192 bp, Homo sapiens
  misc_feature (21)..(21): n is a, c, g, or t
cgatctagaggatcccatgcnaataacctcctagtgattactcctcaaaagagcagccaaggtagtaatctttttttaagaactttttattttgagataattatagattcacaggaagttgcaaagacagtgcagagaggtcccgtgtacccttcgcccagtttccgccaatggttaggaggtaattggcat

SEQ ID NO: 632629 - DNA, 82 bp, Homo sapiens
  misc_feature (3)..(3): n is a, c, g, or t
acntctgtgtacttctgtgccagcagtggacaggatgaacactgaagctttctttggacaaggcaccagactcacagttgta

SEQ ID NO: 632630 - DNA, 339 bp, Homo sapiens
  misc_feature (48)..(48): n is a, c, g, or t
  misc_feature (299)..(299): n is a, c, g, or t
  misc_feature (308)..(308): n is a, c, g, or t
ggccccaacaagtgaaaaaccattcaccaatacaatttctaaatcaancttgtaactactcaaaagaatctgtgtttagacagtttagaacatctcctgcctctcacagttgggaggctctgaacaatcccatgtggccggaaaaacctattcaggcaggctagaggatttccaaaggagtttgtaggttaaacactgtcacacccaggaattattaactggaactgtaagctaactcttttttcagagagaggtagtgggggagagccccccgtaaagtcagaggtttaggtgaaagnacaagcagnaagtaggcagactctggttttgggggtatat

SEQ ID NO: 632631 - DNA, 342 bp, Homo sapiens
  misc_feature (340)..(340): n is a, c, g, or t
cggcacgaggcttgcatgaaaaaggataaaaccaattgatatggtttagttcttagtcccctcccaaatctcatgtccagttatgatcctcagtgtaggaggagggacctcgtgggaggtgattggatcgtgggggcagtttctaatgttttagcaccatcctcctagtgctgcttgtttaaaagtgtgtagcaccccaccttcctctcctgccggccatgtgaagacgtgcttgcttccctttcaccatctgccatgattgtaagtttcctgaggtctccccagaagcagaagcctgtatagcccacagaatcatgagctgattaacctcttttctttnta

SEQ ID NO: 632632 - DNA, 163 bp, Homo sapiens
gacggcagctgggactcctgttcacctggtatgactctctcaccggggttccggtcagccagcagaagctgctgctggagaagtgccagtgtcctgttcaacactgggtccctctacacccagattgggatccggtgcgatcggcagacgcaggctgggcttg

SEQ ID NO: 632633 - DNA, 89 bp, Homo sapiens
aagacagcagcatatatctctgcagcgcggtatccgggacagtgaacactgaagctttctttggacaaggcaccagactcacagttgta

SEQ ID NO: 632634 - DNA, 87 bp, Homo sapiens
agtgactctggcttctatctctgtgcctcggaggccggcgggaacactgaagctttctttggacaaggcaccagactcacagttgta

SEQ ID NO: 632635 - DNA, 84 bp, Homo sapiens
tctgtatatttctgcgccagagttacgacagggggctcgaacactgaagctttctttggacaaggcaccagactcacagttgta

SEQ ID NO: 632636 - DNA, 123 bp, Homo sapiens
ccactgtcaggcatactgtgctccagcctgggggacagagcgagactccatctcaaaaaaaaagaatcggacgaagaaccacaggatgttgaagacaacggtctgaagtattggtgacgggac

SEQ ID NO: 632637 - DNA, 377 bp, Homo sapiens
gtacggcagcagggtcacggccgggcggaggtactcctacacatccagacggggcggcgggacagaggcctccccacatctcagaacgatgggcggccgggcagagacgctcgtcacttcctagatgggatggcggcaaggcagagacgctcctcactttccagactgtgcagccaggcagaggggctcctcacatcccagacgatgggcggccaggcagagacgctcctcacttcccagacggggtggcggctgggcagaggctgcaatctcggcactttgggaggccaaggcaggcggctggaaggtggagggttgtagccagccgagatcacgccactgcactccagcctggggcaccattgagcaactgagtg

SEQ ID NO: 632638 - DNA, 84 bp, Homo sapiens
gacagcagcttctacatctgcagtgtcccacggggcatgaacactgaagctttctttggacaaggcaccagactcacagttgta

SEQ ID NO: 632639 - DNA, 1498 bp, Homo sapiens
ggctgcgaggacctggtgcggctgttggcagaagctggcctgagctggagtgtgcctgccagtgagtgagctgctgcgtggagaacctatgctgcttaatgtgatgctctgccttggctgctgtgtgcgaagaatggtgtgccccctgctggctgtgccccatgctgtgctgcctggggtgatcagtgagcctggtgccagcaccctgagcttgccttgccccctggtgctgggccccgctgacctagtgcagatgtgaatgctccagcactggcatgcgttggtgcatgtcctggatcagttgccccttgtgcctgttccccctgatgatttgaatgtgcactgcttccctcacacgcctgactgccctgccctgtgactttgctccccgatgcccctggtgacctgctgtgtgacctcgtgggaccgtggactgcctgtccttggctgctggcacgtgagggtgtgcctgcttggcacttggactaacggacaatccttgagcaccaatgacagtgccccttcgctactttgcttgggcatgtggcaggcatgtgggggactttgacatgtgctaggatggctgtgacggtgactatgactcgggggcgttctggactctgggagggctacactaaaagccccgcagagacccggggacacggcctgcgcacacacgacaacacccacgcacacgcgaagcgcgccagccaaacaccctcgccagcaaaacgaacacaagaagacacacccgaccacgaacgagcaaccacaacaacgaaccgacgaaccagacacactacacaccacccccacacacacaccatccatcacgccgacaccggcgcgaaggccgcacgcacgagcaaggcagccgagacgagacaacacgaagaagagaaaaaagaaacggaacgacagcgagccagtgagcgagcggaggacggcgccacgcaggaggagacgcaagcacgacagcatacacgacagcaaacgacggcggcagcaaacacggggagagcgcagcaacgaatacagccggcgagcagcgagcaaccagagagaaagggggagaaacccacccgaccaccaaccccagcgagcaccactgaagcggaagcaacgcagacgcagaaaaccccacccgagacttgacgagaaggacgacaccgacgagatcggctctcccaccagcacgcgcagagaccgcagcgctcgagagagccaaagacacggagcaacatcgactccgaccccacacacctgacaccgaaccaacatcaccataaggacgaagcgaacaatcgacgaaccccagcaagcacaacgtgcgagacgacgacgcaacacacgccgcccaccagaccgaagacgacacgacgccatgacagcaaagcacccacccacaccccacactcactgaccgcaacgagaccggacgacagcgcgctcggcagaccacaacacggagaggacggcgccaagaggacagatgatc

SEQ ID NO: 632640 - DNA, 778 bp, Homo sapiens
ggccagatacttctgagtcttaaaagcataataggccgggcgcggtggctcacgcctgtaatcccagcacttgggaggccgaggtgggtggatcacaaggtcaggagttcaagaccagcctggcccaaatggtgaaaccctgtctctactaaatatacaaaaattagctgggtgtggtggcgggcacctgtaatcccagctactcaggaggctgaggcaggagaatcgcttgaacctgggaggtggaggttgtggtgagccaatatcatgccactgcactccagcctgggtgacagagtaagactccgtctcaaaaaaaaaaaaaaggcataataatttattacattcccaaattttttaaaatttggagttgccttggcagtggggagggtccctaaaattggggtatagaatttagggcccagaactggtgtgtaagggtcctgaatcgtggctaaaatacaggggtgttgtctcgggaattatgaggcataaagtagccagtatctatagttagaatctacagggcctcctttgtggccgtgtagactagaatatacgctggtgatgggcgctggaagtgtatctctcacggttaaagggtgcgtgttgcaaggcccaatttcagactagggtggaaccatctctgtgttcaattttgggggctgccactgtaaatatccctacatcagtcccagcaaattagggagcctacgggacgggattgcttacaagaaagagggccagcggcaaggggcatttcacacaatcttcggcc

SEQ ID NO: 632641 - DNA, 136 bp, Homo sapiens
caaacagaaactaactgcgtctagtaaggcaatagcaaatataggtaacatcgccatcaagataaaggttagtaatactcagatatatgctaagagtatcataagcaagactatagacgactccctaactacccta

SEQ ID NO: 632642 - DNA, 176 bp, Homo sapiens
tcgaatcgacggtttctcgaagctgggccatcaccaacaagacagtgatggtgaaagcaatgatagaagaggtcgaatttagagtaaggatcaggatggaccaggtgggtacattctaacgccaaccttaaactttttagaaaactactaagggcatagattattcctggaaagac

SEQ ID NO: 632643 - DNA, 265 bp, Homo sapiens
ctgtgggcaatggtgtggctgctccctgcctcctggtgtggctggccgtggtagctgagtcctcagcgggtggtctggtggacctgctcgcgggagtgagatgaccttgacatacctggacctctaccacaatggtacgcacctgacgggtggtcacgcggttcttacttgtactgactgtcaggtgggcaatcctctccctccagtaggtggcggaaggtggcaacatctcactgctccagcctgcgtctaccacatccagcag

SEQ ID NO: 632644 - DNA, 386 bp, Homo sapiens
  misc_feature (364)..(364): n is a, c, g, or t
  misc_feature (370)..(370): n is a, c, g, or t
agctgttcctagagtatccctgcctactggcgtatggaatggcatctcacctccaggtgagcatcgacagcctggagcagcacccacacccccaggtgagcattgacagcctggaacggcaaccacacccccaggcgagcatccgacagcctggaacagcaccaataaccccaggtgagcatctgacggcctggaacatgcacccacacccccaggtgagcatctgacatcgtgcagcagcaccccaaacccacaggtgagcatctgacagcctggagcagcacccacaccccaggtgagcatctgacagcctggaacagcaccctgcacgcccaggtgagcatccgacagcctggagcaccanccaaanccccagacgagcatct

SEQ ID NO: 632645 - DNA, 475 bp, Homo sapiens
accatgttgcccaggctggtcttgagctcctgagctcaaagtatttgcttgcctcagcctcccaaagtgctggggttacaggcgtgagccaccgtgccaggcctttaattcttaattgccgccaggattgattggtaaggctgtagaagagttgctgtccattccaagtcttcccatctgaagcaaccaccatgccacagccttattctgtcccatggctgttttgtgcatctccaagtgtaccagtatgaggccctcaaacacacccatgccctctgatgaaataatgttggtcatgataaccacagggatgtcacagccgccgttccacactctaactaattcttattttgttccaacaacaacaatttgaaatgggaagaaccaccccattttagacatttcaaaacgagggcttggatagattatgtaccttgtccaaggtcacacaaccaaatggcaaggcacggactca

SEQ ID NO: 632646 - DNA, 419 bp, Homo sapiens
gtcaatacagtgggacagactatagagcaaaagcagggaataagaaaaaagcaacataaacaaaatgagacaaagggattatcaagcatcagcaaaaggtgaggctgagatacgaggcatgaacaaagacgccagggtaaaaaagcattgaaagaaaagacagggttatgccatgttggtcagagtggtcttaaactagagacagcaagggaaatgactgcataagcctagcaaagtgctggaattacaagcataagacactaagcccaatcacagtgtgtcattgtatctaaagtgagtctctctgagtctctctcactctctctctctctctctctctctctctctctctctctctctctctctctctctctctctctctctctcctcgtgccgaatcctgcagcccgggggatcca

SEQ ID NO: 632647 - DNA, 747 bp, Homo sapiens
tacccttgtggcgcccctgagggccccacccccccagccacagggttgggcccccacccacggggaggtccacgccccacaactttttgttcctctgtggcacaccttggagggaatatcttgcgtttccacaagatgaaactccgcatctttaaagatgttatttgcgccccccctcctcctcatataattgtgggaaaaatatatctggtgttggccccccacgcgctgtgtttctctctcttgtaggaagagtgatatattccacacagacacactggtcgccccccacatcctgggggatttgtgtgaccccgtgagctataggggctatatattaacacaccttttctccccccccacaacgcgaaaacttgttgggagatttttttaaaaaggagaaagggggagagaggggaaaccaccgagagaacacctctgtggttctaaccccatggggtgtggccaacttttcccacacgtctcgcttttactctgatgggtctggccgctgtggggccacgcggcctctcccccgcggcgtcctcgggatttcccctgtgatcccggcttggctggggcacctccccctaatcaactctgcgtgttggttaagcaccccggcccgaattgattggccccggaagtggagttttttttttataaagggggggggacattttccaaaaaggatttcccccaatccccctcccctttataaatccaaaaaaattttgggaacaggga

SEQ ID NO: 632648 - DNA, 216 bp, Homo sapiens
ctctccgaaaaggctccgatcccccttccccagtgtctcacgccatagccatggcatgctgcctccacccagggctctgccagcttccctccttcccctagacagctgcctagagacccttcaggaagcacgagatctgctcgtggtactgccctgtttcaccgtctaggccatgttaaggcaggttccaggtctccatagggaaggcagagaggg

SEQ ID NO: 632649 - DNA, 225 bp, Homo sapiens
ctgctggggtgactctagagaatccccaagcaggtaatacagacaccaagcgttataaagcattcctatctctccacatcctctccagcatctgttgtttcctgactttttaatgattgccattctcactggtgtgagatggtatctcattgtggtttagatttgtatttctctgatggccagtgatgatgaggcattttttcatgagtctgtattaactgcttg

SEQ ID NO: 632650 - DNA, 256 bp, Homo sapiens
tggggggggggggggggggaaggaaaaatttttttttggaaaaagggggtttggggcaataaaaacctttttgccgggggtaggccctttccctttttggtttttttttggccccccagggggcccttaaccttccctttaccctttttttttttccaatttttttttttcgggctttcctagaaatcggggggccctttatcccagcccgggtttttccccttttggggggcccctcccgggggggcccccccta

SEQ ID NO: 632651 - DNA, 347 bp, Homo sapiens
tgcacgagacctcagagtaaacacattttctgttgtatttttgctcccggacttatctccctgatgaccccagcatgatggccctgatagaggagggcgaaaggctcttccccaaacattggtcttttgttaatgactttcatcctggtcacgtggactgaagcagcagtcctccagacatttctctggtcctttgaaaacaagcaagagcctgggaagggaggagcacacacacccagccccagcccctggctccggtttaacggaggaagagaggaatggatgtgtgtggggtgccctttctcttctgttcttccttttcttcttctctttttattttttttttt

SEQ ID NO: 632652 - DNA, 172 bp, Homo sapiens
tcttttccctacaaacatgcagaaagtcatacttaaacggggcaaatactactatgtctttgatattttttatgtgtacgtattgtatagtgacgcgatagaagttacctattattttttacctataacttagactagtgcttcatatttacataaacggataaatattgat

SEQ ID NO: 632653 - DNA, 227 bp, Homo sapiens
  misc_feature (108)..(108): n is a, c, g, or t
ataggatctttatagaacagatgctcagcttgttgactccataagcaatcatccttggcccaaggtgtggtcacgaaggttgctggtgtgaatgtatatgggcacaanccccatggaaagtaattaagccacgtatttcaaaagttagaaatgcatttaccccttacccagcaattacgtgtgttaaataaaatatgcccgaggttggtcaatgcagccttgtttaa

SEQ ID NO: 632654 - DNA, 218 bp, Homo sapiens
ttggaggtgagcgggagttgtgtcccaatccaagggccattgacttaaactgtagtcatgggtagaggttatggggcaccacccgagctaatataattaggggcagtaacatatgtcttctttcctccagtcccaaggcaactctccttgggggctggcgtgcagggcatagggtccccagcttaatggggcagcagcatatctatctaggtggctta

SEQ ID NO: 632655 - DNA, 498 bp, Homo sapiens
ccagcagcagcatgacttcacactgacacagactgcagatggaagaagctcatttgattggctgaccgggagcagcactgacccgctggtcgaccacaccagtccctcatctgactccttgctgtttgcccacaagaggagtgaaaggttacagagagcacccttgaagtcagtggggcctgattttgggaaaaaaaggctgggccttccaggggacgaggtggataacaaagtgaaaggtgcggccggccggacggacctactacgactgcgcagacggtttatgagggaccaggagaagctcagtttgatgtatgccagaaaaggcgttgctgagcaaaaacgagagaaggaaatcaagagtgagttaaaaatgaagcaggatgcccaggtcgttctgtacagaagctaccggcacggagaccttcctgacattcagatcaagcacagcagcctcatcaccccgttacaggccgtggcccagagggacccaataat

SEQ ID NO: 632656 - DNA, 393 bp, Homo sapiens
  misc_feature (386)..(386): n is a, c, g, or t
gttattactagacagaggacaaaaaaattctgataaaagttttaattcactagaaatatataacttgcttgcatttaataagtctcaaaataatgaaatttttgactgattgcaaagaggaattcatcatctgctgtttataacagaatacctgaaagtgggtaattaatgagagatgatttgacttcttatagttctggaggctgagaagtccaaggttaagggggtgcatccggtgagggccttcttgctggtggggactctctacagagtctggaggcagcacagggcatcccatagtgaggaggctgagtgtgttagctcagttctctcttcctctttttattaaaaccaccagtcccattcctgtgataaaccactaattncattaac

SEQ ID NO: 632657 - DNA, 785 bp, Homo sapiens
tgggccgtgccaaggttggctgttaccagcagcagcagcgatgcagcatgctaagcagcagtatgcatccccagatgctgatgatagtccccaccaccaatgtccacagctctggcagtgaagaaatgtgaggaccaatggaccatgccagtatggcagcagccgtgagctccatgcctcagaggtcccagccatgagccagcctcctgctgccagcttctcctgcgggtaacctgggctagagagcaacagaagaggagagctgccatgagtagcgagccgcgatggactagtggccagcaaagtccggggtggagagcggctacgttctctctggagaagaccgagacaggacttgaagtgcttgaagaacagcgagcttgccccccagaccgttctgcctgtccctaagctcccagtacccatcaagcagagggccgttcctcaaggtagcttggatggactggcgatggcggccgtgctttcgcaccaagggcaggccgccctgattgcgcgtagcgtgctgtcgaggtggggggccatctagcgatctcgtgctgcacgtagcccgcgtagggcgcggcggctgccgcccgcatgggcgtttccctcagagtgctccgggatagctacaagaacggggacaggggccccctgaggagactgtcatcccagtgacgcacattcggggagtttgcgaccccgcgttccttccgaggacctgaccatatgcccacagaccattgggaacagggaatgtccgtccgaacgtgcctccagatgag

SEQ ID NO: 632658 - DNA, 123 bp, Homo sapiens
tagcaggtggtaagatcacttaattccaggagtatgagacagcctgggatagtggcgggtgctatagttccaactacaggaggctgaggtgggaggacacctgagtctgagaggtggaggttg

SEQ ID NO: 632659 - DNA, 848 bp, Homo sapiens
gtcccccacccctcagagtggccttctgactgccaggagaatgtgctataccctctgtatgttctcccctaacaggagaggtcatgtgaacttgatggaggaggtgcacggtttggttgcccctcacccttaaagcttagagcagttgtagcgatttccagtccagcacatacagtcccagtgccccagcaagaccggaagtgtgtatactggcctcttatcttgattctttcaaatgtgcgggaacttgtgaaactgtcatctggaataggttccatctcttatgtgtgttagatcaaacaaagaagcccccagcatgcccaaaatgctgcttcaaaagcctgccttccagtccttacaaaaaccttgccaggattaaatgtgtaactttttctatttttgtacagtttctaaagtgaatttgctagtgatgtcaaaatgaatacgttatttgaggggtgtgagcacctcctccatttaaataaagtgttgacctttccttttatttttcacaaggtggaaacccgttgtgtgcctctcgattaagggtttctgatgacattattcttaagacagatgatccttatataccaatatatgtgccttgttggattgaattcagaagaaattgacctttatttgtctaccagtaatggctggtaattaagcctgggcaaaacttttgaccccttggtatttggataaggtggaccttggaatcgggcaaggcagaattaagggtattgcccaaaattggttgcgaatagttgggaagggttttgaaaacggggtttttaaagtggggagaaaaaaccagcgctaaaagagggtgttcaaaatgggggacc

SEQ ID NO: 632660 - DNA, 173 bp, Homo sapiens
cctcggctctctcgaggacaggcgtagtggacgatgagagttcgatgacgcgggctgatggggataatccaccaggaggagagggacacggtggcctcgtgtgggccgtgcctgatgcagcgtgggcccgaacacgatgcccaggaatcccggtggccgagggtaccgagctc

SEQ ID NO: 632661 - DNA, 290 bp, Homo sapiens
  misc_feature (22)..(22): n is a, c, g, or t
  misc_feature (30)..(30): n is a, c, g, or t
aggtgcggtggctcacgccctnttaatccntgcactcaaagaagccagggtgggaggatcggctttagcccaggagttcaagaccaagctgggcaacatagcaagaccccatttctacaaaacttttttaaatgaggtgtggtggtgtgcacctgtagtcccagctactcaggaggctgagatgggaggatcacctgagcccaggaggtcaaggctgcagtaagccaggattgccccactgcacactccagcctgggtgacagagccagaccccgtcttaaaattaaaaa

SEQ ID NO: 632662 - DNA, 142 bp, Homo sapiens
gacattgaggatatatgtctacgaaggcctgtacttccagctcttttcaggacagggtcacaagtaggaagggtaagccatatcaaagacttcattgaaaacgaccagaggatctcaaaagaagtcctcccctgtccctggc

SEQ ID NO: 632663 - DNA, 126 bp, Homo sapiens
cacccagaacacagtaaaactgaaagaaactcagtcagagcctgggcatgatgaacgatgatgatgagaatatcgttcctttctctctatgtccatggaggaatttatgcaacttccatcgtgaag

SEQ ID NO: 632664 - DNA, 159 bp, Homo sapiens
  misc_feature (108)..(108): n is a, c, g, or t
ccatggagaacaagactccttctttagcgtggcgacgcttatattaatgctgactcatctatagaaggatagtacactctgagagttgattgtcaccactgatgtacnagcttggtatacaacctaacaaaagaggtatataattacatataatttaag

SEQ ID NO: 632665 - DNA, 245 bp, Homo sapiens
aaatctaactatcaaaccaagggtatggagtatcccacctcaggaaggaacactgaacaactgattgacagtcttcttgccgccagccagaccaccaagtggcccattaaccaagagaaccagcgcaaccagatacgctgacccgcatctcctacctctcatgtgctttgcccagcccagcctgcataccttactcatgatgtcaattcccaagtttcgctaataaaaacatctctgcaagcctc

SEQ ID NO: 632666 - DNA, 358 bp, Homo sapiens
ctgggttgaacaaaaagaggaaatgtgtgcaatgtttacaggtaaaaagttctcgctatcactcttaaaattccataggcttagaagaaattagggtgttgctgatagaagaacagtctgtagctcttaatgtttattttatactataccctttacaacagaatttcagattattgatcggcattgcctgattccatttcattgagtcctatgagagttgaaattgcagactgagacaaactaaaagtaccaagttcatcatgtttaaaactgctttttcaggatattgctttctctatgctacttcagtgctgttcctcttccactgataggttgtaattgcaaaatggatggggga

SEQ ID NO: 632667 - DNA, 128 bp, Homo sapiens
ggaattccgggcggacccaggcgtgcagccgggcgggttcggggcgggtgttgccggctttggcaacggccgggtgggaaagcctccctctcctgagatatgggcatatggggatcaagtgagatctg

SEQ ID NO: 632668 - DNA, 323 bp, Homo sapiens
  misc_feature (221)..(221): n is a, c, g, or t
ccaaggtctgtgaccaaaggcaaggcccctacttctgctccaaatcagaagcccttgaggaaggaatttgagtggcttatcttgatcatattgtttctaaccctatggccagggcaggcgaggtactacgattgatgcctccagcaaaagttgggtaggaatggttttctaaggaaacagggacgctgcaaatattatagcatagtaaatatctacacttncatcctttggtagctcagcacgtgtgtgtactcacatttgttctcatacatacatttcaaaaatggttctgcctaatataatgcaaagatttcaccccacat

SEQ ID NO: 632669 - DNA, 354 bp, Homo sapiens
atgctggaggcatgcaacttggagcttgtggtctgggagtggctataactgggaacaggggctgggcacggtggttcacacctgtaatcccagcactttgggaggccgaggtgggcagatcatgaggtcaggagatcgagaccatcctggctaacacggtgaaaccctgtttctactaaaaataaaaaaaattagccgggcgtgttggcaggcgcctgaagtcccagctactctggaggctgaggcaagagaatggcgtgaacctgggaggcagagcttacagtgagccaagatcacaccactgcactccagcctgggcaacagagtgaggactccatctcaaaaaaacaaaaa

SEQ ID NO: 632670 - DNA, 609 bp, Homo sapiens
agcggagctgtcgcttgccgggcagctggtgagtcggtgacctggcctgtgaggagcagtgaggagaatgaataccttccaagaccagagtggcagctccagtaatagagaaccccttttgaggtgtagtgatgcacggagggacttggagcttgctatgggtggagttcgtccgggctgaacaagcggaattaacagataacttgcgagaggtcaaagcgtcagcatgtcacagtgtgcgtaaagccgtcacctggaatgtcttagaagccgtgaggtatggctgtatgcaatcaggtggaccttgattgtgatcgagcgttaacacgaggagacacttcaacaggcgaggctcgagcagcgtcgtactcggttagttgggccagcttcaagtgtgtcttactcagtcaactggagtgtacccaaaacaaagatctagccaagtgcaagtctctgtgctgcactggacgagactgggtgcagtgtgacccttaaggcctgaagattccaactgtcgctgctcttggaagcttgacgacaatgttactctgcgccagaccagtcaccacattatggcgtctcgtcgaaagcccgattcagaattcctga

SEQ ID NO: 632671 - DNA, 117 bp, Homo sapiens
tcgaatgtctccgccagtcgggccttttttcggcggtatagccgtgcagcgtggtgcccacgcagtcgaaccccaacctggcagcctcttgcgcttcttccacggtggcgatgtccg

SEQ ID NO: 632672 - DNA, 107 bp, Homo sapiens
ggatccttaatatgctgtctcaaaaaaaaagggaggggtgggggaggagagaaggaagggaagggacgggaaggagacggcagacggaatggagaaggacggcaagg

SEQ ID NO: 632673 - DNA, 319 bp, Homo sapiens
ccaagccgtcgtgtagccattaatgcgtaagttttcgcccgatgtaacagcgccagtacggtcgtcaccgtcaagcgcaacatacggcggtgcgttgaagtcgccaaacgcattgccgagcgcctgacacacccttttgagccgttcgtaaactcaaacaaacagcctaaatctaagtcgacgttcgttgagctaccaccaagcaacgatgagaaaaagcctttcttttgcggcgcttgtagttgattccagtttaagttaatgtgaatttcaccaagtgactgcgcgcccttcgttaagttgatcgactgcttggatt

SEQ ID NO: 632674 - DNA, 97 bp, Homo sapiens
cgtcactgagataaccagctcggctgttagcaactctgttagcaaagctgtttgtctttctcggaaacaacagtaacgataagcctctttgaatatg

SEQ ID NO: 632675 - DNA, 1079 bp, Homo sapiens
  misc_feature (628)..(628): n is a, c, g, or t
  misc_feature (714)..(714): n is a, c, g, or t
tgggtccgtagtgggtccatagtctaataccagaattactcatagctcagccacgaaggtgagtttcaactctcactttctctatattattctcctccgtggattatagtatacgcttggggtggcgtggaattccatttcatattcctacactataatgtgtatctcaagaagtgtgttacgtgaaaaactattcgagaaagctctcgtgaaacgagaagcgagaatttcatctcaaattgtctcgctcgggtaaatataaaatctctctatatagaaaagagcctttagtgtgtgtgtttgtgagggtgggtgttatatattgtgtgggtgcggaatatatattatagaaatgtgtgatctcgtgacatatgagttgtgagaaagttctcctctcaatgtgtgtggctataaatttgtgtgccacagagggggccacgcaagagttataactctcttttgcgattttctcctatatatagcccctttataattctccgtgtgtgtgccacagcgtgtgaagcggaaaagaaagagagtgtgtcaacacagaacatctcgcggtgtgtataaggttttttcacaatttttcctcctcattctcgtgtatactttctcgtgaaggcanaaatcttatttctcttctcccaacacatgtgtgtggggcccaatgtgtgggctctttattctcccatgtgtggcgctgtgagaagnccccccgggggtttctctctatagaaaggaaaaaaacctctcccctctatagagtgtgtgtatgtttagaaagaactccccaatatattctctcatcttctctatatataacgcctgtttaccgaggaaagaaaggctttcaatctcaagcgtgtggaagataccccctctattttaacccccaataacagggaggaaggaatatctctcgctccccaccgtggtttcttttttcaaccgcccaaggtcaaccctgtggcggcaaccacccttgggggagcagaaccggcacggctaacacggtgggtgttcttccccaactccaaacgaaagaggaattaccgtcgcgcgcgcatcaacctgcg

SEQ ID NO: 632676 - DNA, 303 bp, Homo sapiens
tgcctacgaaatacccataatcctccctcaccccaaatcacaaatctcctacatgtgaacatagcctgtcactcatttgccatgaggtacgtgccatctccctgcagtgctacagttctcccattgtcttcccgtctggttaacgagcagccctgtagctgggtgtgtctagttagctcttgctttttgccggagttctctcctagaggccaactactgctgctctcgtttattatgatactgacattctgggttcagcaaggtgggtgggaaaggtggtcacatgtcccatacaacctatca

SEQ ID NO: 632677 - DNA, 345 bp, Homo sapiens
ataaaaaagttacaatgtgtactcctagagaaaccaaaaatccaaatttgtatatgaaatcttaccatcttaaaagattggtagctaattattaattaaaaagctgtgccgtgtgatgtgtcgccaaacggactggctcatgggtgggcacgtctcaacctctgatctcagagcgtgcatgccttgtcctcttaagacaactcctgtggcaccgtttctccctccacagggccaaagccatagtgtccggtcccaaggacaaggctcttccagtgctaggagaggtatgagcaggctctcacctgtgagctgtgtggatcacaaggctgcctgcctcagtcttgg

SEQ ID NO: 632678 - DNA, 571 bp, Homo sapiens
  misc_feature (203)..(204): n is a, c, g, or t
  misc_feature (211)..(211): n is a, c, g, or t
  misc_feature (309)..(309): n is a, c, g, or t
  misc_feature (379)..(379): n is a, c, g, or t
  misc_feature (406)..(407): n is a, c, g, or t
  misc_feature (409)..(409): n is a, c, g, or t
  misc_feature (411)..(411): n is a, c, g, or t
  misc_feature (413)..(414): n is a, c, g, or t
  misc_feature (432)..(432): n is a, c, g, or t
  misc_feature (449)..(449): n is a, c, g, or t
  misc_feature (464)..(464): n is a, c, g, or t
  misc_feature (474)..(474): n is a, c, g, or t
  misc_feature (486)..(486): n is a, c, g, or t
  misc_feature (507)..(507): n is a, c, g, or t
  misc_feature (513)..(513): n is a, c, g, or t
  misc_feature (516)..(516): n is a, c, g, or t
  misc_feature (534)..(534): n is a, c, g, or t
  misc_feature (538)..(538): n is a, c, g, or t
  misc_feature (541)..(541): n is a, c, g, or t
  misc_feature (553)..(553): n is a, c, g, or t
  misc_feature (555)..(555): n is a, c, g, or t
agggcagagctccgccttgttatcaacaagtctcattcaaaactccgtgggaatcggcctgaaagtccagaaaagatgttgtctacctcagaaatccttagaatcaatattctccagaaaagtaagagttctcctttgctttagaagtcagactttgcctcaaacttgtaatgaaccccaagcctccaacatggcgatcgttnntgtgaanatggctctgcttcatcccctgaagccaacagtgaaaatgcttgaaagatctaaccatgtgagccggacagaagtcagcagcaaccatgtcttgatttnccttgataaggtgtcaaatcagacactgagcttgttcttcacggtttctgcaagatgcccagtagagatntaaaccagccatagtaaagctatattnntncnanncggatgagtttgaattgntagtcaatgtccttcancaaagatcttgaaancttaagaccncaaggctaaaantctttgctgagcctgtctcanagtccncanaagacacgtgtttttgtncttnaanacttgatgaatnancactttttctggtcca

SEQ ID NO: 632679 - DNA, 343 bp, Homo sapiens
ggtgcaattcctcttcttaagcaacatacccatggccgagctcctactcctcatcgtacccattctaatcgccagggcattcctaatgcgtagcgaacgaaaaatcgtcaggctatagtaccactacgcaaaggccccaacgtggtaggcccgtacgggctctgtacaaccctgtcgcggacgccataacaatcttcacgaaagagcccctaaaacgcgtcacatctaccatcgacctctacatcatcgccccgatcttagctctcaccaattcgctcattctactatgaacgcccctccacgagacccaaccgcctgttcaacctcaagctaggcctcctat

SEQ ID NO: 632680 - DNA, 136 bp, Homo sapiens
ctggatttgcggttgactcatagaggctcccgatctaacgtaacacatggctgcacagtgcagacctagacccacaggctgcacagggagacctagacccactggctgcacagagagccagacccacgtggtcttg

SEQ ID NO: 632681 - DNA, 346 bp, Homo sapiens
  misc_feature (346)..(346): n is a, c, g, or t
ggttgagaactctgtggcagatatagaggtgtatgtaaagcgaatagagaggtctctgtgggacacagctgtgcacgaagatatatgagcgcctgtaggcgcctctttctataccagataccgagggtatactgaggtggtgttttccattggcaggcctgagtaggttagcacttccacggtgggaataagaaggagctttggaatggtgagcacacacaggcgggagctatgccacagatggagccagaaccgcggaaacctgtgaaaggcagagatatgtgaaacaggatatgggcttttgggacatggagtggtcagcagaccgatggagtgagagggtttn

SEQ ID NO: 632682 - DNA, 176 bp, Homo sapiens
caggtaggcccgtgtaggcagcgacacttgttctaagcttcgggcctttcccacctgtatatggggatgatagacgcctcccttaactcacctctgcactggcaggagacaatgccagggtgtactttcccacactgaccctgacagtcgtccctggggagccgacctccagacca

SEQ ID NO: 632683 - DNA, 220 bp, Homo sapiens
aatcgagccagccatagagcagcatgtcggccagcgtggagcgcttgccgcaaatatagtttcggccatcctccatctggccgttcagccattgcaggcggttggcggcgatcatcttaagcccgggcgatgcgtcaggggcgcaagggattcgcttctcgaagaatttcaggccttcaccgaagcgaaagccgttgcccatatgctcgcagatgttgag

SEQ ID NO: 632684 - DNA, 515 bp, Homo sapiens
catatcattcaagaagaattagatacgcagcctgagcaacatggcaaaatcccatctctacaaaacatcaataaaaaaaaaattagtcgggcatgggggtgcacacccgtaatcccaggtagctgccactacaggtgctgcaccaccacgcccggctaattttggtatttttcgtagagacagggtttcaccatatttagccaggtgggtcttgaactcctgaccttgtgatccacccgcctcggcctcccaaagtgctgggattacaggcgtgagccaccttgccgggccaaaaatctcagaattcttaaagactgtttaaatggctccatcagtaatttggaagcactttcctttttttttttccccttttgggccctttccccaaggccaccattgggttggataattgttggcggggaaagagcaggggcaggaggtatgctgggataagtgacataagggcatcgcgggatgtatcggataattagatagacccggtcatctgaggcact

SEQ ID NO: 632685 - DNA, 1226 bp, Homo sapiens
  misc_feature (399)..(399): n is a, c, g, or t
  misc_feature (662)..(662): n is a, c, g, or t
  misc_feature (852)..(852): n is a, c, g, or t
  misc_feature (1125)..(1125): n is a, c, g, or t
gcgagagactgcttgctgtggcggagagcgccagtaggtgcatgctccagtcagtgatggcattgactgcgttggcggtgcgggacgtggcttgtggcgtgtgggggcgtgaggaccatgcaaggtccctgtggcttcgagtgtctgtgatcatgttcctgatgaatgtcggatcgcggggccagcgtgtgctctcgactctccgtgagaagctcggttgtgtggccttcaggtaaagaagtagatgcagaggttcgttaacatgcatagtaactgagtaattatccgggtttaccggcgtcagccgtgagtccccatccgttctcagactccttgggatcatccctagagtgggccggttccaaatcctatttagagcgtagtcgagaatcttggccncaccgctagctatctcgtaccctttggggtagcactttgcggagctgccaccaatcacacactcgagttcaaggagatcttcccctgtgggcgcgcctaataatcacgagggtatactcccttatagcacacctttggagtaggtccccggacacagttggtgcgcgagtcgttgagttacggtggctaactgccgcccaagttttatcacttagctaaccaatcaatgttgtgtcagggggcaccctcaaatagcgcgtttntcgccaaacccgggagcgagggttctaccgaagaaatcaaagccaccgcaactgggggctttcaaagagcttccctaccctttttaattccatttaaccccatttctttccccggcggttgggaaggtttccgtcacctccaggaggtccagttagcgaggaaaacaaacacccccgccaaggattatcntattcaggccaaccgaaaggtaggtctataaggagttcgcgtggaaccccaggcgccccaaagcaggattttttggcccattcccccaaggcgacttgaatattcccacctttccggggagcgcccttaaccgcgaactctatgtactagacgcccgcacatacgtaacatagcgtccagtccagttttcccataccggagccgaagagcaacatggcgcttttaagagcgttttttggcagaaaatggccgcttggcaaatgtggcagtttntcaagggggggctttttcgttcacacaggggttggttttcataagagacccccccaccggaacggttcccgggcgaaaggaaggttggaaggggaattgac

SEQ ID NO: 632686 - DNA, 678 bp, Homo sapiens
gtttaactttgtcctttttaaagcggaaaaaagggagaaaaaggtaaggccccctatcttgggcaagagacccagttgtaagtataaaaaaactggccccaatggagttctcccggcggcccattcctggtaaagcggaattgaaacagctgaaccttcggggatactgccattcccattcccagcttcttggttaaagaactcccccgtgcacaggagagtgaagatcggttgggtttagcccgggcgaaaaagactcttaacaggctcacgtccaacattggggataaaacagcacctgggagaggggatgttcattagcctccaggatgggtgaaagcttcgcccatctctgacgtggtccggtatcgggtcttgtgtcctgtaggaccttagggcctatgctgaccccaacactggcagagctgatcctcccggcgccttgatagttcgcaggagaagtcgtttcattcaagaaggggccatcatcagggtagaagagcacgtctgctcaaaccggaagcggcagcagcaggttcctgctcacgccctggacttttacaacaacctcttacaaatactgcattgtgtaaaccacaaaccccaagattagtatttgggtcttgtataacaggtttccaactggacaatggagttctagtgagttaaaacagctgc

SEQ ID NO: 632687 - DNA, 124 bp, Homo sapiens
ctgttctcatactgaactaggcggtacccagacacagtgacactcttcctccacatttactcatgatttcagaaaacaggtgaaaacaggctgagcgcagtggctcatgggtgtaatcccagca

SEQ ID NO: 632688 - DNA, 132 bp, Homo sapiens
aaccccgtcggtcgcccttgttctgggcgtgtgggtggggcgacataatctcccgttgcccatgttggagtgcagagactcgatcttgactcactgtatcctccgcctcctggcgatctcgccattctcctg

SEQ ID NO: 632689 - DNA, 216 bp, Homo sapiens
aggccgtgtcagtgctgggattacaggcgtgagccaccaagcctggcctagtttttttatttttagtagagacacggtcttgcttgtgtgctcaggctggtctcgaacgtctggcctcaagcaatctgcctgtcttagcctcctgaagtgctgggattacaggcgtgagtggcctgtattttctttcttatttattctgtggtaaaacttttataa

SEQ ID NO: 632690 - DNA, 149 bp, Homo sapiens
acggacgctgactgcctgcggtcacctcagacgactcccctttttttttcttttttgtttacgggacggcgactttacggtcggttggtcgtacggacgactggtcctgtgacggggtacccgacgctcgacacttcgtaactcacggg

SEQ ID NO: 632691 - DNA, 1011 bp, Homo sapiens
  misc_feature (1011)..(1011): n is a, c, g, or t
tgggggggccccccctttttttggggggccctctaaaggggggcgcccccgtgaaaaacccgggggagggggtcggggcccccttttttcacccgccgcggggcaccaacgacctcccgagggggctccccttcgcgggctgaagaaggaggcggagaaggaggtacgcgacgccccattataaccacgaccccgcgggttgtcgcgactccgcgggagagcggcacttcaccgggggaaacaagtgtgtattaagcccgcagatgggaaggagtggggctcccaaagaggggacgagttctcgggaaagacagcccccacaacgtggggcgggggggctccccaagattctgcccaccgagtggagggggtagggacccacaggcgggggcgggacctcagaagacaaccaataagtggggagagtgggaagatgtggcggtagaacgcaactgtggagccgcgagaaggctcgcacaacaggaggcctccccggggggagaacacctggtttgtcgaccacacaaagagcgagcggcggcgtaccccctcgctgcggaccccaagtaggaaccaagggtcgggtgagaggggagacaaccccactactgaggacaccaatattgcccccctcacacacctcgtgagacaaacacccgtgccttgtggggatccagcagcccgtatggacccccaacatattgtgttgggacgcacaagggagacgacacccatcctccaggtggtgtggctgggctggatgtccccaaaacacttattctccccgccaggagacagacgaccagcgctcaccacacgtggtgggggaccaccgactgcacgaagctatgatccagaggccaggactaatacgtcgcagcgagacacatgccggggagaagaaaagcggctaacaccaacgaagcgcagcgtgagcaacgcactagcgaacttaggtgaggcaggaccagaggtctacacagcagcagacgcacacgaggagcgatagtn

SEQ ID NO: 632692 - DNA, 849 bp, Homo sapiens
gatgactgagcgggttgtggccgggtagccgatcctcgagcagcagtcggcttctctagcgcggaaaccgggagtaggagcactcagaatacgaatctctgtctccgctccgcctgttcttgtgagattatgttgagtcgttcaggccttacattcttgcggactttgtgagaaagcttaccatcaaacaggatggtgccagcgagcagttaatccagactataagacgaggatacctcgacttgcccatgtaggactcccgtgtaattcattggcggaactctacaacatctctatgtgtgtcaagaaaaatctagaatgttgcgagggcacactgctcttaatcgcaagtatgtgccaaatagttgtgggctgcgtactgttgcataagggcattgcgcttcgttggcagtccatgttagatgaagagaaatggccgggtgtgttgtagcaggagaggatggcaggaatgattgctggccaggtattagatattaaccgggggtgcagagccaaaagtgaaccgaggaaaagcaggtgtgaaacgatctgtgagctggagatgttacggcgtcctcatttgtgactttggacgtatgactgtaacaactgggactattatggataggatagtggcaggtatacccaggagcgtgtacctcctcctcctgcctatggctcgggcttgtaggtgcccatcggaaacgtcagcgtgtatcaggaaacaccttcacgaaaggggaaaagtggttcaattctaagagtggaccagaggggatcctttccaagtctggaaaggtgaaaaggagatgaccttccagggcattaagaaggatggccagataaaca

SEQ ID NO: 632693 - DNA, 439 bp, Homo sapiens
tgctgctgcagtcgatctaaggctcccccccgtagacttcctgtactcctgagaggtgaagccagctggacttctgggtcggacttggagaacttttctgtcttacaagaggattgtaaaatgcaccacgcccggcctctgcctggcttcttatagatggtttctcttggtgtatgtttcctaggctttttgactttgtggactagaaagctctggtctccaagtccctacaaacttctggatcttctacagattaaacattttaacagtcttcataaagtgcatttgaaatctaaggtaaacattcattacctgtacaccaaccacctcaaaggttttatgaaataagatggaatatacataaaatgcatgagacaggtgtactttgctttatgtgtttgtgacacgttcacacaagtaaatttttaaatttttggta

SEQ ID NO: 632694 - DNA, 382 bp, Homo sapiens
tgcagggaggcgtcaaggactgggcaggaggtgataataaggtgaggtgcaactttttgcggcttgtagcttttccgtatgtggaattatttcgttagagaaaaactctcagaagtagaattaacagggtaaaaagaggtagaagcatttttatggtttggacacacaggcggttttagaaaggaccattctggttttcactaccatcactaactagagtccaaaaagggcacctggtctcaattggcatttctctgatactagtgaggctagaaatttttccacattggttatccagttctacttccttgttttcaggtggtcagtttattttcttggatcatcgtatcttccttttttttttttttttttcgaggggggg

SEQ ID NO: 632695 - DNA, 110 bp, Homo sapiens
gtagggctgggaatccctgagattagctaaagttaagttgttggaacaattccttcattggaaattgtacctttgtgttttgttgctctgtttcctgcaacatcactcgg

SEQ ID NO: 632696 - DNA, 125 bp, Homo sapiens
tcccctaggtggaaagcatgtcagacaccatggccactcatcagccctctgctctcccccacgggaatcatcagtgctgtaaagtccgtgcccctccagcccccggggagctggggtcttcagag

SEQ ID NO: 632697 - DNA, 149 bp, Homo sapiens
  misc_feature (75)..(75): n is a, c, g, or t
ttatttttcctgtaaccttcctcacctccaccctctgaaaggctccaagtgtttgtttccctctatgtgtccatngtgatctcatcatttagctcccacttacaagtgagaacaagtggtagctaaatgatgagagtctccgtcgaact

SEQ ID NO: 632698 - DNA, 118 bp, Homo sapiens
gccctaagggccgagaccgcggccgaaaaaaaaaaaaccccccccccccccccggaggaaagcctccgggggggggcaggggaaacccaagcctggaggttcaagggagaagggggcc

SEQ ID NO: 632699 - DNA, 794 bp, Homo sapiens
  misc_feature (447)..(447): n is a, c, g, or t
atttacaggaaaaggttgccttccacatttcgtttctcccccacatgttcaggggaatagctcactttcatcaccgtggagcactagagaaaggccattccaggggacttgaacaggagggttctggatttcaggacaccaagcatagctcagattggggatgcagtaataaagatgggattatacagagttcacataaggaagagtaggacctctaacccctttcctccagatagccacaagaatgttggccactaggctcattccctgctcagctaccaccaccatccttcccccaatgccctgacaagaactaaaggattcctctgtgtggaaactgaccagcccaggagaaaatatttttttttaatgtattttttacgcctgacctcaagtaatccgcctgcctcggcctcaaaaagtgctaggattacaggcgtgagccgntgcacccagccctatttttattttttattttatttatttatttttttgagacagagtgaaacaatgtctcaaaaaaataaaaataaactgaatggttccacagaaatactgagacttctgcttaaacaggctttcttgaacctgtacgcttccagttgggtctgctgcttccaggtcatttactaaaaatgataggaagatttaaaaaataaaaataaaaggaaggccgggcgtgagtcacgcctgtaatcccagtactttgggaggccgaggtgagcggatcacgaggtcaggagctcgagaccatcctggctaacacggtgaaaacccgtctctactaataatac

SEQ ID NO: 632700 - DNA, 174 bp, Homo sapiens
tcagggttcgattccggagagggagcctgaaattccagcttttgatgaggccattgctgaacttgatacattaagtgaggagtcatacaaagacagcacgctaataatgcattcctgagagacaacttgacattgtggacatcggatacccaaggtgacgagctgaagcaggag

SEQ ID NO: 632701 - DNA, 314 bp, Homo sapiens
gagtgctccccggacggagcacagtgctcttcatagtacaaatacacattcttctaatccaagcaataccccaagccaaacttcagatgcaccttatgattctgcagatgactggtctgcgcatcttagctacttctgggaaaacagtactactacaattggtcgacacagaagtttcacaactagcaaaacccaaaacgagtggcttgcacaagcagcaccagcagacacaaacagcacgcaaacacagcatggccagtaacacaagcttctccccaacaagcatcagggcattaccagacagcagcaggtga

SEQ ID NO: 632702 - DNA, 149 bp, Homo sapiens
cggtccttcgcatgggcgggcacttagcaggtggggagcagcagcaatctcttatcccaacatcaccatctgggtcagattgaactcttcaatctctgcactccaagctgttaagatagttaagcgtgcataagtgcccgccaatcgaa

SEQ ID NO: 632703 - DNA, 137 bp, Homo sapiens
actcagtcggtcactgataacgtgattgtgctagaagtgtaggtgggaggtctcccaaacagaggagctacgtgtccttggaacgctggttgagtgatttgattcttctttctatctatacagagtggtacatacct

SEQ ID NO: 632704 - DNA, 1304 bp, Homo sapiens
  misc_feature (632)..(632): n is a, c, g, or t
  misc_feature (720)..(720): n is a, c, g, or t
agcgggtccgctctgcagtgcgaagggctcgaagatggccggttggcaagacgctacgtgcgataaccgtgaatgctgcgagtggtctgctgccacggaggcccgctcacttgtcggctactgcgacgccacaataccgttctgggacagctcacggctctgggccgtctttcacgagcattacgccaatagaaatacgatatgattgctcagggaagaagacccgggcacatgcgtttcgtttacaccgacacggtttagacctccttggcacctggacatgacaaattgcgtccagctcgatcgcagacggataagtcatcataccgctcgaatcggtcgcactttgcggcaaattagttggaccatcccgcggacgagagaaggcagttcataggttcggcgcgacgccgatagcgatacaaacatcgttgcgcgtggtccgcgcacagcatgcctccgtgctcaggcaggctacttcgtgctctcatcacgtcccactgggggaaagaagcgcacatgcgttgtgccccacggggaagcggcacgacatattaagcgacagcacacaggcatatttgagagcgatccggcgtctatatatatccccctcgcagagcgaaacgtgctcntttgagatcgatcgctacacgacaagccctctcttcgcccctatgtcgcttaacccctaagggcgagaacccttggattattctctangtccaaatcgagaacccccgttgacacatataagttgagctccaactacgacatcgctgttacctccataaacccctatggttaaagcacgtttggggatcaggcctacagactcttgtgtccccttcttacggcgcccctatgcttttgtgtccgtcacgccttgcttgcgcagctggaagttcgtgccgccttggctttttttggccccccgagcgctgtgggtgcccgtttccccacgtgctcttggcgtacgttgggttttacagccaccccacggctttagcttgttgggcttagcaccgcccggagtccccccgtactaactccctttgggccgcagccgacgttacgtcgtttcgccacggctaggctagcaccttcgccttggagccttctcgtgaccgcttgggaccttagccgcgtcgtgcacgacgttccgggccgggcgccgcaccctgcgggcgcccccctttgcccccgactacggagttggtgcgcggccagttcgcaccgcgcctgggctcccatctagctgcccgagcatttaccctctgggcgcacctttcgtcgtggaccatcac

SEQ ID NO: 632705 - DNA, 205 bp, Homo sapiens
cctcacgcccagctagacgccgctccccgagttcacagctctggtgactcggcggccatgcaaatagaagcccatcagtgctgtgccgagctcttagctcaaagaccgcccctcctagtccacagagctctcttatactttaggagtgcccagaaagcctagcaccctgaagtcaagctatgttccctttcatactcattaggtc

SEQ ID NO: 632706 - DNA, 205 bp, Homo sapiens
tacctgaacacaccggggttttattattaacggatgccaaaagcacattttccaaaaccgggcttaaggcgggcccccaaaggcaacaggacactacagttcctttctttggggcaaaaaggagggtgcctgggaaattcaagggcttcagtggggaggcaaaggtcccaacaacattgtcaatggcaggcaacggcaggagggg

SEQ ID NO: 632707 - DNA, 207 bp, Homo sapiens
ggcagggcaagcatccaggtgaccctgcaggccgcgcgccagaggttccggcagtttccgtttataaggacatgacaggtgcccgggaggccctggtaccagcttcgagagctgtgttcaccagttggctacagcctaaggcacggtctcaaggagcagattctcgagctgctggtgcttgagcagtttctaggtgcactgtcctgt

SEQ ID NO: 632708 - DNA, 869 bp, Homo sapiens
  misc_feature (68)..(68): n is a, c, g, or t
  misc_feature (443)..(443): n is a, c, g, or t
agcgaatctgcaagggggaagaaaagcatcaacatttaatgaaggacattgggtgtaatgagaatcantgtaggctggaccaatagagatagatagagataggtatctttaaagtttgaccgtggtgtttatttagagagaagtctttaacagttggccaaaagttagtttttaccatgaagccaaaagcaaaatgatctttagtcagtggaaacctgaaggtatatatcaaaagcacatcacattttttatcatgattagaataatccataataaatatttttcccaaagagattaacagctgtgttttggtatcattcacatctttttgacattaatggagcatcctttttcaactttgatggaggaaaatcatgtgaacatgccataaaacactaaattaccatgggaccatctatttattttttaaagcatgttcttantgcagtatcttaataactagtttctccccaaagcaaaaattattgatttttactttatcaaagggagatggcttgatattatcaggaagtggtatatagccagcaattctcaaccaaaaaaagtatcgatttgaaaatagtgccctctttgcaagatgtcctacctatactgtggtgtgcacagagtgcctgagctttggtgggaccgtggtggacagtaacttacatgtttcaaaatcaacgtgtaagggtttgcaaatgttacaatatgcttctctagggtatggaaaaagggtataaaaaaggtaagggaaagggaaagaggggggattatctttcttcggtgcgtctgacatctagaccttaaccgtcaatgttcggaactgagttcctattctccacttccaaggggtggactctaaaaac

SEQ ID NO: 632709 - DNA, 156 bp, Homo sapiens
atagcagtttccttgaagtgttgaccattttagtgtgctgtcttagcaatctttgctgccttgtcataccctagtatgaggtttgtgagcttgataaccaacattagagactcattcatcagcttgttgatcctttctgtattggccttatcagag

SEQ ID NO: 632710 - DNA, 875 bp, Homo sapiens
  misc_feature (264)..(264): n is a, c, g, or t
tttactttgaagaaatcagtttctgcctcttttggaaaagaaaacaaagtgcaattgttttttactggaaagttacccaatagcatgaggtgaacaggacgtagttaggccttcctgtaaacagaaaatcatatcaaaacactatcttcccatctgtttctcaatgcctgctacttcttgtagatatttcatttcaggagagcagcagttaaacccgtggattttgtagttaggaacctgggttcaaaccctcttccactaatnggctatgtctctggacaagttttttttttttttttttttataaacccttttcttgaactttctcacttttttattgttttaccctcaaaaaatggtggggaggctggaaataagtgctttgtgtaaggggtctgtgccaaataggaagatggcctagtttatgggtttctacagggttgttaaggcctgtgaagatgtctaaaccctacggtggattcccaaggcttttcacccccatgggttgggccttacgtgaacaactacgccagaagtctcttttccaaattccttacgcgttctccatataaactctctgggaggttaatcttatttatctaacctaaggcttcctgtttttaccccctccgtgttttccggggatacagtataattgaccccggtcaccttaattctctagggggggccgcgaggtcccttggcggtaacggcatttcctcctttccagcagctgtgtgggtccagagctccctgatatcgcagctacttacacgtgcccccccgtggttgtccttttttgtcccgcggcgtcctcatagccccccagtggttggttccgctcttttggcccaaattgtcggcgcgcggcactg

SEQ ID NO: 632711 - DNA, 486 bp, Homo sapiens
ttcagtatgtaagaagccccagagcagggagagaagtcagaacagtaattactatgggagggtgggggtggaattgacttgtcaggggaaatcacatacattgggaaatgagaaaatgtcttctgtcttaattggaatatatacatttgagggtatgcaccaaatgatcatgtatgtttgtcaaaagtcattgaattaggctgggcaccgtggctcacacctgtaatcccagcagtttgggaggccgaggcaggtggatcacttgacgtcaggagtctgagagcaatctggccaagatggggaaatcccatctctactaaaaatacaaaagctagccggatgtggtggtgtgcacctgtaattccagctactcaggaggctgcagcaggagaatcgtttgaacccaggagacggaggttgcagtgagccgagattgcgccactgcactccagcctcggcaacagagggagactccgtctcaggaac

SEQ ID NO: 632712 - DNA, 283 bp, Homo sapiens
cgatctagaggatccctgtggagacgggggtctcagagaagtaagtagtccactcgaggtcccacagactagttcaggtcggggatgtgaaggcccagcagggtggggggagtccaagagggatggatgctcctaggctgagggtgcagtgaggtcaaaggcaggaagaaagggaagagggagcgggtcgtggtggctcacacctgtaatcccagcgcttggggaggtcgaagcaggcagatcacctgagatcaggagttcaagaccagtcgggccaacatgg

SEQ ID NO: 632713 - DNA, 296 bp, Homo sapiens
tggtggagggaaaagcctgggtcctgttcttccttcattaaatgcaagaaaacagcatggccagtaaacttagccagggccttggaatcccttagaatcccacttatgttgcttatgattacgggcaagctaattaaccctgttgaatttcagattccccctttgcaaccttaggttaagaccagtactgcaggattgttgccctaaatgaaaaactgtatgtgaaggggcctggcccaagggttgtgggacattgtgtgtttaataaaaagctaacttccatgttcataagagga

SEQ ID NO: 632714 - DNA, 808 bp, Homo sapiens
  misc_feature (262)..(262): n is a, c, g, or t
  misc_feature (530)..(530): n is a, c, g, or t
gaggacagactgtggttcgggactaggcagcgtggccgcgttcgctctcgacccgctgctcgtccgtgcgccagcgcgtgtctcctcccgaccgccagtacccgggcgccgtgctcgaggggccatggcatgtcgtcttgtgacgctgcgacctagcaggcagtggtgtgtctccagggaggcatcctcccgtcgtactcatgggaagcgagccaaaagtccggcctggtggttcctgtccaggctcggcgtggtggtcttntccactattgccgtcgtgagacgtgtcagtgcagtcgcctgttagtagcccttcatattgtaccattgatggcaagacgatatggcctagaggaaaatctcccaaagatagcgtagaccttgggggtagcatgaggtatggccaagcaccgactatccattaaaagagagcacatgtcactcgcagggtttcatcaaaggaatggtcagtacttatcacctgactgggaacgaggatatgctggggacgggacagtagggtagtgacnccttggcttttagacctttttcaatcaactttcagaaaagccccccgggtgcaggtacaaagggcaattgacacttatttaaaagacctggccatgattgcggaagcggaccacgcaatttccaccttgggaacgtgggttgttgacataacttgaaataaccaaggtaccgtttgctccatagtggagaattcgccaagagcacacaagaacccataacgtattccgttatcggtcgccctttgggacccatccacggggaaaccaagaggcaaagg

SEQ ID NO: 632715 - DNA, 984 bp, Homo sapiens
ggatcaacaatcatgtggcaaatcacatatgtaaactaattaaccataatatatattagggagctgactgaaatagtatgtccataatagcagtatttaaatgccaaacacgatctcatcttaggaacttccttaagctaatcatagatgatctttcatctctaaagacattgcttcttggaagttaaggttcccaacagagtaataataatgtgatcaattaatcagagggggatagctcgatatggagagtggtgtggtgatagtgtgtatgtagttaaagcaaaagattggcgggaatatactatgttgagaattagtatgtctgccaatgggaatccagtaatatttcatatatctttccactatacagatacagggaataagaataatgttccagtaaacagagtattataactagtatggtattgatctgtacatacatggagtagtactcgtgggacatttttgtgcaatttgtctcaaacatctttgggcaacctttatgtgatggtatagttcttcatgttaagaatccactgttaccattttgacgttgggagtcgtaaaaatgtttcttaccggtggggattatgagacacgaatggagctaagcaatcacttagaattcgtcgggctctctaaaaggtggtaggattgtcataaatccgtggttcgcacttgggggaattcgaccttactagattgttctagtgtgcttgtccttcacgtcattaggtgctaatttggaatgatatgtgaagctattaggtagaggcacttaatgcttgctaagccattaaagactagatgaatcttgttcttggaaagatagttatcggggaatgatgaggttaggaaggatacttctaaaactcattgaatagaggctatggttggacaacttgttccttctataaagatcaaggggagctaaatggcagttgccattggtggttggattaggaaagtgggacatatttg

SEQ ID NO: 632716 - DNA, 569 bp, Homo sapiens
  misc_feature (218)..(218): n is a, c, g, or t
  misc_feature (349)..(349): n is a, c, g, or t
  misc_feature (384)..(384): n is a, c, g, or t
  misc_feature (386)..(386): n is a, c, g, or t
  misc_feature (392)..(392): n is a, c, g, or t
atggtcatctcctgctaaagcacagcttccatcataaggtatgctccttgctcaaagagtgtggtcccaaacagcttttgggaggtcctccttgactcatggatgaaacccagaacatcttgaggactgagttaaccacaggtccttaaataactctccacacatttttcttagtttatctctacatgcagggtgtgcagcagcctgttcaaagtcanattttctgggaaatattttcagtgtttatttgcaatttagcccactctgtgtagtcttaacttatttcttctaaactcaccattaacctaaataatagtcaaatttaggggggctgtatttgtcttactcnagtcttctaccatagttgaaactgtcgtacccaancnagttanagagaaatgccacactttgagacgaattcaggagtcctttattagctggtgactgagagacggctaacacaggaaatactctcggccctaaagaatgggctagattttcttttatacattggtttagagaggggaggggggattccagctgcaataaacttacagaagaaaaaacag

SEQ ID NO: 632717 - DNA, 323 bp, Homo sapiens
ccaaaatttgctccttggaagactcctgaatgcaggtttctgatgatgtcagaaagactgtgctgttggattagacagaaaacttctaggactctaattaaaagggctgatgtggtcataaagattgctaacccagtatgaagcaaaacaagagttaattgcatggactgagctaatagaggactgaactgattcttttgtggcttttttggtttgaaacattgctgattctttttgttgttcagtgtcaaattttttttctcttgagctatttgtagcccttaacaattgagtatactcttgtaaataaaatttaaagcaga

SEQ ID NO: 632718 - DNA, 518 bp, Homo sapiens
gctgaggagaggagcgtcaacagcagcacatggctcaacagaagaaccttgaaggctatgtgggattttgccgaatctcccaaatcaagtatacagaaaatcggtgaagagaggttttgaattcacgctctatggtagtgggtgaatctggatttgggaaagtcgcacattaatcacactcattattcctcacagatatgtattctccagagtatccaggtccttctcatagaattaacaaagactgtacaggtggaacaatccacagttttaatcacagaaggtggtgttcagttgctgctcacaatagttgataccccaggatttggagatgcacgtggctcaatcagtcatctgctggcagcctgttatctgacattgatcagtaacatcttgaggactacctcaaatgcacgaatcacgaagtgacacagacgtcagatgcctgataacacgggtgcagtgtgtttatacttcattgctccttcaggacatggaccttaaaccattggatatcg

SEQ ID NO: 632719 - DNA, 400 bp, Homo sapiens
taaattcacaatctgggaatcaaaaagcgggggattctgggcaaagggtccttgggccctcccaatctcatcccgggtctgggtcccctgtttgcctaataagcctcttaaccctgagcaccaccccaacagaatctgggggaccagccccctcgcctgcctgtgtctctccccaaaccctctttagaatggggagggaaaaggaggaaaggggaggggacctggccccctctccttcaggcaatcttgggagggccctgtgcccccagtgggcattataccctttcccgtggggggcatcatcttcccgcgacacaattgtgtcacaaatctcaacacctgtgaataaacattacaagtttaacaataagtgaacaacaaaaacaaacaagagggcggc

SEQ ID NO: 632720 - DNA, 240 bp, Homo sapiens
ccctgtttacagttgcacttgtggcccctcactgtggggattgatcattctcatgaaggagtcacagttattggaattgcagaaggctgagcctcctcatgtgctataaccccttgggacactcatccagacttctctgaatcagaatacctgagctccccactcactgccctataatttatggcaaggagcaaagtccaaagcattctctcctagggggatactctataggttgaattg

SEQ ID NO: 632721 - DNA, 1064 bp, Homo sapiens
gcctgtcggccggaaccgccatcttccagtaatccggccaaaatgacgagcattcaaagggaacgaggagaggctacccgcatatatgttctcgtagcggcctatcttagaaaacgatggtcagttgtgccttatgcgccacgatatatgcgaagtctagttaacgaaacggctggatatcgtaaacactcaaggggaactggcgatactgatacagaacaggaatgccccaagaagtgttcaccatggcaaagacttggcaatgaagtctagcataggttaccccaggcagtgcatagtccgagcactgagtgagtataatcagaaaacataggctaaacgagggcaatgatggcttgaccgggacgaatttaattgtagccgtatttgacgcaccatataaggcacgtctaaaggagctcgagagaggctatcctgaatagcgtggtgatcggaacgatgatgcacgtaagacagaaacagaaggccgaaagagacaacggtgcctgggttcaagctaaagcgccagccctgatccagcccgagagaagcagcaccgtgatgttggaggaaccagatggggaacggaggctgaagctggtggaaaactattccctatggattccatgggctaataggcgtggttaccatcggaagatactaaggggacactcctggggcttacgacaaactggttgccccctgcatgtggagtaagaaagtggtggagttcccctgccccaagagaaacagttctcacacccaagggggcgtggggggcaaaatcctcagtgacgcgccgtgcaactacccagtcaggtagtccggcggaaggaaccacgctgcttctggtcaccctatccgccaagggggggcaccttataacaggccgtgggaaaagccctcaccaacaccaccacactgggagagccgcgagaggaggtaacaggtcaccagatgacatctttttcgttacgtctagagttcatctactatctcgagtcccactctacacaagaagaatgatacacccatcgcgcacaaagagaactcggagcagaacc

SEQ ID NO: 632722 - DNA, 167 bp, Homo sapiens
  misc_feature (164)..(165): n is a, c, g, or t
gaggtggtcgacggatgcgtgcaatatacacttcgcgtctacggtgacgctgcgaagggggcgcccggcgagggaccggtggaggccggcgggcccggcacggaatggctgcgcgttcggctacgcgcgcgacggtgcccgagatcgccccggtgaccgaggcnncg

SEQ ID NO: 632723 - DNA, 400 bp, Homo sapiens
  misc_feature (36)..(36): n is a, c, g, or t
  misc_feature (46)..(46): n is a, c, g, or t
  misc_feature (49)..(49): n is a, c, g, or t
  misc_feature (52)..(52): n is a, c, g, or t
  misc_feature (163)..(163): n is a, c, g, or t
  misc_feature (299)..(299): n is a, c, g, or t
  misc_feature (326)..(326): n is a, c, g, or t
  misc_feature (355)..(355): n is a, c, g, or t
ggactacccgtgcatgacaccctatctggcccttgntttttgatgntgntgntgttctttcttttttcacgtggtttcgcacttgtcacccaggctggagtgcggtggtgtgttgtcggctcactgcaacctgtctctcgggttggagtgattctcgtgtctnagtcttccgggtggctgggattgcgggcgtgtgccaccacgcctggctgatttttgtatttttagtagggacggggcttcgctatgttggtcaggctggctcgatttcctgacctcgggtgatctgccacctcggnctccaaggtgctgatattgcaggcgtnagccaccacgcccggccgcatccggtttnattgttctcacttgccgtgggaggatgtacttatcttcagatgct

SEQ ID NO: 632724 - DNA, 245 bp, Homo sapiens
  misc_feature (84)..(84): n is a, c, g, or t
ggttagatggccagctggtatcaagagatttagcatgtgaggaggggggataactggaaccaggtcctgacatttcatatcaancaaacaaagatgctagtggtacgctattgtttcaccttcattacgcatactcctttcccgcctcaggagtgattacctattgtagcctagtgcatgttaggcactcacgcctcacgcaacagtgaggacggtgacgacacctaatcgtcattgacaactag

SEQ ID NO: 632725 - DNA, 212 bp, Homo sapiens
cccccaaaaccagcctgggcaacatagttagcccccctttttataaaaaatttaaaaatttgccaggcatggtggtgcaaacctttggtcctaactactcaggaaattaaggtgggaggttccctttagcccaaaagttttaggctgcaattaactatttttatttccctaccctttagctttagcaacaaaacaaaaccctttttttgtta

SEQ ID NO: 632726 - DNA, 150 bp, Homo sapiens
atgtaggtactctgaggatcccttcgggttggggacacatgtacaaacaccccatattaaatggtgatggaagtggggactggtggttggtggagacttcaggtgctggagaaaatagatggatgatggggtggaccaataccgtctgac

SEQ ID NO: 632727 - DNA, 269 bp, Homo sapiens
gggccgctcgttgatcctctgtgggagccgctccagcagccccacgcgacgtaccggcacaggaaggacagccactcgagcagaaagcgccgggtcttctccacgccctgctgtccgagccccagtgctccaggccgtagttggtgaagagccacggcttgagcagggcgccacgggcaatcatgatcccggtgacaccagtctgcatggcgcggttggcatctcaaatgacaagatgtcccatttccgaacaggggcatggggctggc

SEQ ID NO: 632728 - DNA, 333 bp, Homo sapiens
gagagagcagtcatcgcgagccgcaccacacaggggccagtcgcaaacagtgagcgggacttcctcccgggcgcgtcctctcccacagatgcaaccgcggctgggggtcacgacccaagtgaagccaccgctaggggcaagcccataaccagagacagaagcatcaacacagttcacttgcctccacgaaggcccatctccccgagctgcccatcatgagtgcttgtcacccactcactgcaacgccacaagaagcagaatgtgccctcagcccctctaatccagcctattccaaaagggacattggcagaatgacaccaagcttggttcacc

SEQ ID NO: 632729 - DNA, 271 bp, Homo sapiens
tggtgtgacggatacaccattatttttcaaggacacaaaatatgtggggcttggatgattactagacagatgtcctgggtgataataatcacagtacagtcccaactctacccagtacttcacaattctctcagtgctttcctactggtagtctcctgtaatgacgtatcatatccgtggcaagggggggagggcaaggctccattcgtctcattttagacatgctccatcggggacggggagagcagataaccggattggcctaaagtgg

SEQ ID NO: 632730 - DNA, 877 bp, Homo sapiens
tggcacgagggctgacacggcacgcttctactatgtgttgtggcgacccttgccccgggttccccgtggtctaccgggctgcggctgccccgcgccgcaggccgggacctggtggcctagaccccgaggacctcctgagcccgtgtgtggcagctgggaccgctggctacgcggctaagcagttcgcgcgttacggtgccgctccggggtggtccccggttcgttatggccgtcgccggagcagttgtcgggatgctggaggccgaagaacgcgaatggtacccgagccttgctgaccatgcaggagtctgcttgcgggtgaagcaggctggcgaagagcagaagcgtcggggagagggagcatgcacatcgcagagtgcattggccaagatgccacagatgattgtgaactggcagcagcagtagcgtggagaactgggagaatggcccaggctgacacagtgagaggaggtgccccgactgcagtgctgaggcccaggagctcctgggctaccagtgtggacccaaggagttgcccgcttccagtgagctgctccaggacctagaagaagaaggagcgcaagctgcctcaaggaggaaaaacagaaacggaaggaaggaggcgcgagctgtgtattggcttgcagctgttggctcaagatccagacaggctctgggggcacccatgctacatgcggcttttctccctttcacaataaacgtcgtggtacctggcagttatcccttgaaagagataaacaatgaacacagtatataaaaatcatgccgaagcccggtacgatattggaggttaaccaaaaggaggcctgatatcttatttggaacagttgtgtcaaaaatatgcgggcggaaagaa

SEQ ID NO: 632731 - DNA, 1518 bp, Homo sapiens
gctaaatagaagaaatgctatacctcattatcatgcttgttggagagagatttagtcctggagttggacaggtcaatgctccagatgaaatcaagcgagagattatccatcagattgagatatcacagcctatggctccatcagtgcaattggtcaaagtcttatcacctgcacagatgcagcaacaaggagcactggcatggcagagatgtacatcgcaagccagtttgcccatttccaagaaaaccgtggattcaaccaggcacgaagggccatgtatgcaactgaaaacccagcacatgtgccaaaagagatacaaacgtagatagtcgcataatccacatttatcacagggcagcaacagaaccaagggcagaagaaagcgcacacgagaaaaattgacaaacgacacaaagtagagaagcaatacaggcacaatccacaacatccggcagatcgcacaccaaaagacatgcgacccatccaagattacagcacaaaagccccatgagaacgaaaaccaatacactcggacacaagaatccaacgacataggattcaacagcatacagacaggacaaatcacaatgagaggcacacgcacagacaatcaaggccacaaaaggagagacactaggatagaggcaaaccaagatacacaaggaggaacatacattgacccatagggatccaagaacgagtcccaacagaagcaaggcgcgaaaaaacggacggccgaggcaaacgcaaccgtcccagcacaacctacggcgaccgacctggcgagcagaacgagacacgacgacgcaacagtgaagacgacagacacacaaccaagtacacacgagaaggcaccatggaacccaaccggtggaacagagacaccacgatggacaaagaaccacaccgacatgtcacagccactacccacgccgatcccaggacacaagcaaattccatcccacaagaacgcagaggacacgaacaagaccgggccacacacagaacacattgcaggcaccagtagggcacagtaaccataagagccgcacaaggccctgggggcacagcagcggcactcgacaggaccaagaggcacgacccgcccgataccgcacagcgcaacagatccacaaacaagagacggaagacaacttgacagaagcacgaagcgagagcaaccaccatctggacaacgcaacactattctgaaacacagtggccactgtagcaccagcacaagccacagaacgagcggagcacacacgcaccaacaccagaaagcacacagacacagaccacggaacagaacaaaacgcaaagacccaacgaacagcggcaacaccacagacacacacagaggcagacgacagccaaagaacaacgacgaagcacaacaccaatagagcaccacaacagacgatgcgacaaacgaggaagacacagacaacaacgacacaacgacaaacagcccagaatcaactcgaacacaggaggcaacacaaacaaaaccacaag

SEQ ID NO: 632732 - DNA, 211 bp, Homo sapiens
agcgttgcttagagtcatacccataatgctgtgagtgtacgggttctgttcactgtgactgtaagcatttccctttgcctgtggtcaaataagatgcagctaacaattgcaaagtttttaatgcaaatgttattagagatgcaacacttctagacactttgacattttgacattcttcatcaatgtcgacgcggccgcgaatttagtagta

SEQ ID NO: 632733 - DNA, 178 bp, Homo sapiens
ctagtagagtctgctaatcacagggagcagagggccagtcttttgtgggcattctctgacgtggtacttcatccagccactgtgtttgagatgtccaggatggcatgaccatcgccaaggagggagatcttcgggccaattatgcagatcctcgaggttcaagaccactagaggaagg

SEQ ID NO: 632734 - DNA, 1356 bp, Homo sapiens
gctaaaaggtacagtcgcactacaaaagacgttgatgacatgttgtgctaccagtcctaatgtgcctacagtgttgtcatgactgtcttgaggttgctgttctggtaaattctctgtacacagggtttctgccctttagatatactgtaattatctagtcattatcgtcatgctagcctgggtaactagcggctcgcaattgatcgtaagggtgacagagatctagccaggcaggacatcatcgggccgagtatactgcacctggactatgcagtcagagtagatcaagtcacgtgggactatggagtacatgtggaatcttgagtttcatcgttcatcgcaagctgacagcgagctccctagggtgcagcatgcagggatggacattcccatgggctcatcgtgacagtcgtcctaagacgatatcagaagatgacaataggcctcgcacaatcataacaggaaatgcccacttgtgaaattggactctcccttggatcccactgcgtacttgttcaatatgcgaatgatttcgaggggtattggcaggaaatacttcttgggcgccctttccgaaccgaaacccacgctcccacggggaacgtaagtctttgcatttgctccctgttgcgtgcttttacgtcgctttgctagggcacgtttaagcacctaagcctggagattatacttatgttatctctttagacgtcctttgcagtgtgaactggcatatgaaaaactatcacttatttcatttgcaaaaccctagggtgcgacgcggaggtcaccgtgaatatgatagcccatgttgtgcaaacgggtggcagtccgatggatcttgcatacacgagcaatccatgtggcccccaggtggcatgagtcaagagaaggcaataccaataaaggccaaggaacgtgtgccaagtccggctgtcttaagtatgcccttgcgaccacacacagtgtgacggccacacgaacaaccgacacgtgctggtagaacaacttgggtgatagttaacggaaaacgggtgatgcaacttcttgtagtaaaatggaacatctgaagagctgtcatgaacgaacactcggaataggtaacagaacgtggtggacttgcttcaccgcaacgagcacctgcgtaagctatctgggagagacagacgtcgatactgatgcgcccagaccggagatacgcaggatgtgtacaagcacaagataacccctacagtaggaggcgaacacccacagacactcaggataacagcaagttctgtcagatacaatgttcctcaactcgacagagaagctatcgtgacacggctagcgcctaatactccaccatgtgaccataat

SEQ ID NO: 632735 - DNA, 633 bp, Homo sapiens
  misc_feature (4)..(4): n is a, c, g, or t
  misc_feature (8)..(8): n is a, c, g, or t
  misc_feature (145)..(145): n is a, c, g, or t
  misc_feature (147)..(147): n is a, c, g, or t
  misc_feature (150)..(150): n is a, c, g, or t
  misc_feature (159)..(159): n is a, c, g, or t
  misc_feature (554)..(554): n is a, c, g, or t
  misc_feature (587)..(587): n is a, c, g, or t
  misc_feature (615)..(615): n is a, c, g, or t
cggnggangggcccgctgaccgctctccgcgcctgggtaagtatcgggcagggcacgcggagtgaggaccggagacgcagcccccagccccagtgcccctctcctccacctgcctggcccagggcctctgccccgccgcatgagngntgnggccggggngagggcgcactgtggataggggtcccgccccgttaccctgggtgtgagctgatggatgggaaaaggggacaagccgggcgccaggctactcagggtgtgggaagcgggatggcactgaagatgagcaaggatagcacaggcagggtggacaggaggggggcagccaagacgctggacaccccagcttcagtttgtccactcgccttggcaggctgcagggagcagagactgaaacgagaaggttcccgcttcgtgcatccactttggtgtggttggggtgacgggggagttggggggggggcacacaacatggcgggaagaaattcataggggcgtaagaatgggagaggaattatagagagagacgcagtttgcgttctatgggggttttagcnaaaaagtgcagttcgggaatttcagcccaaggncaacgactttaaagaacggggttgcaanaccgaacttctatttgcg

SEQ ID NO: 632736 - DNA, 442 bp, Homo sapiens
cggtcatggaccaatacaattaaaatgtgtattagaacagtagggacgtggttcatctgttaaccagcagatcatagccagatgtgtgtccgtaaatctttggttggaccagattgtgtgaaatacttgggggaaagcagagactcttaattccccctggtgaagtataagaaatatactgaggcctgagctccacccccaggaatttttattccgtgggtctgggtattacagcgcattttccccctagtttacctatgtggttttcgtgtgcatctggtgggacccactgtcagagtgggagctgacttgtttcttcctcctggagtagggcagaggagagtgtggggcttgggaagggtgagggagcatctcccaggccctttaagggtgagccccctatattctgaagccgagacagcaaaacaaggtatgggatccc

SEQ ID NO: 632737 - DNA, 1491 bp, Homo sapiens
  misc_feature (456)..(456): n is a, c, g, or t
tggggaaagcactatctatgctcctagaaggaaatggacagctgtctgctagacatcttgttatggaataacatatagtgatgaggaacatttcgagagactgagtcagtatgacacgaacgggtgtatttctagcgatgtagtggcgaagttatgttatctcaactaattggtgattgtcagagtaggtagagccagtttgaatgaatcgacctaacatttctatagttagtgtcgccctctcgtccgtgttaccatggcgtagtctcttcgtacgaagcaataagcgacagtatggaggctcactactcatgggcgtaggccctatgatgctgtcgtctcattatgcggatctctagcatggcgatagtcaggattctgtgcgagggctctcgtggctcgtccggtgttgtgacctagtattagcgcgagatattagtacatgcgacaccactncgcatacaatgttggtactatcatatacgcacttttgttatccctacaataatagtagtagcaacaagacctggcttccataaatgctaaccaagactttataatgcatatggtattatcactaattgtcaattctcacacaacagttgcagttgttaatgtgaacgacacgagtacattttgaagagtgacttgtctgtccatttctttagagcttttatatgtgcatgaatgtattcacttgttatcgagaagctggatgttcgtccaattttacctgtacattgcgtataaactggatgtatgtggtcatacccctttttgaacactcctgtagccttatttgtgctatcctttgacggcgaaaagcttggttctcgagctaaaacctggtctgaacgacgtggtccggctggtacctgtactggtcgcgcgtatactaccgcgccgccgacttctacaataacaccaaacctaaaatcgctttaaataggtcccacggaccaaggcccccctatggtatcccaggtaccacacggcgctgtgtaacctccccttacgttcagcacactctaataggtgcgcgccgcggttgcctcgacgcgctccccggcttaagacggaaccgcctgtgagaacccctctcgaccgaaacccgggcggcctttgtcggccagggcgaccaccgccgcaaggatttctcccgccagaagcatcctccccgagacagagtgtgcccccccatccgcaaccggggccataccccgccgccagccggagcatcagacagccagcacgccctcagtcagcgtcttccaatcacaaaccaacacagaacgggcgccgccgccaagaaagaacacaccgagggagagcgaccgatgctcctacgccacgctatccaataaggcacgccccctacgcgcgccaaatcatcgcaagcccgccgcggcacgcaaccgcacgtcgcagagccccgccaggtcaagaacacctccttcgtgccagacgcaactcccaagatccgcgcgagca

SEQ ID NO: 632738 - DNA, 363 bp, Homo sapiens
  misc_feature (70)..(70): n is a, c, g, or t
  misc_feature (79)..(79): n is a, c, g, or t
  misc_feature (95)..(95): n is a, c, g, or t
  misc_feature (97)..(97): n is a, c, g, or t
  misc_feature (125)..(125): n is a, c, g, or t
  misc_feature (195)..(196): n is a, c, g, or t
  misc_feature (263)..(263): n is a, c, g, or t
  misc_feature (345)..(345): n is a, c, g, or t
gcctgcgcgctcgcagcaggaaccaggccccaggcgccggcgccggggccgcggggaggaggcgacttcnctccctgcngcgggcgcggcccggncncccgaacctcctcggcctttgaaaacancggcggcggcggcaccccgggcgcggcaatacttatatatttttttttttttcaaaagtctcctggcaannctaattaggaattctgtctggccccgatcaaaatactggagacgaaaccacgagattgatgagtttnccttgggagtcggtaagaaggtgaagccaggggcgaacatgggtcaaaaggtcactggagggatcaaaactgtggacattanggaccccacgtaaaggcc

SEQ ID NO: 632739 - DNA, 97 bp, Homo sapiens
tggttttggttacagaatgaaagtgcgtagtatttccatttggtttattttggccttatacttttagcaagccctcaataaataattattagatatg

SEQ ID NO: 632740 - DNA, 516 bp, Homo sapiens
cttcagcaaaggtcccagtagcctgtcctttccagctgagggggtgcgaatctcgtgacacaaaaggttgcttgatgacgtcccatcagtggaacctctgtctgtatgtcatagacgaccaattataatggtgacacactgaagtccacagatagagattcctgtttggacttcacctgtcggcggaacctaatgtatactgatcagttgcagcctatggggtccaacccaggttcccaaaaatgtcctgtgccactattggatctctggttgacatccagagtggggtccgctaaaggcaaacatcctgatgaacaacgcctgggctaatgcttccagattggccaccttgttacccattgcgggacttggctaaagcaagctcctgcggtaccttacctctgttgaacaccaacctcaaggttattcttttcccccccagtcattagtaactcattggattcttctccaagaatatttttttccacggcctggacactgatgatcaggagtatg

SEQ ID NO: 632741 - DNA, 998 bp, Homo sapiens
ctgctgcagtctgcagtgactgagccgtgcaccctgtgaggagacccccggaggaggcgactaaacgttctgcagtgcctgtgaaccaaccccagaccctgggtagcctgcagcatggccagctgttcctgcccctgctggcagacctggtcctggcccaggctcctgcagcgttatagcagatgttcttggaaggagacagctcagagtgacctgcagcgttttctgctgtgctgcatctgctggtgctgactggctgccactgacagggctgttgctctgagctgtgcagcccctcacacatcgccttagccacgttccacataccttgccggccaacctgcctgaccgccatgccctgtggccttgttgcattgcggctcctcactgctgtggttcaacggtgcgcacctttccgtggtacccggtggagcccgggcgacgtggcaagagggtgcttgcttgtgcttgcgcctgcttggcggacgcttgctgccagtccacacgtgtttgaacctgaatggggcccgtaacacctggagataatcacgagatagtatgacgaccatctttgcccttagccgcatcacccccaaagaccggatccagggctacaacacgtgaaccacgctcgtacaccctatgcgcacgacatttgaagactagagtgacttgataggcaacccacaaagagcaccatacaaagttgaaattcgtagtacggcacattggactttgaaagtgtatcacccaagagactacccggcgccactttcagaaactttgccaccatgcacaatctcggaacacgaccacgattggccaaattcgtgttccacacgggcttaccagaaaaagaggatcacgcatccagagtcctcatgtccgtatacataagcaccgtagacacaagcgcgtagctaccttgcccccaggctcttcaattagcctttatacagctccccatattatcatcatatgggacgatacccaccaaa

SEQ ID NO: 632742 - DNA, 360 bp, Homo sapiens
tctcattagcaaatcatctgaggtcaggagtttgagaccagcatggccaacgtggtgaaaccccgtgcctgctgaaaatacaaaaattagctgggcatggtggctcatgcctgtaattccagctactcaggaggctgagacaggagaatcgcttgaacctaggagacggaggttgcggtgagccgatatcatgccactgcactctagcgtgggcgacaagagcgagactccgtctcaaaaaattaaaaaaggaaagaaagaaaataccatatacactttttaaaatttttgttaaagtcgtgtaagcttctgtggcaaagggagggttttgttttgaacttttgtaaggtgtcatgtatt

SEQ ID NO: 632743 - DNA, 281 bp, Homo sapiens
tcttaccgccgcctgtctaccatagaacatatctctagcattaccagtattagaggcaccgccagcgcagtgacacatgtataaaggccgcagtacacctaaccgtgcaaaggtagacatagtcacttgtagattaagtaggtacctgtatgaatggctccacgagggttcagctgtctcttacttttaaccagtgaaattgacctgcccgtgacgaggctggcatgacacagcaagacgagaagaccctatgaagcttcaatttattagattcatacatt

SEQ ID NO: 632744 - DNA, 374 bp, Homo sapiens
ggaccctgtacacgtatcctgaaaactggagggccttcaaggctctcatcgctgctcagtacagcggggctcaggtccgcgtgctctccgcaccaccccacttcccatttttggccaaaccaaccgaacccctgaatttcctccgcaaatttcctgccggccaggtccctagcattttagggatgatgttggatcctgtgtgtttgagagcacgccatttcctactatgtgagcatggggagctgcggggaagtactctagagcagcagcctaggtggtgcagtagggtgagctctgctgattccgatatagtcccccagccagtacctgggtgtccccactgggtcatcatgcacacatcaaagaggccactg

SEQ ID NO: 632745 - DNA, 511 bp, Homo sapiens
  misc_feature (50)..(50): n is a, c, g, or t
cggggggggggcaaccaaaattaaagacttgggctaattgtaaaaccccnggcctacccctctacagcacaggggttaaaaagtgcgggtgtggaattcccctttggggagggcgtttatctttcggggcccaggggtttggtgtttatacaaaccccctttcgttgattaccccaaagtgccctacagagtcaaaacccaccccttcaggggccaaaaatggggatatccggggtcccgggaccaggaggctccaaaccataaaattgttttcctttccaaaacttagtaaccttgaggtataaaccctcggcgggcagaattttttatttctgaaaaagcggcctccgattggtttttggaacccagtgagcaaggtccttgggcagagaccgaatggccccccggcctcctgtaagtgagagcagctccagccacacacaggggagaaacatctccccatgcactgcagcgcatcctctttagagagagaccgcctgcaggtttcggc

SEQ ID NO: 632746 - DNA, 179 bp, Homo sapiens
cgagaattctggatcctcaattcacatttctccacgggccacactcctactcatctttcagtggcaacaggggaatgtttggtggctcccaatgtgatgtccaaacccttgtaaaaccaaaaattaccgggtgtccccaaaaacttttaaatctcacttatgtttttttaataaatatt

SEQ ID NO: 632747 - DNA, 645 bp, Homo sapiens
ggtagtaattgagcctctgcgattgccgtactgcttcctgtgaaagtcctttccgtgcggccactgtagtccttgagtgggcctttgagctggtgactttcagctggaacttgaagggaccccaaacctgagacactatggctcctgacctcagagctggggaacacagataaaagctgaaacgaggtggagcgggagcctcctgcttagcctgaactgtggacacaacgtggatgcctagatctcgatgagcttctgagggccaaaccaggatgatctccttcctatctgcatcctaccctaaagcagggacacacggtgttattcaggaattggtgggttatcattgaagctaggaatggggacgtggagaagtgcctagcgatgccatcatccaacagccggcatcctttcagttgaggtgggctcggtgacctcaatcttctggtgtggaaaaagccaaagcaagtgccctctccattggatactgaagagtcactctttcgcactcagctgttgcaccgttgtctggggaaacaacatgctgtgttccttttatgtagctcgaagtgctagaactgtatggtgttctactacatttccataggatgtgcctccatggttctgaccctggtactgggaaaa

SEQ ID NO: 632748 - DNA, 166 bp, Homo sapiens
ccttatcccccttagaatgtgtcttcaacactataaagcatttgtattgtgcattgattaagtatatatttggttgttctcaatgaagagcgacattaatatatatgtgtccttggtaattccggtagctataaaatattccatacttctaatggtagaaccgact

SEQ ID NO: 632749 - DNA, 1006 bp, Homo sapiens
tattgctccagagcgagagtgaacagatgtaattagtctagcgacaacacaaatgtctcctcgccttcactccagggcagcgtctaaccagtatgtgtataaaaagggtgtcatctatgactctgatattgggatacatcatagaatggaaagaggctgtctatttcagtttgcctggagagagtagtttcgagtagattgtgagacgatgtgagtttggtcctagccaacttgaaatagcccgaaggaagatatgcttttaactttccacatgtctacttcactacaaaacgtgtctaacaaaaccgtactcacctagggtacaatggtcttcgaaagcataaccgagattctacactaacctatctttgcatgaaccagcgctaccaaggacctctatcgagactcgaatatgattctgagctatatgaatgggcatgtcatgacccgctgttgccaatgatgaacccaccgacatttgcatcgcatgactgaatcccttagaattaacagcgaaagtcgaggagatcggctgtccagagattgacctacccctggtctgtctaatcctgaacgaaagttacctctggtccctgttcggatcctagtttcttgaagtatgtccgagccgagatgatggactcgccaaacctcaacctgccaagttctcataaaagtccctggcgtgccaaagactgaaacccgttccaacttttctacgcccatccccagaaactaggcactggtaactaccaggagtgtgatgccaacgaacaacccccggctacacgcttacaagacacatttatttccagaccagtcgcagacaagggaatctttcctaatgattgccccaggctggatattcaaacattcctggtgccgtaaggcgaatttttgccggccatcccaaaaagcgttggcgatccatccggtgtagaaaccactgtcggctgggccccaacgttttcttaaatccatttgatacattggattgggcaactta

SEQ ID NO: 632750 - DNA, 240 bp, Homo sapiens
gcgtcgacaatcaatattgatttcttaatttttataattgtggttatgaaagagaatatccttgtttttagaaaatatacactggcggggcgtggtggctcactcctgtaatcccagcactttgggaggccgaggcgggcagatcacgaggtcaggagtttgagaccagcctggccaacatggtgaaaccctgtctctactaaaaatacaaaattagctgggcatggtggcatatgcatg

SEQ ID NO: 632751 - DNA, 190 bp, Homo sapiens
  misc_feature (190)..(190): n is a, c, g, or t
tcctctcaggacttatgctcagatgcttgctagggagaaacaactggtatcccaatgtcctgtacctggcagactatgtccaaaagcaaggaaaactaaactagaacttacccagtttgcaaagaggctttcttgcagagggggtgagtctgaaaaagccaatcacattgagacacattgaatgttgagn

SEQ ID NO: 632752 - DNA, 426 bp, Homo sapiens
ggcccaggtccactgttcccgccgccttcgaaggagctggcccttaacgatttggttacctgacgtgcttggcacgcggtttcagcccaaaggacgttttggttctctggctgcaggggtcacaggaactgccccgcaaaaagttcttttcttgggcatcccggcaggagcccagccagggccccccacttttttttgttccagctattttgggggtggcagccgaggattggaaaaagggggcccccttttcttgcttggtgggccacaaggccctgccgttggcttttacacaaaagaccttcgcccgcttggcgggtaaacccccccatttcaattttttttttttcatggcggaggtgggcggcccctgttttttagccgcccccctttcccccccctttatttaattccttttttccccca

SEQ ID NO: 632753 - DNA, 237 bp, Homo sapiens
gaagtatgctgaccaaacagacccgtatataatgttaacactcttgcaggatgagacagccaagtggagataatatgctgatgaacttgcaatacgtggagctgaaatggacaagaacaagttaaaattgctgaagatgtaaaacttgaactagctttaagtacaggaccaattatacaagaacttaaacaggagtctcagaaaatccagcagcaaatggaaaatggaatggtcaga

SEQ ID NO: 632754 - DNA, 129 bp, Homo sapiens
ctcactcgcccgtttcatactctggtccaggaactgcagaaagcggcggggagccggagcctcggcgcggaagcaggtccgggagagggtgagggtaccttgaagtagccgccttcgtagagggtgtgg

SEQ ID NO: 632755 - DNA, 181 bp, Homo sapiens
gggcggctttagctcgggtacccgaagccagtctctccgcgcatacccgaacaacgtccgcgagctcctatgcgtaggtgcctcggggtctcgcacacgagacgcgcggtgcatcgtccgttcggctattggtcggcagccatagaaataccgcctgtagcgtttgcgccgcgcaattcgt

SEQ ID NO: 632756 - DNA, 1592 bp, Homo sapiens
  misc_feature (794)..(794): n is a, c, g, or t
  misc_feature (809)..(809): n is a, c, g, or t
  misc_feature (811)..(811): n is a, c, g, or t
  misc_feature (814)..(814): n is a, c, g, or t
  misc_feature (818)..(818): n is a, c, g, or t
  misc_feature (822)..(822): n is a, c, g, or t
  misc_feature (825)..(825): n is a, c, g, or t
  misc_feature (847)..(847): n is a, c, g, or t
  misc_feature (996)..(996): n is a, c, g, or t
  misc_feature (1261)..(1261): n is a, c, g, or t
  misc_feature (1394)..(1394): n is a, c, g, or t
  misc_feature (1443)..(1443): n is a, c, g, or t
attgtgcgcccgctcagtgtgctcctccgtgggtgcacccgctcgtgtcgccgccgcgtgttgtttgtgcgcccccgcctgatggtgtggagagcaccccccgggggtgtcgctgcaccgccgcgcctcttccgggagctttcttttagcccctatggcccccccgggggcgcggggttatccgccaagtgtgctgaccccgccgcggggagaccccggcttgttggtgacccgcacctttagcgacgccttatttttttaagggggtggacccacacctgcattttgagagaccacaacaagcgtgttttgttcgagccgcatcacgtgaaatgcgtgagggtccgttgtgggggtatcgccgcggtgttcgccgggagagatttctcccccccgcgggggaattataattcccgttcgcggagacccccccaccgggcggtttctcccgcggtgataacgcccgttttgtggggttggggaagcggaaccaatataaggaaaaaaggggccccacactttaaggaccggcattaggtgtggtttgaaaataaagccctgtgtcccaccaaaagaggttgtcttgtgacacccaaacggggggtattatcaaagccggttgccttgtgttgtatacccgccgcggagggggttggggagggccccccacccccagggaagaaatttggaggaactttttattgcccccctcacccaccggaggtgccacaccacgtgtcacattatatgggggagagaagagaacccacatgggtccccctcgtgaagactcntgtagacacaccgtnanatnggcntatnatntataaagagagaagtttttgtnctcgagaggggacacatcttttgagaaaggctatatttttccccccgcgcgcgcacacttcgggccacagaagaaaaacttctctcgggagagtttatataaggggcccacacatggagagagtaaaatgtctctctataaacactctntatattgcccaccagtgatgacactctcacacgagaagggagacattatataaaacacgctctgggagatttatagaagatatattgagagggcctcgagaaggtgtccccctcgcgctcggtataaagaggagaacactcgcgctcgggagaagagactcggcgtgatattttctatagagatatactctatgaacctcggggagaaaaatatattggggggctcatattcacacaacactctgcgtacacttaaatgtcctgnccagatctcacctgtgtacactctgagagagagtgggatactcagagatctcactctcactgggccacacaacacccagacctgtgtgtggccccacagcctctccacagatgtgggatagaagaaaaaactngggagtgagtgagcccaaaatgagttgaaaattggcgttaaatttttanctgtaaggtgaaggcctgtaatttgtaagtatgtactccagaatccccctgaatgttttctttatattcttcccttaaaattaaagagagttatattttgtgtttgtatttttggctggatgttataataaacatattgttactgtcca

SEQ ID NO: 632757 - DNA, 333 bp, Homo sapiens
acatgtaatgcagcacacacaatccctatgtgtcatgcgagtcacccggtagtagttaatggaatcatgggggcaggtttttcccatactgttctcgtgatagtgaatacatttcactaaatctgatggtttttataaagggcagtttcattgcacgtgctctcttgcctgctgccatggaagacatacctttttgctccttctttgccttccaccatgattctgaggcctctccagccttgtggaactgtgagtacattaaacctctttttctttataaattacccagtttccaggatttcttcatagcagtatgaaaagtaactaatacac

SEQ ID NO: 632758 - DNA, 670 bp, Homo sapiens
  misc_feature (295)..(295): n is a, c, g, or t
  misc_feature (375)..(375): n is a, c, g, or t
  misc_feature (407)..(407): n is a, c, g, or t
gatatttttaaagacctgtcttcaagttctgaaaagattttttttggagacagggacgcattgtcactcaggctggagtgcagtggcacgatcacaattcactgcaccctcagcctcacaggttcaagcaatcctaccacttcagcctcctgcgtagctgcgactacaggcatgcaccaccatgcccagccttatttttttttttgtaaaggcagggctccactatgttgcccatgtaactcctggactcaagcgatctgcttgtttcagcctcccaaaatgctggaattacagncatgaaccactgctcccaacccgaggtctgaaattctttcttctgctttatcatctaagttatcggtgaagcagtcactngcctttcttatttcattcactaaagtcttcangtctaggaaaattagatggctcttttttatgccatcacttttggggaattctcgatcatattctaaactgttgttccgagtcttttggggaggtaatccggttaccatgcctataaattaacccttttagaattaaggatttgaatttcaaggcgaacataaaattttgactggacgccgtatttgagaaataatggggtttttagagagaccaaaaataccttgcctttattgttccatgaggccttttggtgataaacgga

SEQ ID NO: 632759 - DNA, 153 bp, Homo sapiens
ctagggtcttgagctgaggcacttgatgatctcggtggtgtagcgcagcttccagcccggctgtccccgatcatctgtgaagaacagagatccacagcattgctgctggtgtcgaggtcggggggcctatgcttcccacagaactcgccaatg

SEQ ID NO: 632760 - DNA, 230 bp, Homo sapiens
  misc_feature (32)..(32): n is a, c, g, or t
tatgatcctgaccctggttaggcctagctaantgtgcgtgtccgtttttaacaaaaaagcttaaaaagtaaaaaaaaaaaatttaaaaatagaaaaaagctatagaataaagataataaaaagcatttttgtacatctatcaaatgcgtttgttttgagctaagtgttattacaaaaggaatcaaaaattaaaaaaataaaagtttattaaaggtaaaagttattaataa

SEQ ID NO: 632761 - DNA, 435 bp, Homo sapiens
agcacggaaacttaagatcaccaaaggagcacaatgatgctctagtaactgaccctaaagaaatggaaacatatagttgcctaaaaaggaattcaaataacaattctaaggaaacttagtgagatgcaagggaatacaggtagacaattcaatgaaatcagcaaacaatacttccatggcctgcacatgagcaaattcccacaaggagcacaaatctacaaaaagcaaccaaacagaccatcttcagcaactgcaagaactcaatgaatgcacataaaactcataccagggcagcttcaacctcgagcactagaatcaacacagcaaaaacatttctgaactttgaagacatctcttttgaaatcaacagaggaaccctggggcacagaacgcaatggcaccgaaccaataagatatacgcaccgatggggtacc

SEQ ID NO: 632762 - DNA, 325 bp, Homo sapiens
gaagttgcagtgagccgagatcgtgcctctgcactccagcctggcagaaagagcaagactctgtctcagaaaaaaaaaaaggaaaaatatattgcaaaaagatggtagtaaaaatgctgctaaagtttataaatgtgtcagtatgaataaaaagtggtggctgttttggtagaaccatcaaaagaaataaccaggctgttcccagcctggttatttcttttgatggttctaccaaaaggaaataaccaggctgggaacagtgcttcacgcctgtgatcccagcactttgggaagctaagataggtagatcgcttaagcccagaag

SEQ ID NO: 632763 - DNA, 307 bp, Homo sapiens
tttgcatgcagcggttccttaacagtcgatgtcaaggtccgaactggatctaccctcatcccagactggattcatggctgtcatcagcattgacacgacgggagagcctttccgtctgatctatgacaccaagggtcgctttgctgtacatcgtcttacaccttaggaggccaagtccaagtagtgcaaagtgagacagatcttggtgggcacaaaaggaatcccgtcatctggtgactcatgatgcccgcaaccgtccgctaacccgatcccctcatcaaggtagaatgataccattcagattgat

SEQ ID NO: 632764 - DNA, 322 bp, Homo sapiens
tcttaggcctcaatgtcatccaccgtcagcctggctttgtcatgtctgccgagcgatagacctcgacttgtaattcatatgctttagcagtcaggcactcttgtcccggattctcttccatggtcttgtagttagcggactgtagtcccgctcagggctagctgggctctgcttcaggtgccaatcgcggatcttcacctcccggtcagcgtttgcctcctccagggcgcgcaccttctccaggttcgaagccaggcagtctttgcggttctgcatggtcctcctctcattgccagttaggaagccgtcatcacgagcacca

SEQ ID NO: 632765 - DNA, 383 bp, Homo sapiens
  misc_feature (18)..(18): n is a, c, g, or t
  misc_feature (34)..(34): n is a, c, g, or t
cgaaaaaagctttaaaancaaacctaaagaaaanagatttcccaactacaacgttatgacccaagacacaccatccatctcttgaaagcttctactccgaccattcgcatgaaagaaatggatttccagtgtgtccgtacatccacaaaaagacttttttgcctgaaatctaatttgcgaaaagtaaagatgtataggcatctggtgtttcagcatacataactgaagcatgtgaaacagtatcatcctcgttagtagaggaaaaccaaaaccccttttttccgtcaaaattggatttgtaattaaattgtaagcctcgtaggatgtatgttggaattttaagtctttcctttggttctatgcaaataaaaaaataactgatt

SEQ ID NO: 632766 - DNA, 297 bp, Homo sapiens
ggggcagtatctctcacccagtctggagtgcaacagcgtggtctccgctcactgcaacctccacctcccagattcaaatgattctcgtgcctcagcctcctgagtagctgggactacaggcatgtgacactatgcctggctaatttttttgctatttttaagtagagacggggttttgccatgttggcccgaggcaggtggatcacttgaggccagaattcgagaccagcctggccaatgtggtgaaaccctgtatcactcttttaggcccttctgtcgtattctcgccgccgtata

SEQ ID NO: 632767 - DNA, 862 bp, Homo sapiens
  misc_feature (860)..(860): n is a, c, g, or t
gctacctcctcataaccataagataattaaaacttggcggggggggggggcgggttaaaaaaatctttttttatcagccagaggataagtgcagggtgtttaacagagtgcttcactattaaaatattttccccccaagttctcaaattattggaagaatctctaaccgagggacaccagtccctacgaagaccttgggcgatttggaaggtgcgggcacctcgattccccgaatctgtagggtggcgggtatcggtgtcccccggggttttaactagccggttggagggcacagatcattcagggggaagtataaccggaaaccagtcctctccaccggccgggggatctccacgtgttcgggagtctacagatgtgggctggtgactccaagaaagacaaactggcagatagggccaggtgccttcaaactggttttttcactgggttgaagaaactcacccaaggaaaatatatgggcggatctggtatatggggaccctataagctggctggggattttgaatcctaggcataaaatataagaatctttataactgggatatggttcctaaatgattgttaggtgtaccactgtggtccaaaaggcatggacttgcaggagggtaaggggataaaaagattctagagaggttggggactctgattgttgcaaagtggaaagttttgcggagaaaatggcgtaacggtaacgggtaatacagaaggctgaatttcgaatttggtcacattgtgggcggcgattggtaggaggagggggtatccggcacaaaaaaaaatggggggcgaattaaatgggggagaaaaattatctatggaaagggcattgttcttctctngc

SEQ ID NO: 632768 - DNA, 99 bp, Homo sapiens
  misc_feature (55)..(55): n is a, c, g, or t
gctgcgacttgttaatcaaccggtcaggctggacgtgcacgcagcccggcggagngataaagaccaccacggtctcctgacaaacacagcccctgaggg

SEQ ID NO: 632769 - DNA, 308 bp, Homo sapiens
aagtatcccaccttccaggcagatggccggccaccctcatcgcatgccacccttatagagtaaacgccgtccactatcattatctatacattaaccgtccctctacacttttcatcttcacgatccttacttccaagctgcattgctggcttccttggcgctctctccgtgtgtgtaattcttcgtaaactctatcgcatctcttacgatccagtgatccagtgatcaccttcccacattctcgtgcactcgaaacccctctcaggttttggaaagcagggttcctctgcctgcaatcaagcctggaa

SEQ ID NO: 632770 - DNA, 1651 bp, Homo sapiens
gtccttctgtagtttggtgagttggcgctcatcgcggtgcggtcgacactacatctaggtctccgtcttcccgccatgtgtgttgttggctgggcttgccccaccgcctcctcgtgttggtgcctgccactacggaccgtcggggagcacacgatctattgctcctcacagtgtgggacttgtgtctgttcgtctcccagcatccatcggtgcttcgactcgtcgtgtgtccggccatacgtcttgggataggtagttatttattcgtcgccagacatgcatcaccactgtgggggctgacatccttctacacccacaggggtcctcttacgtggcctcacctgtggtggagcggggctgcgtcggtcgttctgttctgagctagttcgtgtttttgttggagtgcagctcctttctccccaacaccgcctttgtgtgtctccccacttgtggtccctcacatttgggggagattaagagtggcgtcttattattgttgacccacgcggtgctcaccccctccctaccggggtgtggtttgttccctccccctgttggctgttccccgcctcaactgtgaagttgggggtgggggaccacccacaccgtcctcgggaggtgttttgcgctgactaggtctgttgtgcgttgctgtcttacaatacataacctacctgttcttgcggccaagcgcctcttttcccccttctgggggtgggttgagttgctccccgtggcggcgcccccgttggttgtgttctctgcctcgggggggtatgatagaacctttttgggacccccctgtgttggggcgcccttctcgcgaaagatgtggtggtggcaattggtgttctcgttgggagttctccccctcggatgagttctgttgggcgcttttcccacatggacgcaaccgctttatgtgtggagcaccacgcttgcgctattccgggccctttccccggtgttctcggtagctttttctctttccacggggcgcctgggtgcgccccccccccaggaggtctttccgcttttgggagaccccccctcttggggagcccccacattgggggagccccaggctcccacctctcgcgtgactctttacccccacgaccacttctgtcccccccccacggggtttttcgagtggaacacaggaaccctcgtgaaggccctccccagagatggtaaacacttccccacggtctttcgcctcccactttgctccactgggaggtcttgccccaccccttggtccccactcacgcaaaaccactgtttcttgcacggctcgtggggacaacagggaattttggctcaatggtgtgttgcagaaccggctcgggaaatacctctcccacccccttattcacgagtaccacagaacaccctggtgcacgcctgtctccaccctagctgcacgagtaagcttccaccaaagaggagaatcacgtggtggtgtcttctttcacccatcaagcttcctgcccctgtttcaccacaccacgcttccttctgccacactgttcccaaagggaggagcttccggcaacacttcagccacatatatcctcgaccccaccccagtgttataagaacagaacgcattttggatgttattattaagaacccaatgtccaatacc

SEQ ID NO: 632771 - DNA, 1197 bp, Homo sapiens
ggtggcctgcctgtgactccctgtggctgcctgctgctgcctgctccgcaagctgccctgctgctgctgctgcccatcccctgtgagccctgcctgctcccctgctgtgcttgctgctgtgtgccttgtctgtccccctgtgaccctctgcgctggctgtgctgcgacctgcctgtgctggtcccctggtgcccccccacggcctggccctggccggagtgcgctttactaccccggaagccattactgcctttgtacccacactctgtggcgcattgggactccaccggttatcactcgtgagtgcaacgcttgccatacaaccacctataccccatgatgtgccccatggaacaccccctttctgctgacatcgccatggccacccgatgcagatgaggacggagacacgcctctccatattgctgtggtgcagtgataacctgccagctgtgcaccggctggtcaacctacttccagcagggtgggccgggagctcgacatctacaacaacctacggcagacaccgctccacctggctgtgatcaccacattaccgtctgtggtccggctcctgggtgacagctggtgccaagacccatggacgctggagctgacatggcaagacggccagtcacatgggaggtgcgaggcaccgcagcccgcactgccttggcgagccctgcttgacagggcagatccggggcacggtttggacctggagggccgcgaattaattgactgggtcaccaggccttgcacgttgcagtgaacaccgagttgcaagacatcgtgcaggctcttgtaaacacgcggtggcggacatcgacgcagcggcaccattacacaggcggccgttcccaggtcatcagcgccgtggaaacacacgcctcgcttggtgacggtagtagatgcagcaaggggccaacggtaaacgggaaccagtactactccggcgaggagcggccccttacctacagcactctggcgaggggcctcaccgctggtagcacccgattgctcacgaccagagcagagagctaaacacggccaagagcagagcatatgtgtgccgccacaggctaaaactcatgggtagcgagcagtaactcaggagacactaaactagcaactcagctaaagagaccagaagctagaagaagacacagtaaaagagcagacaagacaactcagaag

SEQ ID NO: 632772 - DNA, 766 bp, Homo sapiens
agtgaagccgccgtgacctccggtgccgcagtatgatggtatgggaactgggaacggccgatgagcaggtgagagcgattgcgagaatgaggaggacgaacagctacaagcggggtgcgttgagtccatgccaatgacactggagccaaaaatgaggatgaaaagagaaacaaaaaaagaagaaagaagaatggcagtgagacagattcagcccaggatcaggcctgtgaacgatgaactctttgccagcagagaggatccaggaaatacaagaaggccattgagctgttctcagtgggtcagggaccttgccaaaaccatggatggagtgcatagcaaggcgaagcatagcaggattcgtggggatactgcatgcctggtccccaaagcttgtggcgaatgttggtttagaacagctcccattggcccctgtggatgcctgaacctagtgggacaattaatcctgccaggtaggcccttaaaaacctgccccaggggttcactcttggagatgcatgtgtggcactttggggcacgaatcgtgggtagtgctaagaagaaatggtacaacccctccgtgactgaagaacgtatgttggaaggattgacttacccaacagtgttgccgattgtgcattatcgcgcggagttacctatggtgtgggctcttccgagcaccgggttgtctcccccgaagtgcaatgtgaggaccgagtggcgtcagggtcggaaatggtgggccatagcgcgaccagaaaaatcatat

SEQ ID NO: 632773 - DNA, 129 bp, Homo sapiens
ggatcccccagtgtcctagccgcgccaggtggagcctgtgtgtgggggatttggggtgctgtgggcctggttatgcgctggcgaggctatgaccgctggcgaggctaggacgctggcgaggctaggacg

SEQ ID NO: 632774 - DNA, 616 bp, Homo sapiens
gctgaggcagacgaatcacttcagcccaggagtttgagaccagcttggactacatggcaaaaccctgaatctctatttaaaataaaaaaaaaataagccaggcatggttttgtctcaccgcctgtggcaaccccaaacaacgttttgtggaagaccagattgctcgtgtggactcacgtgggaccccgcaaggatggatcgaaaggattggtgaggatgaaactagtgtgcattcgaagcggagatgtcgcggcgcaagcccatgatgatggagaacaggctattgaaccactggtcttccaaacaactccgcgtggagacggaaaccgtagggcggttcctgagctcaagccgtcctgctattttccatcagaaagggttgccacaaggcggggaggcctttggaaaagcagtcagcttccgacgggccaaagagacgctatgtcctaacaatgctggggcccctccccttggcttcaaaatcactgattcattctctttcaaacgctacgtgcgatacgcgccccgatagcggaaggccacattggcactggtcacagccgagaacttcctaaaggcctgggtgagactatccaccgtctaaccgcctcaatgt

SEQ ID NO: 632775 - DNA, 246 bp, Homo sapiens
taccgatcgctcgtgagtcccctcaacctgctttttgattcctagtatcaacgtttcacggctgagaagcgtgaacagatcaaggatcctcaacaacagagtgttgcctccttcatcgacaaggtgcggttcctgcgagcagcataacaatggttctggaaacaaagtggaccctgctgcaagagctgtctagcaagactgtgaggcagacctctggagcctgttgttcgagcatgtacatcaata

SEQ ID NO: 632776 - DNA, 740 bp, Homo sapiens
gcagagactcgcgcgtggagcgtggtggggtcggctcccaaaaacccaccttctggcatggcagtgtcagcatcttccggcagttatatagccccagacttctcgggtgtgcgtggttcgagttggacagatgggagacgatgacatggacccaggtccgaccccggactgcacgcgggaacccgaatgatgcttgcactaacgccctagtctggaccctggtcacgggccttcgtgtagcatggtaagctggcacctcctgcaggggcagggctcccactcggttatgtgcacaagggagcacgtttgggctcgagctaggaaggacgcagcaggcttcgttgggtggcgaagccagcccaggatccattaccatggaaggttatctgtaccttgagagcctgaatcagaggccgtcgggaactgccctccctgcatgttgatgaagagccactttcctgccagcacatgttctgggtcttggaggtcaccccacaccccggcggatcacagctcaagccacgcggcgcacacccctcctgtcgttgtcatctgcacctaacttgttcccaccttgggagaggacgatgacttgggaggggacgcgtgaaggggagaagggggataccgtccacagtgacggggatggagggaatggacgtgggaagcgtggcacgagacgggaagcaggcgagaccgggctgaacgtgggggtcccagggatccagaatggtaccaaa

SEQ ID NO: 632777 - DNA, 1080 bp, Homo sapiens
  misc_feature (1080)..(1080): n is a, c, g, or t
gtgatgaactgttcatccttcttcaagaataagctggccaggacgggctacgtgtggctcacctgcctaataatcccagcactttgggaggccgaggcagggcggatcacaaggtcagggaattcgagacagcctgaccaaatggtgaaaccccatctctactaaaaatactaacaagttagccaggcatggtggtgcatgcctgtaatcccagctatcctcagatgctgaggctaggagaatagcttgaacctgggaggcagagggtgcagtgagccgagatcgtgccattgcactccagtctgggtcgacattctgtctcataaccaaaaaaaagaaagttggccatacatggacttgggcccaaaaatgggcggtggatcctccaatcatacctttgtgacctcgtgttttcccccaaaacaagccgggggtccacccgagatctcttcacaaaacctaaaaataccagagaggcgggggaccgcaacaaaaaattacctccctctgggggcgaccagaatttatgtggcgcccccacgaattctctgtgggaacgaccggggcccccctaatagaggaggcgcgaattaataacgaagaggacaggtgcccagctccgttaaaaaccaaaggtccgccgtgggaaaaacaccggggaactcttggggaatccgtggtcaacggaccctaactccttggtgcgggggtgcgcccttggctgcgacaacctttcctccccgagagttttacagcgcctcagcgcggaatatatgaaacttcaagggggtgcaggggtgcaagcccaccgcgcattatgctgaccgcgtagaaaagctcccgacccggggtagcgtgtcggagacattcttcccacggcctatgccgtcataccctactatccatcactcggccaacagacaaactcgggcaacactccctgaagcctccacatgctaccagatacacgccctacggccaattagccatacctggaccccacacggtcataatccgacactacacagcgtcgaaccacagcaccaaatagcccacgtctatgctacacgactcgcagan

SEQ ID NO: 632778 - DNA, 1427 bp, Homo sapiens
  misc_feature (180)..(180): n is a, c, g, or t
  misc_feature (465)..(465): n is a, c, g, or t
gaatgggtgcgcaccaggaagacaggggctgtgtcaatccctcgccccctctatacttaattccccgtgccctaaaggtttacaccgagatcctctgtgtgggcccacaatattcccgcaccacccagagatgctgccactgccccaatgtattccccagagaaaggggagaaaattctnttgtccggctgagaggggtcaatttctttatcaaaaatcgctgtggaagcgtgaaaaaggggaaggttgtttctttaactttccgggagaagcttgggtgtctgtaaagagagaggggcataatctttctggggaacttttgagagagtatgtccggaaagtgtaacacacgcccgcaatcccagcggtcatccacgcgagattccgatgtattattacgtttagtgcccccccccgcgagggaccaccccacagcgagagtaggtgttttcctactgtgtgganaagaataaagggctccccgcccgcgaatttctttcgcgcgggaaacctcgggagcgtcggcccctcgtggagggtttcccaacgcaaaagagacgggttttttgggccttcttttcccccacgagagggcgaacacactgttataggggcgctttttattatgccctggagaaatatagggtgggccccccacctaaggagagggtttctcgtgtggtgcccacactgtggggccccacggcccacgaggggtgtctctctgggcgcggttagcacacaactctcctatgcgaaggggcctcctttcttgttgcgcgaagggcctcgtcctatatggtgatgctcccggtttcactccacatcggaagaagtggggccccacaaggctcgtcgcaaggttttggtttttctcggggaaaaactcccgcaaggaccacacgagggtctataaatcccactgagaagtgtttgttgtgagtgggctcctcgagtgagatcccctcgccgcgaggagcccctcggtttatagactatactaacgctgtgagacacctcggctctgtggcgcccacacgctggtttggctctcacagacacacgcggttgtttttctcgggccactcacaacagagtgtaaagaatcactgtctgagccctcgggagaccccacactcggtataagagattggcgcctatagagagcccctcgtcctgagaccaccctgaggcacattgtggaaaccccaaagaatgaagaatatctgcccacccaccccccactttcacgaaccacaaaaggggtgggaaaccacgaagccccctgccacatgccccacgccacgtccccaccacgcattaccacgggtctccttggcacgctgtattttctggaggttctggaatgttgctcttttaagaccctttaattaaattttgtaccaagactacaaaaaagaaaaaaa

SEQ ID NO: 632779 - DNA, 530 bp, Homo sapiens
gatcttgagtggggccccagcaattcggttgagccttctccctccactcgcttccgccggccgggcgtgccgaagaagagaaaaaacagagaaagaaaataaaaaaaaataagaacatggacaagaaaagcaaggagtacagctgtaaggcggcggccaccatcagacgagagaacacatagagcagagcgacacaaaacaaacacacagaaagaacaaagaacagacagaaggagaagaaaaaacaaaaaaagaaaacaaaagcaaaaagaccacaaaagaacacaaacaaatcagacgcacaaagagcaaacacaaaaaagcaagcaacagaactcaacagaagaaacgcgaacaacacaggcagcagagaacaaaacacaaaagacagaagaaacaaggcgagaaacaacaagagagaacacagaaatgagaacaaaagaacgagagaaaccccaccaacaaaaccaaaccacacacaaaacaaggcactaatgacatagcgaacgaaatacaagaccaaataacaa

SEQ ID NO: 632780 - DNA, 138 bp, Homo sapiens
gtatactaggcagattcagggagttatacatgtatatgatcccaatgtggtcatcagatataatattcttcaaatatacttcccttaccaaaatcaaagaattttcacattagctcacatcaaagcaaaatttttctt

SEQ ID NO: 632781 - DNA, 1755 bp, Homo sapiens
tccatcacttctgcaatcactcccacaaatacagtgacttctatgacaactatgacctctcctcctacaaccaccaattgttttacatcactgagcagtaagattctgtcttccacacctgtcccaagcacagaagcaatcatcagtggcaccacaaacacaatccctccgtctaccttggtgaccacactccctactccaaatgcctcgtctatgactacgtctgagaccacctatcctaattctccgactggtcctgttacaaactccatgagcaagatctcctatcccgccagtatgacacagacatcatccactgcaacctctcttccccccaactctccctggggctcaaccacagaaatagccaaaagtcctaccacaaacttggtaacaaatgccatcaaggccacctcacatactaccaccacctacacttcttcaaccatctacttcacagccagcacatacacaagtgccatgacctcagtttccttgggtactatggtgacttctacatccatgaccccatctactgtgagtacgagtatccctacctcacaaccaaaaaccgtcaattcctcatctgggggcatcactggttcattacctatgatgacagaccttacctcagggtacaccgtctccagtatgtctgcaattcccacaactgtcattcctacatctctcactgtccagaatacagaaacctcaatctttgtcagcatgacctctgccaccactcccagtgggagaccaactttcacaagtactgtgaacactcccacaaggtccctcctgacaagctttccaacgacacatttattctcttcttccatgtctgaaagcagtgctgggaccactcacacagagagtatctcctcacctccagccaccaccagtacactccacacaacagctgaatccaccccgtcgtgcactaccaccacgtcattcatcacatccacaactatggaaccactttcaaccattgtagcaacgacaggcacagttaagaccaccgtcaccagctccacagccacattccgggagaccaccacactgacttctacaactgacatctccacagaatctctcatgacagcaatgacttctactacccgactcacttctgcaatcacttccaagactacattgacttctttgaagactactgcctcccggcccacagccaatagtacgttatcatcactcaccagtagcattttgtcttccacacttgtccccagcacagacatgatcactagtcataccacaaaccttacccgttcatctcccttgcttgccacactccctactaccatcaccaggtctacacctacatctgagaccacataccctacttctcctaccagcacagtgaaaggctccacgaccagcatcaggtattccacaagtatgacaggtacattgtctatggagacttctctcccacccacctcttcctctctcccaaccacagaaacagccacgactcctaccacaaatttggtaaccactgagataacatcccacagtactcccagcttctcttcttcaaccatccactccacagtcagcacacccacaactgtcgtctcctcaggtccccctacctcaggtaccatagtgacttccataaccgtgactccatcttctctgagtacagacatccctttgacaacaccaacaactatcactcaccattccgtcggctctactgaatccttgcttacagcaactgacctcacatca

SEQ ID NO: 632782 - DNA, 308 bp, Homo sapiens
  misc_feature (78)..(78): n is a, c, g, or t
ggggggggggggggggggggggggaggaaataatttttgttgggtaaaaaaggaaaaacccagggggttttgcccctnggggggcccccccggtaaaaggttttcccttttgggccatttggggggggaaagtcctcccccccagggggcttttttgggccgggttttttttctaggggggcctttcggggcccgttttttcccttcgggggccttttgggcttttattttttttttttttggggaaaaaaccccaaaaaattaattttgggaaatttccccccctttggaaaattttttttggggga

SEQ ID NO: 632783 - DNA, 853 bp, Homo sapiens
gtggtgtgctttatgggagggcccagcttatgtcggctgctatgggccccgacctggagacggggactcgggcagcggtagtacctggcgctgcctccgcgcttcctgctcccggctcccactgcatctccggttctgtgctttgttgaacgcgtgagcttcgggcaagcgctggagccgcttcagtcgtgagctcgcaaggaccactggactggagttccactggctgctggtcccccatctgtgaggcgccccggcggctgaggcgtgtgaaccaggcgagtgcatgtcgaggagtagcacccacgagttgcgcggctgtcgaactgatccagagacgagatacctgtaagcgggaggatgcctgtcacataccaagacgaggcgaatgtgtagtccgaggcttgtcagattccagggatcaacccgtgcatgaaagtcactttgttaagatcatctggcgggcattagcgcccaagtgagcaatctggagggcaagaaagtgtgcttgattaaaaaataaactgttgaggcaccacaagtcgcgccttcgtccttgagggaattcgggacgccccaagcgcgctggtggacccttcttattgggaagccgatggtcccccaaagtgggccttttggagaggagagcccggggggaattcccccgggggagaggcctcttagaatgcccctgggagccctggtgtggctcagatggcctcataccccatagggtcatagttacgaagaaaagacaacgtacaaggtgagaccattgaaacactatggagagtatagaccctaacggccgaggcccggtcccttagactcagactaggccagaatattcacg

SEQ ID NO: 632784 - DNA, 314 bp, Homo sapiens
acggattgagcttgcatccgtattgggctgagccacagtacggcccatggctgttacccatgattttagatcctgagcactgatgtcaaggaaaatctgggtgttgaatcccagttccatcatctgcccttagggaagtgacttcaccattccgagcctctgtttccccatctgtaagtgggttaaccattgctgtgagctcatggggttactgtgaaggtttcataagctaatgtaaagcttcataccattcaaggcatgaaggaaactctccataagttataactacattgatgtcatcacagactcattat

SEQ ID NO: 632785 - DNA, 956 bp, Homo sapiens
gggcggcggggatagtggcttctcgcaaactccgtgacctacgtgagcccggcgatctgacaggctccaactacccgggactcaatattagccttcatctcgactggctcctctgcacaagagggaggcttccggagtagtccctcgggtgagaggccccatgaccgacaggctatgaaggtcccttcgatgtgacgtctgcggcagaagacatggttctgcgaatggtccagcgtcaatcggcccaacaagaggaactgcccatgaaacaaggtctatctgagagtaggacgatcggtgatgatgctgcgttcaacctaacgatctatcgagacgcactgcttgacctgtcaggcgtccgcgtgtggtgcactcctcatggctcgcagggatacaacatgttcactgcaaggtattgaccctgatggacatggcttcgtgagatcctgctaggccaaacggagatgaacgtggcccggtactcagagctgggtatcctaccgtgaaacatcactcactcgataccatggagacctatcaaacgtcaatcgagaggtgccccaaggcccgtgatcgctgccgtccatgggggctgcacttggcggaggtgtggaccttgtcaccggctgtgacatccggtactgtgcccaggatgctttcttccaggtgaaaggcggtggaccgtgggtataggatggcctgatgtagggaacagctgcatgcgcctgcgcaaggtcatcggtgaaccatgagcctggtcaacgagctggccttcaccgaccggcaagatgatggctgacagaagcgccctgggatagtgggtctggtcagcaggggtgttcccaagaacaaacgaggtcatgctggatgcttgcctttaagcgctgggcgggctgagatttccaagcaagagccccgtggcggtgcacaaacacaaaggtcacctggtgtattcc

SEQ ID NO: 632786 - DNA, 167 bp, Homo sapiens
tttttttgagacggagtttgtcacttgtcacccaggctggcatggaatggtgcgatcctgggtactgcaacccccacttcccaggttcaggatattctcttgctcagcctccctccggggtggctggaataacaggaccaacaacaaggagggttaatttttggtcg

SEQ ID NO: 632787 - DNA, 441 bp, Homo sapiens
cacttatttatataaacattaaaggtaaaaccatttacaaatgtaaaaatcaatcttagcttggaaataaaggaagctggctgggtttggcccatgggtcttagtttgctgagccctggactaccatctttttgctgacagaaacaatattttggatataattgaagccctcattatacccctccctgatctcatttctcttcctcactcgtcaaaggtaattattgtcctaaagttactgtgtatcattcccacttttcaaacatgtctatgtccctaagcaatatatagcgtaattttggttgtttaaacatgtttaaataagtataattattctatgcatagtaatcctttttttcttttttttttcccaccccgcttctgcataataattttatttacttctttatttgttttgagacagaatctcaaaaaaaaaaa

SEQ ID NO: 632788 - DNA, 204 bp, Homo sapiens
ctctcggggacctttaactgagacaaggactgggagactcggtcacgacgtaaatatcggaatagtttgacttcatcttgaacttcccgttcaaccccccactagacaactctgacatactcgagtagatccgagaggacttctgacaaagggtttcatcataaagacatattgactatacggtaccgaatcctccttccttaa

SEQ ID NO: 632789 - DNA, 99 bp, Homo sapiens
ttcccctggtaatccccagcccatacacagtgggcttcttggtggaggctggcacttggtcccaaaggcccctgggttcacccttaacaaacaaccaag

SEQ ID NO: 632790 - DNA, 473 bp, Homo sapiens
aatacctattgaaaaagatatacattatacatagtacagatacagtaaagtaaaagttttgagtttgctaagtcagatctaatatcttgacttgtagcatcaataaaattcagtactgatcccataacaagtacaggcacgggtcaacaattcagtgccctgcaatacagctgtccctgcaatgtcaatggataggattttctaatgacctgatcacattaccaaaccatgattcaggggcaagagaaggtgtgtatgtgatgactgagacagagtatactatatacagcagtgctcttctatataatgtactgagagggccaaggcagaaggatcgcttgaggcctggaggtccggaccagcctaaacagacaaggccacgaatctcaatctccactaaaattgtaaatgagatatagtaaaattttaagctgagcttagtgtgagtggcactgggtccgacgttttacgct

SEQ ID NO: 632791 - DNA, 119 bp, Homo sapiens
atgcatgatacccaggagagggacatggtgaaccagaggaaaacacaataggtatcaacttagagactttgggtaagcctccattgaccttctcccctccaaccccaataccaggaaca

SEQ ID NO: 632792 - DNA, 167 bp, Homo sapiens
acagtagccctggcgtacgcttaagcgctaacattacgcaggccacctactcatgcagctaattggaagtgccaccctagcaatatcaagctattaacctaccctctacacttatcatcttcacaattctaattctactgactatccttgaaatggtcgccaatccg

SEQ ID NO: 632793 - DNA, 160 bp, Homo sapiens
aaaagaaaaaagggaatatctggatttcctgggcgaggaggagcgagtcttctcgggagctgttccagcagagcgattttttaaatactgctttctacggcctatacaaacttggcttcacaaaacctttacactaactcttatatgatttttaaaaaac

SEQ ID NO: 632794 - DNA, 585 bp, Homo sapiens
ttttgagacagaatctcactgtgtcgcccaggctggagtgcagtggcataatctcggcttgctgcaacctccacctcctgggttcaagtaattcttgtgcctcagcctcccaagtagctgggattacaggcgtgcgccaccagcccagctaatttttgtatttttagtagagatggggtttcaccatattggccaggctggtctcgaactcccgacctcaggtgatccgcccagcttggcctcccaaagtgctgggattataggcatgagccactatgcccagcctaaatatggattgatattatctatcaatattactttggggtgttttaacggtattgaacttatgcagaatgtctttgtttcttaggaaatacgtgctgaaatacttagggtaaagtatcacagtatcaacaacttcctatcaaaatagttctgtaaaaacgtaaacagcaaaagttaaaaattggtgaatgtaagtaaaacttatgagtaattatgtactactcgttcaacttctgtcttttgaaatttctcaaaacaagctgagggaaaaaaaaggaaatgcaactatttcaacgtcga

SEQ ID NO: 632795 - DNA, 971 bp, Homo sapiens
gaacatgcctaatctgtatcaagaagttggagagtgatcccaggacaaggacactactcagtgatcctacctaccgggagctgatagagcagctacgaaacaagccttctgacctgggcacgaaactacaagatccccggatcatgaccactctcagcgtcctccttggggtcgatctgggcaagtatggatgaggagtgaagagattgcaacactccacagcaacccctcccaaaaaggagaccaaggcagagaccaaatggaagaagatcttccagagaataagaagcaggcactgaaagaaaaaagagctggggaacagaatgctaccaagaagaaagacaagacacagacttgaagcctaacgacaacagccaaggagctggacccaataacatgactaacataaacaatacaagcagaggaatactttgaaaagggcgacatacaactaaagtgccgggaagcaagagtgacgaaggacacagaaagatggggagagaaaacacgggaaagaatatacgacagaatgacaacagcaacatgctacgaataggcagaaccaactagcaaagaaaaaaaaggtacaaggaatgcacatccaagaatgtaacaaagtctacggacagagcaccgaaacccaagatatgagacaagaaatggcgagcaggaagagaaacacccgaaggaggacagacgggacggacgtacataaacccgacaggagtcggccgagagaacaaagggaaaacggaacagaaagggaacacaggcagaaaagaacgaagcccacaagaaccggaagaagcacaacacgacgaaacgaggacgaagcgaggcagaggacaagaaggaaagacagcgaccaaaagaacgaaacgacaaaaggaaccggagacaggaaacacaaagcagagaatagaaaacaaaaagccgacggacgaaaacacacacaggccgggcaagacaac

SEQ ID NO: 632796 - DNA, 195 bp, Homo sapiens
gcccagaggattcgtctgtctgctgagattatgatggtagttctggttttgtagagaatctatagtcagagaagcaggtcctgagtctaattatgatcttgtttttggtataccttatgtttaaaagccaagcaaattaaggatgtgagcaggaagtatgaaaaagccattccatcttttctccccgggatacag

SEQ ID NO: 632797 - DNA, 252 bp, Homo sapiens
atcgccatcatgaacgacaccgtgactatccgcactaggaagttcatgaccaaccgactacttcagaggtaacaaatggtcattgatgtccttcacccgggaggcgacaattcctgagacaggaattcggggaaaactaagcccaaaatgtaccaaaaccacaccgatgtccatcttgtaatttgggattcagacctcatttggtggtggcaagcaactggctttggcatgatttatgattccctggattat

SEQ ID NO: 632798 - DNA, 581 bp, Homo sapiens
  misc_feature (533)..(533): n is a, c, g, or t
tttttttgcttcagagacggatctaattgatttgtaacttataaaatctcaattcggactggattcagacttaaaagttaaagcttgcaaagaggaaagtctgcgtcttttcgcaattggatcctggcgcttttccttagcctccttcattctctgggccaaaagtttaacatattctgcagcctctgctttattttccttggtacgctgcttcttcagagcaatacgccgccgtttgtgctgcatgacacggggagaaacaagacgctgaatcttgggagcttgggtcctaggttttttaccttctttattcaagggctttcttacaacatactggagacataattttctttagagagattgaaaaggtggcggattatgctagctcttttggggcccaggcgccgaggcactgtcctataaatcagaccaggaatatccgtaactgctttttttacaataaccaaggtgagaacgctaagatttgcttccacaatgcaccacgaactgattttcgttttctttctccaganctccttggaatgcaacaggaatgccccttctcagaatcaggcggacac

SEQ ID NO: 632799 - DNA, 994 bp, Homo sapiens
  misc_feature (720)..(720): n is a, c, g, or t
ggagagaactagtctcgagttttttgggggtttttttggctggtctagtcatcctcgtgggtcttctgcttctgggtttcgacttcgtcttcctcatcatcttcagctgcccgtttgcccgtagtctgactcagccttcctcatcttcatctccatcctctttcctcaccatcaccttcttcttcctcctccttttcctccccacctttcttcctcttcttcgtctacctcattgtcagcctcctgtggctccccattttcctcattagcatttcccgttagcaggggcgtctcttccattttctgcctcttccacaatttccttcgttctccttaaagtcctggggggggattccggagcgtgggtgtcatacggctgcgtctgacattgggggggcacgccggttgatccgagtgcaggggatttaacaaacgaaagcgaaagttcagggactcgggcgaataaagctgccggagttccgcggcggcggaggaggcgcgcggaggaggcaactgcggcgggcaaggaggcggggaggggtgaataggctcacgggggccataccgggggcagtgccacccggagatgacacggcgctctcaagcaccgaagcaaaaccttgagattttgcacacgggggagggaaaaaagaaccaaaatttccaagggccctgcttttgtccttaaaagtcctttaaaacggacactcggtggacttncaattaccctctaatatctgggacatatggtagcgtcagccattttaaggacctcggatgaccaaccacgctcggagggtactctgaccaaacttctggatttactgtgtggtgttgacgcctgttcattaatatctccagagggagaaaaaactttttgtaaaaaggcaaattgtgcaaggaaaaacagttttttccagagatcccaggactttcggggattgactagatggccaaaagaagggctcgttaaacttgtgaacgggcacatata

SEQ ID NO: 632800 - DNA, 710 bp, Homo sapiens
gcttcgttgcgacagtgccagtgatagtggcttttattcatgttgagagcatatttcctccaaacctcacagcaactcaaacacactggaatctgaaggcaggagtccaattttcactcatcttgtcacaagcttaaagaggactatggacacttcgtgccttcggacggcagccttacatttgaaactctgttccacaaaagctctgaatttacgatactggccaaacgtgggttctgtgtacctggtcaacactgcgctggttccaaatgagaatagaacatgatttctgtcatctctcttcattgcttgttaccttcatttccattgtaacaacaggagcaaggagaaggaagagttggtaattatgctgatcattctagagcatgaaagtattcattgagtcacattggcaagtggcgctcgtacagaccgtccaggcactacgatgtggatagcttgatgcgagtctgtgagccgagtctttaagttcattgacatgccaacagaaggtaaatctaccgaagtgcaagcaaaccatagcgagaatgagccaagtctcgagaagttaatgattattgagaattcacacgtgaagaaagatgacatctggccctcagggggccaaatgactgtcaaagatctcacaggaaaatacacagaaggtggaaatgccatattagagaacatttccttctcaataagtccgg

SEQ ID NO: 632801 - DNA, 409 bp, Homo sapiens
  misc_feature (307)..(307): n is a, c, g, or t
  misc_feature (340)..(340): n is a, c, g, or t
  misc_feature (372)..(372): n is a, c, g, or t
  misc_feature (406)..(406): n is a, c, g, or t
cggagtttcgctcttgttgcccaggctggagtgcaatggtgcgatctcggctcaccgcaacctccgcctcccaggttcaagcgattcttctacctcagcctccctagtagctgggattacaggcatgtgccaccacgcctagctgattttgtatttttagtagagacagggtttctccatgtttgtcaggctggtcttgaactcccgacctcaggtgatccacccgcctcggcctcccaaagtgctgggattacaggaatgagccactgcacccggccagttctggcatttcttaagagaatctttntgagaagatgtagatattggcttcataataatnaaagtgaatttgtggtattaaattaaatgganaaaaagacaaacggtacaaattaaaagtttcttnagt

SEQ ID NO: 632802 - DNA, 244 bp, Homo sapiens
cggttcttgaatgagtcagtctccagcttaatttttccctttggcctagatgaatttgggggccctgcaaattgtattattctttcacaatggtatggcggggtttcaacatgttggctaggctgatctcaaactcctgacctcaggtgatcctcttgctttgacctcccaaggtgctggtattacaggtgtgagccaatgcgcccagccaaaaaagacattttcttacacaaccacaatacca

SEQ ID NO: 632803 - DNA, 716 bp, Homo sapiens
caatgggtcccgagggcccccagcaaactcgcaagcatcctaccggagacacagctgtacatgagtcacgagagccgctgtcacgcaagaagccagtctgagcctcggactccctagcgcactgggagagggcacgcgggaacgaggagccctggggtcccattcgggaaggacctccacgccctcactgctgaggcctctgacggctgccttggaccgtccacttcaccagactgcaagtccctgagcgagcttcagaatccaacgagtgccatggtgagcgactagtcccgagggcagcccagcactgagccccagctgaggaacagcatgggcagtgccagccccacctgccaggggccactggacaccgtgccacctttcttcaacaagagtcccgccaatccaggctacctttaccagagaacgcgtacccacccagccagggttgctctcggggaagatctcgtcgtgctcacccttagctttctgaccttggcagcacgggctgcggaagaaagcacgtctgggcacaggaggcagcgggtgcccaagcacacagggagcccctggggaagcatgctccattcttctggtgaccttaggcgctccttcactcatctcgcctgccccctcaggaactggtggcccagcttccacacccccacctcccagtctctagcctctccatctgtttacatcggcggcagtactcc

SEQ ID NO: 632804 - DNA, 637 bp, Homo sapiens
aggcagggtctcactctgtggttcaggctggaatgtagtggcatgatcacagatcactgcagccttgaactcatgggctcaagtgatcctcctgcctcagccttctgagtagctgggactttaggtgcacaccaccaggtctggctaatttttttttttttttaagagatggagtctcactatgttgcccaggctggtctcaaactcctgggctcaagtgatcctcccgcctaggcctctcaatgtattgagattacagatgtaagccaccttgcccagccctaaattttttttcttatgttaaaatacacaaaaatgtaccatcctaaccatgtttaagtgtgcaattcagtggtgtgaagtacattcacattgttatgtagccatcactactatccatcccctgaacttttaaaaaagtcatcccaaacagaaagtctatacccattaaacactaactctctattctcccctaccaccagcccctggaaactactttctgtctccatgaatttacctattctaggttcttcacatacatggaatcatatatttgtgcttctgtgactggcttatttcacttagtataaaggttctcaagggtcatctatgttggaccatatttaagaattgccct

SEQ ID NO: 632805 - DNA, 529 bp, Homo sapiens
  misc_feature (36)..(36): n is a, c, g, or t
  misc_feature (289)..(289): n is a, c, g, or t
  misc_feature (309)..(309): n is a, c, g, or t
  misc_feature (323)..(323): n is a, c, g, or t
  misc_feature (338)..(338): n is a, c, g, or t
  misc_feature (401)..(401): n is a, c, g, or t
  misc_feature (440)..(440): n is a, c, g, or t
  misc_feature (477)..(477): n is a, c, g, or t
  misc_feature (485)..(485): n is a, c, g, or t
  misc_feature (502)..(502): n is a, c, g, or t
atatggcagaaaagcaaaagagaaggaacccattcntgcaagccctttttataatggcattaatccattaaacatccccattaggctccacctcccagtaacattgtactgggcactaagtgtcaacatcaaatttagagaagacaaaagcactcaaaccacagcgactgtacacctgaaaactactaaagagtatatctgaaacattttcaccacaagaaagtgatgagtagatgaagtgatgaatatgtaaattagcttgatttaatcattccctcatgcatacatntatcaaacatcccatttggnctcataaatttccncaatttttatcttgncacctaaaaggaaggtaaaaaggttttttttccaaaaaagaaagaagaatggtaagaatggcnagtttggctggggttccagtgagaatgtcataggaccgngaggggcattttgactggcccttagtttgggaagagnaacccatnggggaatttaaagcaanaaaagggggcccgattttacttttttt

SEQ ID NO: 632806 - DNA, 337 bp, Homo sapiens
gaggatcccttcagcacataaggtctaaggggactcatctcatccccttatccttctccctcgaattttctccctctttcttcccaggaggccaaagccaagggcagcagatcagtaaagaaggtggtcagagtagaacccctgaagtatcttataatcctacctcaaaatttaacagttacctgagagatttaccatgatctagtgcatggaatcatggtatgtgggcatggctaggtagcacaccttggaatgcgctttctagaggaaatcaaatgactggaggacctttccaaagagcactttactggtgttatatagccaatataactatgtc

SEQ ID NO: 632807 - DNA, 358 bp, Homo sapiens
  misc_feature (6)..(6): n is a, c, g, or t
catggnggttctggagcatgacaggatgaggaatactgggacaggtagagtagcaactctgtgtagagtgattttatgttaatccagtcacagccactcaagtagacagaggaaggagagaacgtggctaggtaagaattgaggttatgaggggtcactgttcaggaagctgtggatctcagatccagtgtgcagtctgaacagtgagtgttgagtgtgaggggtctgtttatccaaaagtactagtactgaatctatggaactgagattcacagtctctgaatgaaggagggatactgaatatagtttttataaggcaatataaaaaggtgtacaatattgaagtttgtattgcttc

SEQ ID NO: 632808 - DNA, 165 bp, Homo sapiens
ctaatactgcacaaacactggtgtacaaatatcactttgagtccctgctttcaattcttttgggtatattcctagaagtggaactgcgggatcatatgataactaagtttttgaggaaccaccacattgttttcaacaggtggtatagggtggtatagggtggta

SEQ ID NO: 632809 - DNA, 242 bp, Homo sapiens
cgcgtaatagtagctagtgatatgtatccagataaccagatgtatttctgcaaatgagcatataatattcgtcatgtcgattagctgtactatctacatacacattgtatactactatatctgatagatgattctagaggttaacattgagaaccatctcaaaaataattacaaagttttagatacggttaacaactgtctatctacaacaatgtaatctaaaaaataatatgcgtacagat

SEQ ID NO: 632810 - DNA, 339 bp, Homo sapiens
ggtaatagtcttcgatctccgcccttcagttaacaattcatggactcattgcactagctatctactaatttcagtacatccttcccaaatgcttgtacataagtccccatattagtccatgcagcacaagctagtactcgcatctgtgtgtatcctcatctccgagcaatgtggtcaatgaaaggacagaataaattctactctgggttgtaccagtatcagatccgggtgtacgtgctcctgatccccctttaatccctggacgattccagtataggcttccaagcagctttcccttagctcattcagataatccaccatgtcatagtctgacttgtc

SEQ ID NO: 632811 - DNA, 357 bp, Homo sapiens
  misc_feature (292)..(292): n is a, c, g, or t
  misc_feature (294)..(294): n is a, c, g, or t
cggagtctcactctgttgcccaggctggagtgcagtggcatgatctcggctcactgcaacctccgcttcctgagttcaagcaattctccttcctcagcctcccaagtaggtgggattacaggcatgcgccaccatgcctggctaatttttgtatatttagtagaggcggggtttcaccatgttggccaggctggtctcgaacttctggcatcaagtgatccacctgcctccgcctcccaaagtgctgggattacaggcatgagccaccgtgtccagccaacaactaaatagnanttaagttgtatttatactcaggttctcttcgtccttctttcatcccttcaatatgtatcacag

SEQ ID NO: 632812 - DNA, 239 bp, Homo sapiens
tatttgttgcccccaggggtccaaaatagggttggaaaaaaagcccgtgttttttttggcatttttcccccccctaaaccctccggggtttttttaaaacggtttttcagccaggggtttttaagggggtgggacccctttactttttcaggtagggggggactcagcccatgctgcccccttacattttttttggaacggggggggggttaattattaaattttttttattttgccga

SEQ ID NO: 632813 - DNA, 965 bp, Homo sapiens
tcaggaggtcttcaagaccatcctaacagtgaaaccccatctctactaaatactacataaaagttagctgggcgtggtggcgggcgcctgtagtccaggtacttgggaggctgaggcaggagaatcacttgggcccaggaggtggagcttgcgtgagccaagatcggccacatgcactccagccgtggacaaacggggggtgacgacatccgtctcaaaacaaaaagacaaagaaaaagacacaatacttcaaacaatataaggtccacataggacaaaaaaatacataatcataagcacatacaaggaaaaccgggcgagcccaaggcacagggaccaccccaacggacagggaagggaaagggcgaaacgaggaggcaccatcagggcaccccctggcaaacaatccgaggagacataagagcacgaaccctcacggtgaccaacagcaaggcccgacagtgacaggatggcacctggacaacatgaacacgacgcgggtggcagacacacaccaacaccgggcgcaaacacatcagggacacttaaaccacggacgaagtggcgagctcaccaaccaaactgatgggacccagggcccggcgatccaacaagaacaagccagggggcacacaacacgaaagatcgacgcgccaaaccctacaaggacatatcaccgacaaaaggacagacaagcgcactggaccacacttcggacagacacaacaaagcagcgtcacacacagggtcgaccacacgcgaggacaccggcaacaaagccttgaaacaacgaagcgacctggggtaaaaaggaccaaccaccccactaccaagaaagcaggcgacgggcgatagccactcacacacactaggagacaccacgcagcacacccatgcagaaccagcggccacaccacggcgaacacaacggagacgggaacaaaccacagagcagaaagcccacg

SEQ ID NO: 632814 - DNA, 261 bp, Homo sapiens
tcgctctagaggatacaacttatgccctgacccacccggtagtgtctgtcatttcgcgctgcttagaaaagtacttgagctccactccgcagcgtctgaaggtgctggtcgcgaacctgcagtatatactgctgaccggcgcgctacagttcggttactgtctcctcgtggagaccttccccttcaactcttttctctcgggcttcatctcttgtgaggggagattcatcctagcggtaacacaggctctggaaaggtgat

SEQ ID NO: 632815 - DNA, 142 bp, Homo sapiens
gattagcatcggtcatggcgcaccgcgactatcatgcgagaacctgatctggctgccccagcgcgacggcgccgcccgcgtcggcatgatcgacttccaggacgcggtgcgcgcccacccgtcgtgggatttgcattccctg

SEQ ID NO: 632816 - DNA, 280 bp, Homo sapiens
catataactgagttttgatgataatgatagcgaacaattggaagatcatgattcataatcaaattagactgcaaaaccgaaagtggaaatgtactctgggagtgatgatgatgatgattataacaaacttcctataaaagctaatgggaaagctcatacatcaaatatgaagtgggatgggtcagaggaggatgaggataacagtctaaaaattagagagcgttcaagagtaaatacttctggtgaaagtggtgatgaatcagatgaatttttgccatct

SEQ ID NO: 632817 - DNA, 499 bp, Homo sapiens
gccatgcagattccagaccggctactgcaacggattccctgccggagttctaggtcaccaacaggccgtcgcaataacgacccctgaatacttctacattcccctgcgcctggggctcacggacatcaacgaggcctacgtggagacgctgaagcactgcttcaatgatgccccagtccctgggcgtcatcggagggaagcccaacagcgcccactacttcatcggctacgttggtgaggagctcatctacctggaaccccacaccaggcagccagccgtggagcccactgatggcttgcttcatcccggacgagagcttcccactgccagcacccgaccgtgccgcatgagcatcggcggagcttgacccgtccatcgctgtggggttttactgtaagactgaagatgacttcaatgattggtgccagcaagtcaaaaagctgtctctgcttggaggtgccctgccattttgagctggtgagcagcgccttcacatct

SEQ ID NO: 632818 - DNA, 138 bp, Homo sapiens
ccctaattacgcatggtgtaggtggcagatagtctggatcctcgttgctgtggctgtggtgtaggctgtcaactgcagctccgattggactcctagccttggagcatccctatgctgagggtgcagctctaaaaaggc

SEQ ID NO: 632819 - DNA, 654 bp, Homo sapiens
tcttatgggaaaaggacccaattgcaagggctagtctttactgggaaagaaaaaattttacagcacatttggagtaatttagtgcaggtgctcaagtgtgccagctgctggggccccagcttgtaaggggctccacagcgggggcatcgcggggcctcgccttggtgcagccaaaaccagacgacgctggtatggtcctcttcacagatgcacgcctactattctcttgttgggacgatgcgaggtggactaaattagggtcttccctggtgcctgaagctcccttgtggggccagtcgggaccgagtgagacctagatggctgctcgcgggctgcatcgcgggggtattggccaacggggccgccacccgagctacccgtgccccaccgtgtgtggccggcgtgtgggcagctcgcggaagcaggtgcgctggagacgccagtccggaactacctctcccagcctcgcctcacattacaagacagtatcgtggagtccacgggtgcccagtagatgactctacaaactcagtgtcaagttccccagggtatcgctgaaaatggctccattggcaccttaccggagtggcccacaagagaagttgggcaagtttcttggcaacgttacggggccccaaccgccagatagcctca

SEQ ID NO: 632820 - DNA, 786 bp, Homo sapiens
  misc_feature (239)..(239): n is a, c, g, or t
  misc_feature (535)..(535): n is a, c, g, or t
  misc_feature (651)..(651): n is a, c, g, or t
aactcgatgctggccacgtgggaggcgggacttctctcgcactattacgcctcactttattttttctcatgatccatgctctgacaaaccctgttatgttatgatgatcgctaaattctgatatgtctttatctgtaacacgtcacgacacgcactgactaatatccactgcctttccacactaaacgaggggaacagcgagaagcaacgcatcctaatcggaatgatggcgagcgccnatcagtattgcactgtccatttgcactacgtcatcgtacttagttagttggaccttcatttccagctcgtttacactttagatatgaatgcaggagcacgcgtttggatcacatgttcaatatcgacgtgacgcctgcacctattgtcacgatcacgcatcctagtgctaatcctagtcgtagcgtctcggcgagcggtatagagcatatgcaacgttagctatcgtcctcgcgagatagagagcgcacagcagtgtcgttggtaaagtatgttgacagtcgacgatcgaccgtgntgtagcatccttattagatgccatacccacacgactagttcaccgaatggttagaactctggcacggccatgttacctcgcgaacttttaattacacgcagaagcgcagtcttttnatttgtgttgtctacaagatgcgtggtgtaaatcaccttgcgggactgacacgacttctttatttaattagtgcagactacacacagtgttatcatccgtccatccgggcctagaaattaacttcccccttaaac

SEQ ID NO: 632821 - DNA, 260 bp, Homo sapiens
ctactacaactttcgctgtgccacgaatgactgccaggtagtggcgccagcgcgttgacgctggttgatcagcgtggagcaccgcgacggttccagctcctaaaacagcttggaatctcgcatgcagggtgatgacgtcgtcaaccgtcgggcaacacaccaccgcactgcgtcctgacgtcaacgtggcacagactgcttgcagcaaaccgttgcaccaatctccgaggtgatcatcatctcccggaccacaaactgga

SEQ ID NO: 632822 - DNA, 414 bp, Homo sapiens
cccctggctaatttttgtaatttttcgtagagagggggtttcaacatgttggccaggctggtcttgaactcctgaccttaagtgatcagcccgcctcggcctcccaaagtgctgggattacaggcgtgagccaccacgcccggtgcattgggtgttatttttctcgcttcctatctatgctaacttcatgtctgtgaaagagcaacttaatgattcccttttgcatttttgatggctaggaaagtggaactattttccatttattaaaattaaccagctgcaattctttttgtgtgaaacgtctgtctgtattatctgttcatgcatctgctggagagggtaccctcttgcctggggagctagctgcagatactgttctcaatccgtttcctttttattttaggttttttctct

SEQ ID NO: 632823 - DNA, 331 bp, Homo sapiens
  misc_feature (6)..(6): n is a, c, g, or t
  misc_feature (46)..(46): n is a, c, g, or t
tgaagntgtccatttgaaccaggaggcacagtaatgtcatggaagngggcccaagcctcagattcaaatacacatggttttagtcatggctctagcacttgctaggtgtgtgccctgggtcttgactttgcctctctgaacctcaattttctgggctgtataatgaagataataccttgcttacaggataggtataagtgttaaatgagataatagatatcacattcctagcacttagtaggtactcagtgaatgaacactatcagaagaactgagatctgcagttgtgctcagaaccttgagcattttctctggttgtcttaacaaaagt

SEQ ID NO: 632824 - DNA, 197 bp, Homo sapiens
ggaatcaacataaacccaccatcacaaaaaaaaaaattttgcagcgacgagaactgacgcaaacctgaagaaaaaacaaaacgcgggaaacaacgacccatacaaatttttccccccacacttacccgagggtggcatttgccccgccggtttttttgcgaccaattcaaaccaagaggctttaaacattacccgag

SEQ ID NO: 632825 - DNA, 384 bp, Homo sapiens
tgatctagaggatctccgctctcacccacccactgtgctctttgaagcacgtgctccctcgcctccatacatgagggacgacgcaggggagaacagagaagtgcttggcctaggattgaggcactttgttcctagcccgctggttagggctggtgcagcgaagcaatgttgaggatgctttaagcactaacaagccgaatccgggaactctgttaacaggttgtccaaccagcagaatgaggctaactgtataaagcatgggaccccggatgaggataaggaaaggacagcggctttccctgggcagtacaatggcttgaaggccaaaagggataaagtgacagccgactgtgactcttgtgaggaggggtgggtggagagcgg

SEQ ID NO: 632826 - DNA, 145 bp, Homo sapiens
cctagaggacccatggtttacaaggggcttcctccactttgctcagcacttctccttcctgcccgccatgtgaagaacatgtctgcttccccttctgccatgattataagcttcctgaggcttccccagccctgcgaacctatga

SEQ ID NO: 632827 - DNA, 486 bp, Homo sapiens
gaaagaaaatctacaacacatagaagatgatgatgttagatgcccatcgtgatgcagaagtggtttattcattatgtaaagcacccgttgaattaaaagaatgtgttttgtacaacctcttcctgaggcccaagagcatatgggcaattcggatttcctgctggaccacaaggttctgttgatattacatagaacgggtattccagacacttcttatgatgaaagtccaaaagtggcatccaatataaggccccatctttcgttgccattcttcattcatacaaagagacgaacttggattacatcaacttaggacccattggttttgtcgctgtcgtcaactgacagtgattcatcactggtgatgatcaaaatgatggaagaagagttgacagtcacttttttctttggcctgtccccatctttctgtgacatcacaatgggtctgatctgcatttcacttccagctgctggtaggtctttagc

SEQ ID NO: 632828 - DNA, 878 bp, Homo sapiens
tcgaccagcagtatatcttctctgcgtcgccagcgagccacatcgctcagacaccatggggaaggtgaaggtcggagtcaacggattgggtcgtatgggcgcctggtcaccaggctgcttataactctggtacagtggatattgttgccatcaatgaccccttcattgacctccaaactacatggtttacatgttaccaagtatgattccacccatggcaaattccatggcagcgtcaaggctgataacgggaagcttgtcatcaatggaaatcccatcaccatcttccaggagcgagatccctccaaaatcaatgtggaggcgatgctggcgctgagtacgtcgttggtagttccactggccgtccttcaccaccatggagaaggctggggctcatttagcaaggggggagccaaaagggtctactcatcatctgccccctctgctgatgcccccatgttcgtcatgggtgtgaactcatgagaagtatgacaacagtttcaagatcatcagcaatggctcctggcaacaggcaactgcttagctaccctggtgcaaggtcagtccatgacaacttgggtatcgtggaaggactcatgaccacgagtccatgccatcactggcagccagaagactgtggtattgcgcccctccgggtaaaactgtggcgtgatggccgcggggctctcccagaactatcatccccttgtcctctgacttggggggctggccaaggcagtgcgaccaaggtcttcccctgagccttggaacgggaatctcactggcattggcccttccgtgtacccactgccaacgtgtcacgcggtggaccgagctggcgtttagaaaacctggcaatatgcggctccacaaggttg

SEQ ID NO: 632829 - DNA, 453 bp, Homo sapiens
ggatcacctccataatgtgtgccaggagagtggctgtttggacagcagcattagctgataggttatggtgggcatgaaggaaagagagaagtcagggatgacccctaggtatttgctagagaacccaacaggtattttgctccatcacctgcctatgatcgagctggagagggcagtagggaagaggttggggtacagaaggtcacaggtgcagtggtggtgtgggaagcccctggagacaccactaggtctcccagtgaatgtagaggtctggaggacagagagggatcgggctggaggtgtggacctgaggtgtttccatacttggggaggcatttaagccactggtttggatgagacagtcggaggttaagtgcacacaaaaaggaaagggtgtctggatcgtgccctggggcatgcttgtgttctgaggtcaggaaggtaagagaggca

SEQ ID NO: 632830 - DNA, 317 bp, Homo sapiens
  misc_feature (235)..(235): n is a, c, g, or t
  misc_feature (302)..(302): n is a, c, g, or t
gaggcggctttactctgtcacctcggctgagtgcagtggcatgatcacggcccattgtagccccgacctcctggtttcaaatgaccctcccaccttagcctcctgagtagctacgactacagccatgtgccaccttgcacgcataattttttttaagttttttgtagagacgaggtcttgccatggttcccgggctgtctgggaactcctgggagtcaagcaatcctcctgcctncagcctcccaaagttttggggattgttaaagggatttgttgagggtactgagcctgggcctcttganttgaatttttaactg

SEQ ID NO: 632831 - DNA, 528 bp, Homo sapiens
  misc_feature (68)..(68): n is a, c, g, or t
gaggtggctcacgccctgattagatcccaatactttgggagaccgagaggggcagatcacctggaaangggtttccaagggcggaacgctttcggcaggggcaagggtccaggagttcaagctggtcagcctggccaacatggtgaaaccttgtctagaaagagatttgtttataaagcgaagagagagagaaaagaataaaacaaaaaaagaaaaaaaatttttggggggcctgggcccagtctagttgcagggaagaatcaaaaaagagagggggccctacttacgtacctgatgataacggacacccaaatctcagagttgtgggcgagcggggggacccccaagcgagaacagagggataaacagcgtgtggccggactaaacatgaatgaacccgacggtcccggctgcggacgcatcgctcctgcgcacgagagggagaaaaaccgcggggacacggaaaaagcgggcgcgctggagaaagaaataattcagacagccccacacacacgcaagtcacaacac

SEQ ID NO: 632832 - DNA, 116 bp, Homo sapiens
aatactcaatccatcatcatccttttgctgcttaccttgttttaaattgtactaccgaaaaacatcagaaggaatatgtaattgaaatgagctagatttataactggtctgtatcc

SEQ ID NO: 632833 - DNA, 147 bp, Homo sapiens
cttaaggcctgctgagtggaattactggtataatatagatgaaagggatcactatggcttgcggtatggagagaagactatacttggtagtatgtcaaagtgtggcccagggacactagaaatccctcgagaccctttcaggggtcc

SEQ ID NO: 632834 - DNA, 857 bp, Homo sapiens
  misc_feature (7)..(8): n is a, c, g, or t
cccgctnnagggaagtatcgcatgcaagcgagtgagggacagagcagcgcgtaatgcaccctgctatctagagcaatggacgttgcgctggtccagttggctctatgtaccaggctctctgtatcttacccaggctcttctcgcaggggactgtgttccgctggtacaccaccgcgggggttcccctccgacgtgtagtgccagcccgccttgactttggcactccagcacggttacaggcccggaaaagtgccgaccggtccgtccactcagcaaccccccccattttctgctaacgcccttaatatccctctactgccccatggatctccggaacaaatgctctcaataaaatcattgcttcttcccccttctcaccgcacacatttgaacatttatagtctcaattccatcataatgtccccgccagtcccctcgttcgtatttatatatatcacccgtctcccattatggccagataacccaagacctccctgccgctaccccaggtcggaaatgctcttatatcctgctacgcgctggcataccccaaaatggtgtgccaacaaggcgtcaggtcacaagtttaacaaaacccgaccctcagtactcaccgttctgctcgggcacaaccccctgcaggtacagttgcactcttacctcccccaccccctgtttagtttccgctccaacaactaggcaccgcaccactccacttttaagatttttacacgtgaatcccccagcaatgctagactcttccagcaagatttacaaggaccagtatagtatgtggaacccacggcgccccgccaggggcagaaaccaaggcaaaaaccggatctgcgccaacatga

SEQ ID NO: 632835 - DNA, 326 bp, Homo sapiens
ccgcagttaaagcccccaagaagaaaccatctgtgctgccagtcacccgaaggtgccactcaacgagccctgttggcactttgccaagtggttaaggcagccccttgttttttgaaacgtgaagaagcgatatttggaccacctttcgtcacgagcagtttaaatgccagcagttttagaaccgggttttccccttttaggcaagttaggttcttgcggaggaatccagttagtaagatttttaagggggtttccctccaacccttaattagtttggttttaatggtatttaactttccattcctgtttttggggtttggtttttt

SEQ ID NO: 632836 - DNA, 610 bp, Homo sapiens
  misc_feature (36)..(36): n is a, c, g, or t
  misc_feature (67)..(68): n is a, c, g, or t
  misc_feature (73)..(73): n is a, c, g, or t
  misc_feature (82)..(82): n is a, c, g, or t
  misc_feature (99)..(99): n is a, c, g, or t
  misc_feature (102)..(102): n is a, c, g, or t
  misc_feature (110)..(110): n is a, c, g, or t
  misc_feature (112)..(112): n is a, c, g, or t
  misc_feature (117)..(117): n is a, c, g, or t
  misc_feature (119)..(119): n is a, c, g, or t
  misc_feature (127)..(127): n is a, c, g, or t
  misc_feature (148)..(148): n is a, c, g, or t
  misc_feature (151)..(151): n is a, c, g, or t
  misc_feature (162)..(162): n is a, c, g, or t
  misc_feature (179)..(179): n is a, c, g, or t
  misc_feature (182)..(182): n is a, c, g, or t
  misc_feature (200)..(200): n is a, c, g, or t
  misc_feature (216)..(216): n is a, c, g, or t
  misc_feature (225)..(225): n is a, c, g, or t
  misc_feature (229)..(229): n is a, c, g, or t
  misc_feature (238)..(238): n is a, c, g, or t
  misc_feature (245)..(245): n is a, c, g, or t
  misc_feature (266)..(266): n is a, c, g, or t
  misc_feature (348)..(348): n is a, c, g, or t
  misc_feature (364)..(364): n is a, c, g, or t
  misc_feature (394)..(394): n is a, c, g, or t
  misc_feature (479)..(479): n is a, c, g, or t
  misc_feature (522)..(522): n is a, c, g, or t
  misc_feature (545)..(545): n is a, c, g, or t
  misc_feature (607)..(607): n is a, c, g, or t
tattgttccgtcttgcactttatcggtttggggcangaagacaatggtatcctctgtttagccctgnnccttncagaaggcngtgaatttctccttttnctnagctctgngngtctngnttcggctntggagggtggtccatgcggangtnctcgccagggnccttgctgccctggctnttnagcagcgcgttctggtcntagtcggtctccaccnctgacacgnagtnggtgctgcnccagtgnggactccggtagctgttgganccgagggaccccgcgggctgcagctgcatggttcgggtctcacactggtttttcctgaggaaggtggaggtcatggttgagnccaccatccgtggcangggccaccacagacttgcacatggacaacnccgccttcttctcccggagccagctcgagtcggaggcgagggccgcgctgaaccagcgccccaggaacttgttctgctggaagtngggctgcacggagacctgggcctccggtgctgcctgctggtcncccagcacccccagcagggccanttccatccacagcgtgtgatgagtagccattctcctgcagcagagcgggtgttcggggcctngtg

SEQ ID NO: 632837 - DNA, 270 bp, Homo sapiens
  misc_feature (136)..(136): n is a, c, g, or t
ataagcggatgagggctcagctgtctcttactttaaccagtgaaattgacctggccgtgaagaggcgggcatgacacagccagacgagaagacctatggagctttaatttattaatggcaacagtacctaacaaanccacaggttctaaactaccaaacctggattaaaaatttcggttggggcgacctcggagcagaatccaaactccgagcagtacattctaagacttcaccagtccaagcgaactactatactccattgatcccatg

SEQ ID NO: 632838 - DNA, 446 bp, Homo sapiens
ccctctcaccttcttccacccccatctctgggtctctatctccatcttcctgtgtgtctgcctcttttgggttcagtctctgtttctttttcatctcttggccttcgtctctgatacccggcaccaatgacgtgtccccgtgactaggctacagtccccagttattgaatgaaaccatgactcagcggctgctacgaaggggctttgtagatgtcaagtccacaatcagctgatttccaggaaaagagattggactggagaatgtgggtgggccttatctaatcagtcaaaggtctaaagggggtgggcctcatctaatcagttgaaggtctgaagaggggtgggcctcatctaatcagttgaaggtctaaagggggtggaccttgtctaattaataagctgaaggtctaaaggggaaggggggaagggtgggcttcatctaatga

SEQ ID NO: 632839 - DNA, 373 bp, Homo sapiens
acctccattggactggagtggacttctgggcatgggcaccaggctgacgcttcctgggaagcggatggtccaagtgtgtcccgaattggtgggttcttggtctcactaacttcaagaatgaagccccggaccctcacggtgagtgttacagcttttcaggtggcccgtctggagtctgtccctcctgatgttcagatgtattcggagtttttttccttctggtgggtttgtggtctccctggctcaggagtgaagctgcagaccttcgcggtgagtgttatagctctataaggtagcacttcgggagttgtttgttctttccagtgggctcgtggtctcaggagtgaagctgcagatcttccctgtggaaaag

SEQ ID NO: 632840 - DNA, 215 bp, Homo sapiens
gattcagtgtcagtctccaaaagcaattgcagcaaaaacatgaaataggtaagtgggacctaattaaatgtaaaaatgcttctgcacagacaaaaaaaaaaaaaaaaaaaaaaaaccttcaaaaaaccaaccgcctcaaaaattgggaaaagttttcccaaggctttgtttcaacaagggccaatttcccagaacttcctcaaaaacggtttaac

SEQ ID NO: 632841 - DNA, 100 bp, Homo sapiens
  misc_feature (79)..(79): n is a, c, g, or t
cgggcggccagtgcagggccgggccgaggtccctccgccgctcctcctcgcggtagctcaccgggccgccgctcccggnccagagccaccctcccagctg

SEQ ID NO: 632842 - DNA, 127 bp, Homo sapiens
gtgcccacagaaccctctaaaatccccttgtaaatttaacctgttagtccaaagaggacaagctctttggacaactaggaaaaacctgtaagagagagaaaaaaatttaacacccatagtaggccta

SEQ ID NO: 632843 - DNA, 1318 bp, Homo sapiens
  misc_feature (744)..(744): n is a, c, g, or t
  misc_feature (866)..(866): n is a, c, g, or t
ggagaagagagagaactatgctcgagtgagcgatgccgattctgatttcctgggggctgtcggcgccacattctggatggatcccagccgcctgaggcggaggtgtgggcacggacccaatgacatataaagaaggccgggggcatggacaggctgactttactcaagagaaggcccgaatgggagcgtctgcgcgggttgactcaatagtgtccatggtgatgcacgatgcgtgactactatgcgagctggcacaaggcgtggtcggcgtatgatatgctcgagagagccccctaatgttaccatgacatgcatatccttacgatgtgtggcagctggtgctcactcaggaaatcaagagggctgatcaaaatggaagatgagaccacaaggtgcctatgcagagaaggctgcatctgcacgttcttcattgcaaactctccgttcggagtttgaccctgcagtacctctatgataggcaacgatccaaaaagatcgccttgccgcactcaaacaagtagcgtcctcgagcttcgatccaaggctctctcctaatctgcccataggagaggcttcaccgctggtacatggaagctaggcgtatgagtgagacatgactgcgtaccaaaggccagtgggctgaaggtgtgcacacacagtgcgaagtgatagcaagcagcggagactctcagcgttgtctccgaggattgactctttacaaagctccctttgactttgcgactncagatgtgtgctcaaagggccaccgtttagccccccgaaatgaatactctggtaataaggacggggactctccttttacttaaccagtagactgacttcgtgagtcactcttcgagtaagcnggacaccacaccgcgttgttgtcacaaagcggcaacgagtctggagaattaggagcgtttcagggtgaattggaaggctccttttcccccttgtgttggagtcccatgtcactccccaaagagacaggaaatagggggcgacagttggcaacaccggctgggtgcccgaaagcaccaagccgggccatttgtcctatcgagtcaccgaaaaagggcggcttggttgcacccaagttggcttgcccccgtaccaagggtggggaaatgggggatttgggacgggacctcttggtcgccgggaggaagcggccttatttccccttaaaccaagagataccctaattatactcttttgttgggagagtggaaccacaaaaccccgaagatagagaccctccattgggcttcccttccaatagacgggtggctccccgagccggaagcgtgttagg

SEQ ID NO: 632844 - DNA, 452 bp, Homo sapiens
  misc_feature (291)..(291): n is a, c, g, or t
  misc_feature (400)..(400): n is a, c, g, or t
  misc_feature (428)..(428): n is a, c, g, or t
ctctagatagatatccagtagtgtaattgctggatcaatggtagatctacttttagttctctgaggaatctccacactgttttccatagtggttgtactagtttacattcccaacagcagtgtagaagtgttcactgttcaatgcatccacaccaacatctatctttttttaattttttgattatggtctttcttggtcgtttgaaagaagaggaaaaaaggagtggattgttgtcttctgctctcctgccatatgaagacaccagagttcatctcgtttgccttctttcntctggcatgtgaggatgcacaagaaggggcccaaccagatgccagtggctggaacaatggatcctagacttcctaccactcaccctagcattacttagatggataaggncccatacccattacaatctccagcaatncccctcaaacctaaaaaaaagaaa

SEQ ID NO: 632845 - DNA, 187 bp, Homo sapiens
acggtatggattcccatgcggggaagaggtggttatgacagaatgcctcctggtcggggtgtgcgtccatgcctccatcatagaagagattatgatgatatgagccctcgatgaggacccacctccccctcctcccggacgacgcggccggggtggtagcaaagctcggaatctatccatctacctc

SEQ ID NO: 632846 - DNA, 194 bp, Homo sapiens
acaagcatgacatctttgatagctccaagtataaactacaaattcaaatccagacgatggtactatagcatgactcaatatgtgtcattattgcgtgcctgtagtcccagctaccaaggaggctgaggcaggagtaatcgcttgaacttggaagatggaggtttacagtgagccaagatcgtgccattgcactc

SEQ ID NO: 632847 - DNA, 205 bp, Homo sapiens
  misc_feature (44)..(45): n is a, c, g, or t
  misc_feature (73)..(73): n is a, c, g, or t
  misc_feature (92)..(92): n is a, c, g, or t
cagctaattttgcatttgtgtaagatggggtttcaccatgttgnncaggttggtctggaactcctgacctcangtgatctgcccgcctcggnctcccaaaatgctaggattacaggcgtgagccacggcacccggccagtgacttttaacttcagtgatgaattcaaaatctcttacagagctctcttacgctctggtgcgtgac

SEQ ID NO: 632848 - DNA, 1024 bp, Homo sapiens
  misc_feature (176)..(176): n is a, c, g, or t
tcttgcgtccgggcgcggcggagatgttcgttatttttcccaaaagtggtccccctcgtgtgttcttttgtcccctctggcccccccccgaatttgtcgccgccgggtttccccctctaggtgtctccagtcttctcttacagtgtgttcccgttcacgcgcccttagggcggccntgttgtccttgatactgggacccgtaccagtgttgtgtggcccagctgacccttccttgggggtcctggcccgtcactactgatggtacgccccacccgccccgcgcctgattgttagtgatagcctgtgcccgggccactccccctatgggcgggcgccctgatttattagggtcttttctgttctcaagaggttgagaaatggccgctggcccccctttttgccccccagggcagaaccccttatcaccccctctatgttcccccctaactagttatttatttggaacccctcagcctattctcatttgcgacccatgatggccccggcccgctatacgtccttaccgcgcttacacttttctgcacgggccaccctatgctcatggcaccctctatttgggtagggcgcccacccctctgcccgttttctctacccttaacctttcccctcttaccacattatctatcttttcccccaagttattaatttgttcctgagctatctcctagaaattctccttgttcgccctttatctccaaacctaccgtttttctaccacatttttaataaaccctcttaccctgcgacacgaccccaacaccatttaaaaaaaaaaaaaaaagggaggcccgcttctgcgattcttagaacttagtcttgacatctttataatactgcctctatcttgatttataagccaaacctggaaaacctaccaaataagtgttgtggtttatttagaaaaatatgggaaatattgctgttatttttggtgaagaaaatccattttgtatagtttatttccatcttaattaaatgtgaattttgtttaaagcttaggcca

SEQ ID NO: 632849 - DNA, 350 bp, Homo sapiens
  misc_feature (5)..(5): n is a, c, g, or t
  misc_feature (32)..(33): n is a, c, g, or t
  misc_feature (42)..(42): n is a, c, g, or t
  misc_feature (47)..(47): n is a, c, g, or t
  misc_feature (81)..(82): n is a, c, g, or t
  misc_feature (86)..(86): n is a, c, g, or t
  misc_feature (98)..(98): n is a, c, g, or t
  misc_feature (101)..(101): n is a, c, g, or t
  misc_feature (111)..(111): n is a, c, g, or t
  misc_feature (123)..(123): n is a, c, g, or t
  misc_feature (130)..(130): n is a, c, g, or t
  misc_feature (179)..(179): n is a, c, g, or t
  misc_feature (193)..(194): n is a, c, g, or t
  misc_feature (213)..(213): n is a, c, g, or t
  misc_feature (224)..(224): n is a, c, g, or t
  misc_feature (226)..(226): n is a, c, g, or t
  misc_feature (231)..(231): n is a, c, g, or t
  misc_feature (241)..(241): n is a, c, g, or t
  misc_feature (258)..(258): n is a, c, g, or t
  misc_feature (264)..(265): n is a, c, g, or t
  misc_feature (268)..(269): n is a, c, g, or t
  misc_feature (299)..(299): n is a, c, g, or t
  misc_feature (303)..(303): n is a, c, g, or t
  misc_feature (322)..(322): n is a, c, g, or t
  misc_feature (328)..(328): n is a, c, g, or t
  misc_feature (350)..(350): n is a, c, g, or t
actcngggctgtccaagcctctgtgcacctgnngtctctttncaccngcacttccctgctttgctaccatcgcggaagaanngacnggcgggggaganggngggtgggctnagggagaacggncagagtngccagaagatgcagagagaagccccacccggatctgagtattccccacnggcactcagccacnnggatgaactagtgtttgtngtatcctcgcngntatgngacttaacgngactcagagatatctangtacgnngcnnactccgccggcaatgaagtaaatatatcanttcnccgaagctcgtgtgtcttntctaangataaaccatacgttccttagn

SEQ ID NO: 632850 - DNA, 114 bp, Homo sapiens
tgggcgcatgcaggtcagcgcagctcgagggcacgaggcgcaggtgtcaaggccaagttcaagaatgggacgatgtgtgacggtggactacacacgcaatgcggaggccgtgct

SEQ ID NO: 632851 - DNA, 135 bp, Homo sapiens
  misc_feature (66)..(66): n is a, c, g, or t
gcacatgcctatcaatatagtaaaaccagcccatgaaccctaacaaggggcctctcagcctctatnctccggcttagccatgtgatttcaatttcactccataacggtctcatacttaggcctacttaaccaaca

SEQ ID NO: 632852 - DNA, 372 bp, Homo sapiens
tacacgatcttcccgggggggcgccgggggcctcccactgtgttctacatcttcgtgatgtctctgtcgagcgtgctcagacttgagtcaagctcaatagggtgttctttccccgactgtttgcggcccgctccgtttcccttggttgtgattgcgatggctctggcgtagggacagtgggaatctcgttcatccattcatgcgcgtcactaattagatgacgaggcatttggctaccttaagagagtcatagttactcccgccgtttacccgcgcttcattgaatttcttcactttgacattcagagcactgggcagaaatcacatcgcgtcaacacccgccgcgggccttcgcgatgctttgttttaatt

SEQ ID NO: 632853 - DNA, 119 bp, Homo sapiens
tgtcatactcagcatgatcattgcattgattgtcacagcaagatcaaataacaaaacgaagcatattgccgaagagaacttgattgacgcagcatttcaaaatctaaaactgcggtcga

SEQ ID NO: 632854 - DNA, 709 bp, Homo sapiens
  misc_feature (582)..(582): n is a, c, g, or t
tcgaggttgctgatcccccctagccacttctgatgatgcctatggaagtcaggcagcaggagggagcttcgccctgagcctcatcgcgtcatgaatgcttccccagcccctggaacaacagcagaagaggccatgtcccgaggttcacctcctgctcctgaggggggctcccggtatgaacaggatggacgcttcaactgatacacacaccttgggcatgtgcagtctccccaaaatgggtccctagtctatccacgcaggcatattcagagccagcgggacaggtgaaatcgccagacccctctgtgagttatgcctacctcaggtggtatgtctgccatgagaacgctgagacgatgccggtttagggtgcccagatgcttctctcagatgctgtccagccggggcacgctaaggcagtcggatcgtctgcccctgagaagccccgagagcctgtagccgtggacctggaggcaccagaggttcaggagagctacaggcagcagctccggtctgatatacaaaaacgactgcaggaagaccccaactacagtccccagcgcttcccaatgccagcgggcntttgctgatgatccttagctctttgctctatggcccttcctcatcaggggaccgtttcccccctcttccttcacagtatttaagaaataaaagtcggatttttaaaaaaaaaaacacacaaaaaaaa

SEQ ID NO: 632855 - DNA, 176 bp, Homo sapiens
atgttggcatgctacctcatcatcttactcatcttaagcccgaggcattgatcaactaggagcccatataaatgaggctcagtagggctgacataatctccaaagaattctttattcagtgtttcgcttgtgtaagcatgttgctatgatggacaggtccccctcctccatactag

SEQ ID NO: 632856 - DNA, 305 bp, Homo sapiens
accgttttagcacgtggtactaatctttctttcgttttaatcccttcttttcgggaaacaatctctcgtgctgtctcccgggctgagtgcagtgtgcagatctcggtaacatgcaaccatcggcctcccaggttctcgagattctcctgcctcagcctcctgagtagctaggattacaggtgcacaccaccacacccagctgatttttggtatttttatgtagacttggggtgttccatgtattgttgggccagactgggtctcaaacctcctcaccttgactctcattgatccattccaccttt

SEQ ID NO: 632857 - DNA, 196 bp, Homo sapiens
ctgacgatacccacacagtgggcaggagctggcgatacccaccaggcatgggtgctggacgctggcgatacccccaaagtggcaggagctgcgatacccaaagtggcagagctgcgatacccaacaggggcagagctaacgatcccccaacatgtgaggtaggagggtccgagtcgaatcgtaacatggtcatgct

SEQ ID NO: 632858 - DNA, 331 bp, Homo sapiens
  misc_feature (256)..(256): n is a, c, g, or t
  misc_feature (286)..(287): n is a, c, g, or t
gatgtgtagagagaagggaaatagagagcgagtgtaaactggtatgtagtttctatggagtgataaaaatgttctggaatttgccaggcatggtggctcacacctgtaatcatagcactttgggaggccaaggcaggtggactgcttgagctcaggagtttgagaccagcctgggcagcatagagagacctttgtctctacaaaaaaaaattctttttaattggctgggcatggtggcatgcagctgtcatcccangccatttgagaaggctaaacgtgggagganntcccttaagcccaggaagttcaacggcgtgccgttgcagctttg

SEQ ID NO: 632859 - DNA, 1297 bp, Homo sapiens
ggcctgtcgccgactccttgccttggagctcggtgatgtatcgagggactgcggccacacggcacggaatggctgctcctctcgctgccccggccgacagctcgcggccaggccgctatctgcgcctgacctgtttccatcatgagctgccccctggaccctgccgtgccgaccggacgtcgaccccggcagtccggactaaataacaccggaaacaccgggactcggcgacaggccgcggccgggggacggacggacgggcgaccccggcccggcgaccatcgacgacgcctcatcggacccggcctcgcgctgcactccagacccgtggaagcccactgacccttcggcatagagccccacgcgccaaggaatccggcgtccctcgcggtgccacaccgacgccgcaaccccgacgggccctcccgagcaaacgcacgcacggaccacatgcgcaacccggtgccgccgcgcctgggccgacgcgccgcgctcggcccccgagccacagccacggccgaccgaggcaacgaaaacgcccgccaacaaccgcccggccccacccgacctgcatggcaaggcaaccgaacccaacccaccgccaccgcgccccacctcccccagctgtgcccaacccgcccccgccctgcagccccctgcactgcccccgcggcaacgctggcaacccttcgcctcggccgcccctcccccccgtaccccccgccgcacggcgcctccaccccccctccacctccctcggcggcccctcgacccctgtcccccacctctcactgtctcggcccctctcaaccccgtcgtgcgcttgcccccgcactccgctccccacctcgcaccccacctcggccgccgccgccagccccgccccccgccccccgtaaccgaacttccccctccgtgccgacccccctgcaccccctccgcccacacccgtgcccgcgcccccgcccctggacacaccactgggcctcaccctccacgcgcaacacccctccccctcaactggcccctgcccactgtcccacggccacactgcttctccttccctcccgccattgacctcttcccgcccctgctccaccaccgtccccaccgttggcccaccccgcccccgcccccccccccacgcctgaccaccgtgccgggcccctctcgcgccctcggcctgctctcgccctggctcaccccttcccgcctgcgccctcccctccccacgcgggcctactcccccctcgccacaccgcctctcgcccatctgctctgccccctcttcgctcag

SEQ ID NO: 632860 - DNA, 204 bp, Homo sapiens
agatatggaccgacatcataccacgcagggatgtggaacgttcagccctccttggcttactcggagagatgatacctaagctgaattttaaggagacatgaggagttcacttcgtagcacagtggttaatgaatccgactaggagccatgaggttgcgggttagatccctggcctcgctcagtgggttaaggatccggcgttgc

SEQ ID NO: 632861 - DNA, 181 bp, Homo sapiens
atttttacaaattcgttttacagctaacatcatcttcctccttgataactacactgcatgacaatgactttgaatgttgcatcatgtattcctaagataaactccatttgtttagtcagtcctaatttgaaaatgagaatttgttccaatgggattgatacattacggaacaatagcagag

SEQ ID NO: 632862 - DNA, 813 bp, Homo sapiens
  misc_feature (725)..(726): n is a, c, g, or t
aaagccatctatgcatttgtgcctcgaatacgcctccttgactcagccgatggcgactccgtcgcgcgcctcctccggcgccggggactccgtgaagcttgatacgccagagtcccgtgaagctctgcgtcgtttcatttttaatcccctgacatcgggatcaccggtcgtgccccaccagtgtcaggacgcagccgtagacaccagctccgaagatcaccaccaaggactgagaggagaagaaggaagtagtggaagaggcagaagaatggtaagagacgcccctggctaccggcgaatgcctaatgcaggaaaatggaggagcaggcaggctgcacaaatgcaggtcagcacggcaggaacacaagcgacgcaagggtgcgcgcgcaggaagcagcgcagcgcacggaaagaagcacacgtgaatgggtgcaggcaacgacgcgactggaggatcgcaccatggacggacagctcgaggtcaagcttacggggcacagctgggcaagcatgacaggatgatgcacggcatgaccgcatgctcgatacgcaaggacaggcaggaaggaccggacccagggatgactagacagcccccaccagggacgagtttaccacgtagacaaaacaccagagcagggcccgacccgtgcacccatatttccacgccgatgccaagtatacaaggattataaaaaaataaaaaaaaagagggaaaaaagaanngggagggggaggaggagtagagaggaaggggagaggggggggagaaggagggaggggaggagggggaagagggagggagaaagacgt

SEQ ID NO: 632863 - DNA, 84 bp, Homo sapiens
gacagcagcttctacatctgcagtgctagcccggggggcgggtcctatgagcagttcttcgggccagggacacggctcaccgtg

SEQ ID NO: 632864 - DNA, 962 bp, Homo sapiens
ctgctacacgcctgtgtgggcagcatgtctggcaacaagcggctgctcgtaagctggggaaatgccgtgctctgtggtgcctggtggcttggctgctggggtgcctggcaatgcgcgctggcgaaatgtgcctgactctgctggttgtgacagtggtgcaaatccaattgtgtggctggcaagatgaatgatgtgagatctccagctgactctgagagcgagagcctagctccaatggaatgccctgacgtgaaggagggatgtgatgggagtgatgcttgtgatgtgaaacttgccacagtgaaaatgaaagcttgctgcttgtgccaaatgctctacctagagcatgctcctgtcatgcaatgagtgatggacgaagtgcttgagcgccctgtgcatttgatctgatgtgaccatgtgtgggctggggctgccttgaaggcgatgggattgtcggcttgagccatgatgtggtgcctgtgcttgcaataaatggttggtaggccaaaatgacgatccagtgccccatgcctcatgctgacaattactgctgttttactggggggcaaccagcatctcctatcaacattgttttggtcgtcacaccccgattgactcaggccatcttctcttgcttgcaaaagacttgcagacatcattaagtggatgcgtggagagttggacggaatggctgcatgtgattcctcgagccaagaagcgcgtgccgagggaaagccccctgtgccacatgcagcaacgtcctctgacatggccatctccttcctgacggaagtacctttgcctctggtaaacgcagcaacgctcattctcatttgggaggccagaagcttgccagacttgtacaccttccacaggacaccgggatgcggtgtcggtcttggcataccgagagcaccacaagatctaatcacataccaagaactcgtcgtgaacgcgtagca

SEQ ID NO: 632865 - DNA, 220 bp, Homo sapiens
ggagggcttgatcacatggtcagtgtctcacacggcctaatgcacaggtgaggaggcgcagggtcggatctaaatccttgtggactctgagcacacattcaatctcacaggagataagggacttctcaggtagaagcagcgagaatttatccttggacacagctcaaagatgatcccaaaaaatgctaccctaaccccagtattatgcaccgattactgg

SEQ ID NO: 632866 - DNA, 195 bp, Homo sapiens
cgagccttaatgttatcaccaacacctcccctttgttatattgtcttaagtggatcagcacatagtcatgcacacagatatgatgtctaacccagtaactgttatggtatttatttgtatacaatacaagggtcatgacacattcttgtgttggtggataacaatcacggggtaccgagactcgacattcggtaa

SEQ ID NO: 632867 - DNA, 185 bp, Homo sapiens
gatctcatacaggatccccttcgtcgaagaacaacggcatttacaatcgaacacagactactgccctcagttagaaatgaataaacaatttttttagtgctttatttttaactgacagcaaattgaattccttttatgagatctgtggctatttgactgtattatattttagctctataaaggta

SEQ ID NO: 632868 - DNA, 810 bp, Homo sapiens
  misc_feature (765)..(765): n is a, c, g, or t
ggacgcgtgggctttccaaaaaacacataatttgaatcaagcacaagcacccgacagactaattattagcatcatccctctactattttttaaccaaatcagacagaacaatcctatttagcatgttccccaaccttttcctccgacccccttaatcaagccccccgtcccgtaagttactaactacctgactcctacccctcacaatcatggtcaagccaacgccacttatccagattgaaaccaatatcacgaaaaaaactctatctctctatatctaagtctccctacaaatcttccttaattataacattcagcagtcactgaactaatcatattttatatcctcttcgaaaatcacacttatccccagcctggactatcatcacccgtatgaggcaaccagccagaacgcctgaacgcaggcatcatacttcctgatgtctactacctctaagtgaggctcccttccgcgctggactcattcgatactaattgtactactcacaactaccctaggctcactaagacattgctactgactcactctcactgcccaagaactatcaaactcctgagccaagaacttaatatgactagcttacacaatagcttttatagtaaagatacctctttacggactccacttatgatccctaaagcccatgtcgaagcccccatcgctgggtcaatagtagcttgccgagtactcttgaaactaggcggtatggtataatacgcctcacactcattctcaacccctgnaaaaacaatagctaccccttcttgtatatcctatgaagctcacat

SEQ ID NO: 632869 - DNA, 296 bp, Homo sapiens
atagctactccagcctgggcataatgagctactccagcctgggcataagagctagactccgtctcaaagaagaaaaattcccactgaaggcgggttgcggcagctcaacgtctgtgatcctatctcctttgggaggctgcgtgtgagaggactgcttgaggccaggagttctagaccacctgagcaacatgacaagatgcaccatctctaaaaaaaataaaaataaaaattcccactgatcttagccctctaacaagctcttattggccaggagctcttattgcccaggctggagt

SEQ ID NO: 632870 - DNA, 301 bp, Homo sapiens
ctcttagatccccttcgacgggtgtgctgacactttttaaaaatacggaaaaacctttgtacgggtagtgtatctagagcaggcaagggagcatgtcttacctggtgttgaccaaaagggcacccatcagagagacagttgcaatttcagaagaaaacaggattctaggcaaaactaactggtccacaggagaaaatgagagattcgatttggttgccaggcacacttaagccctggcaagctatgtggcaggaacacaagaggtctctggggaatggggaggaactgcggtctcgctgaa

SEQ ID NO: 632871 - DNA, 404 bp, Homo sapiens
  misc_feature (10)..(10): n is a, c, g, or t
  misc_feature (33)..(33): n is a, c, g, or t
  misc_feature (84)..(84): n is a, c, g, or t
  misc_feature (106)..(107): n is a, c, g, or t
aaaaggcctntatgtccaggacaaccgggaganttgaaaagaccggcaggccaatgagaaaaccccgcgcccaaagctttcccncggccaaagagggacagggccnngggtgacagggacagagagggcttctggaggaaaaaagaaaaaaaaaaagatccaaagctccagctgaccgggccacatcggcctggaagccgggcccataatgtcctctcggcctcagatgtaccgtgccaccggtgacagggacaagagggcttctggaagaaaaaatttaaaaaaaaataagatccaaagctccagctgaccgggccacatcggattggaagccgggcccataatgtcctctccgcctcagatgtacagtgccaccggtgacggggacaagagggcttctggaa

SEQ ID NO: 632872 - DNA, 195 bp, Homo sapiens
  misc_feature (64)..(64): n is a, c, g, or t
cgctccgcttcatacctgcccatggctagatcactccgcttcgggtcttgagctgtgctactgncttcgccctattcggactcgctttcgctacggcgttccccactcgggttaacctcgcaacacaccgcaaactcgcaggctcattcttcaaaaggcacgcagtcacgagagtggagcaagctccactccgac

SEQ ID NO: 632873 - DNA, 602 bp, Homo sapiens
  misc_feature (48)..(48): n is a, c, g, or t
  misc_feature (305)..(306): n is a, c, g, or t
gagcccgccccgcaacatactcaacatgaggcacgagagtgagaggcngcaagtcggaacttttggcccactggctgaaataactggaggggcaacccaaaaactcttggaaattttcaaaaagggggggacccaaccccctgttttaaaaacttggggtttgggggttaacaacattttcaaaaagtgggggccgcgaggaatatataaaaccccaacggaagaagagggggtgtgggggggaaaaaaaaaccctttgggggaaaaaaaaaaaaagggggggggggggttttaaaaaaaaaaanncctctccccccccagggagggtttttttttggggaaaccccccccccgccctggggagggaggggggccccccacaaagaaaatttttttttttaaataaaacccccccccctttaaaaaaaagaggagagagttttttttttcctcccccccccctttgggggggggggagacgcccccccccccccctccttttttttttttaaaaggagggggggggaacaaaaaaaaacccggggggggggggtttttttttttttttatgggggttttttctcccccacccgcgttgtttt

SEQ ID NO: 632874 - DNA, 173 bp, Homo sapiens
aatgcgcacgccagggcacagcaccttaccttgaactaggctatggcgcacagatctgtgcacgcgtgttcgcgataacccgcgctccaccattaccgtatagtcgtgcccacatccctctctccgacatggtagagatagtgctcgatacatacagagagacccgggcggcg

SEQ ID NO: 632875 - DNA, 322 bp, Homo sapiens
  misc_feature (268)..(268): n is a, c, g, or t
tatctctaacattatgatatcataatggcatttcactcattttccttttaagggaaataaatacagttaagatatcataaagtttgggatgctagaaacctatctgcaacaccgaagagagtctctaactctttagattaagtttcatttcagagggagtttcttgaagacaattagatgcaaatagccttctcacaattacaacctcattgtaatttctggactttgattccagtgtttgggatggtttgggcccctgggatggggntgatggtgcatagggagagaatttgttttgttcatttcattaatgtagagaata

SEQ ID NO: 632876 - DNA, 191 bp, Homo sapiens
tatctcaaaggtactggctgggactatgcatagagcagtccggtccaaaaaacatctgtgtatggtttcatctaaaaagacacgcagtataggaaacactaaaaacgtgttaaactttgtcgtgatattgcattcctgtacttgacacactgtcatcacagcaaaaagtttaagattaggtaatgaaatat

SEQ ID NO: 632877 - DNA, 138 bp, Homo sapiens
agggaggcagaggctgtagtgagccaagatcacaccatcgcccgtatttacttttctttctttctttttattttttttttggaaacaggttctaactcaatcgccggtactggaagtgggatctcctctaaaattcac

SEQ ID NO: 632878 - DNA, 357 bp, Homo sapiens
ggcacagaatctacaatgccccaggatcgaagttgcctctagttgccctgttctatctctccaccttgtttggagtaaccagttccttcctgctttggaatggggcaatacttcttactctacactacgccacaggaagtgtctctggcaccacataccactggactctgctctcttctcagggtgcaacatattaatatgcctgctacccgctgggcttctgtgtctgaacggaccgcttatccagaaaccgtctcaaatggtcaaggatttcatggcaattgctatcgccaggtgagtggcacagccaggttgtaacacttttcattcatctctttagcctacatcttccttaca

SEQ ID NO: 632879 - DNA, 396 bp, Homo sapiens
tgggcacaggaggatgttattttaaggtgtgcaccggctgagtggattcaaatccaaaaagctgagcattaaacaaagacagagcagggtttttataagtggacttacaaaagtaaaacaaaagcagttaatcatatagtgcataacttgtggccttgcatagctggtggccttggagctgtgtcaaaagaaaatcaagaactggctaaatacagacatttgtaaaacataatcatgcttaagaagccagggaaaggagtaacagtaaaggaatttgtcttcttcttttttttttttttttcccttacaaccttgtcctagaggggagggattgtctgggaacccattctttgggactgggtttctcaaacaactatatcttcctgtgcgcaagct

SEQ ID NO: 632880 - DNA, 352 bp, Homo sapiens
aatttggcactgaggggtggttgttatttccgaagtgggggctgatcttgcactatggaccttggcagtgttacacaagatttgttgactcaaggctgagttatctaagtgtgtccttcaattggtgttgcataagtagattaaccagactgaattatagatcgaatgacatcattccctgctcaggaaactgcccctggtttttcacttccatattgtggccctgtcctaccattctagcctcccacttttttcccctaaaggaactatgttgacatttgggaagagtgtggggcaagaagcctggcactgcagaacgtctcctttctcccttccttctttctctttcttt

SEQ ID NO: 632881 - DNA, 161 bp, Homo sapiens
gtctcccacttaaggcatccgtggttgtttttaagccacataaaagccacacccaagatcacctgacacccaccctgtcaagtgtccatgatgctgggccctgaggagggtgaaggctttgtggtaaagctccgtggcctgccctggtgcctgctcttgtt

SEQ ID NO: 632882 - DNA, 744 bp, Homo sapiens
  misc_feature (584)..(584): n is a, c, g, or t
gaggcatctcgtgaagatgaaccacttgcttattacgacgcagagcgcaactgagatgaatgacatcagggaaccacagctgtgggaacaatggagtaacttacctgctaccttgtttagtatagaagcgagcatactcgatgtggtcttgagacagcatacagacgctattactgtagttgtgccgtagtaactgtcctcctgatcagaaatgactactcgcacttgtgtgtacaccccagagataattctcgtacacagaaagtggtcatctatgtgcagagacaagtataaaattgccaggtatctgaacatgaggtgcccatagatcaggttgtctgtgacatgtgtgaacctgtttgtaagcactcgtatggggtggcagactctgtgtataagaacactatgaggacttctggctgcgctctctatctgagctctgatggagagaacacgtctgaagagggacaccaacacacgtgctagcacaagggagcgtgcccatatataagatcgtgttctgtggaaagggccacacaggcgtatctgtagatttaacattcccacgcacaggtgcacatatntgctggaatatcgctcctgtggaaaaatttcacgtgatgccacggcccaggtcattctatgagcagagtgggcggaccaaacatttaattattgaatatggccgacaatgtgcacctgctgctggacatatagtaacaagttgttgaggggtcctctctt

SEQ ID NO: 632883 - DNA, 456 bp, Homo sapiens
tagaggatccccattggatagcggatagggcgcagtatgctcatcttcttgataatgcaaaagcttgggacccctcgctggttgaaagaagcattcttgccctctctatcagtgttgcatcattcggggtgtcaccttgaacagactgaactacctaaagaatggtgtgctaaagtctgccttaaaatcttgcatggcccatgaccccatctccccagtgctctctgatcctcatcttggacgccgtggaccagcgggtcctgaagtgtcctggccaccgtgaagcagtgcaccgacccagtttgggcatggacacagtaactggtggaaggacaggatgcctcgtctcacacttgtaattctcgacacaaaataagtgaacattctttttacaaagatagagaaacagcacaatcaattccaaatggtatgagatggattgggagtggacagcag

SEQ ID NO: 632884 - DNA, 113 bp, Homo sapiens
gatccacgtttaatactgcttgtctcggctggatgatccactttaatactagctatgtctcggctggatagatccactattaatactgcttgtctggctaggataatccactt

SEQ ID NO: 632885 - DNA, 377 bp, Homo sapiens
cgttcaggtgacacgatggtgtataacattcctacgcccaggaatgatttcaaacagcatgaaaacattattttccttatgctttacaaagacttactctgaatcacctgatgtcaggagtacgagacatgcctggtcaacatggccaaatcccatctacattataaacacaaaaattagccaggcttggtggtgcatgcctgtagtcccagctacttgggaggctgaggcaggagaatcacttgaacccaggaggtagagggtagtagtgaacccagatttgcaccacttgcacatacccagcctgtggctgacaggagactactgtatcaaaaaaactacactaaagacttactactacacctgacgctagtaaa

SEQ ID NO: 632886 - DNA, 570 bp, Homo sapiens
gtagcccatcaaagagctacagcatgcagtttgtttaaagtgattgtctctacggagaatctgatcgagctatacgaaaatctgtactagttattatactgaagctagtattgagctgcactttaatacacattcttagcaaaactattgcctgatcacacatacacattccatacgcattattaaaggatagccatttatcttcatcttcatcctcttcctcctcatcttcatcttcttcttcctcctcctcctcctcatcttctggttcgtgcttcttctttgagcctgttggcctgccagggcccttcttttcctgtattcacttttgcacttggcacgatatgcagcaatatccttttcatatttctccttaaccttaactgcttactgtacatatggtcggtggatctattggctgaacgctcagaccacatttcacccaatgactttgcagtatccccaatggataggccagggtgttcactttggatctttgggcgatgttcagagcacaacaggaagaaggcagatggtgcctttaagagcatggggtctttttcttccctt

SEQ ID NO: 632887 - DNA, 272 bp, Homo sapiens
aagggaagtcatcaagtatctgtgctgaccaggatcccggtggacatgggggctagcatgccacttgaggggtcagagagtcttaacagagtgctttaggggattagccgctgacatagcacaggctaaggtggcttaggaagcattatgcaagactacgcccaggacgccaagcttcggtattcattgcgggtgtatgtttacataaatgtgcctgtatatcgtcagtttatctttccaacacaggtgggaggcaacaagagattctcctt

SEQ ID NO: 632888 - DNA, 163 bp, Homo sapiens
ccacctcatctgcatctcgtagctgttactccgaagttccctcaggatagctggcgctctcgtgaacccagggcacccgcgctacgaagttgtatccggtaaagcgaatgattagagtgtcttggggccgaaacgatctcacctattctcaaactttaaatgg

SEQ ID NO: 632889 - DNA, 1017 bp, Homo sapiens
ttatttcgcccaccggtagtcaaggatctcataggtttacgctgccaccagttttcacgcttacgcgcggcctccagggtcatcattgaggagggctgacggcttctccatcgctatattaggcctcatctgggcccaaccacgtgaaaagcttgcaattatcatggcttgggtctccaagcaacttctctacctgaccctcgctcctgggacagcctttcgggaggttttcttggcctcactagagagggatgtggaagtctgctgtacccccgtactaaggtagaaggtattctacagcctggatggagggagttgacggcaaacatgcacatccagtgcaccaagcggtgacaccgtaggcatctgctctgaaggactctcctgtggctctggctgccgtatattcgtagagaagtttgccacctggaccaatacaggaattctcgatacctggaggatgtgaggctctggaaaggaagttctctctggacagacctgcttgacctaacgtcatgcgtctactggacttacaggcgaccaatcatctcctcccagcgcttctacaaggagaacctgggacagggctggatgacccagaagcatgatgcggatgaaggtctatgtgcaccactggcttctctgccttccctctttgagatattgcacacgctctgaaaagtgggtgaggttcaagtacccaaagctcatctcctattcctacatggttcgtgggggccactttgcggcctttagaggagccggagctgctcgcccaggacatccgcaagttcctgtcggtgctggagacggcaatgacccacccctctccccccgcctgccacctcccgcccacaagtgccctccaggcttttcttggggaagataccaccttttctgaggaatgagttgcctccgtcacctgccatgtggagcaaacgctaccccctcaccccttaaagctcagtcccaacccccactccgttagccacggcatgcttaacgtttctccggctc

SEQ ID NO: 632890 - DNA, 902 bp, Homo sapiens
gaaagaggcgagtaacctgatgcaaaggtggctctgcagcataattgaggcattgtatgagctgtggttgtaacgactctacaagatgggtttccggaagccgtcagttcttgtagaactcatcaagttgaagctgtaccaacactagctctgcaaagtgatggattgaaagcaaaatctggttgtttaaggagatggacgaagaacacttgaagaggagggtgaaccagttggtgaagaagatgtgggggtatttttgggcttcgaggtgaaagatggccctgggggtaaagagggcaactgggtgggtggatgtttaagaatggtcatatgatctgtggcttcctatcgtcagataagaagggtgactgtccagatcacatatggctgactcagacttccgtgggatatgtatgagcctggctaaaatgaatcgctcagtcggtcttctttcaaggcaaattcgaaaatgcactgtgcaacactgggtgctcggcgtatgatagttacccaatctgcagtgttcaagcatgcaaagtgaagctctggaagaactcgcttgggtacttttgacccatccggatgcagattgtagaactctatccatacttctgttgtccgagtttagactgaaactaaacatggcaatacggggataatcgctcttacgcgggtgacaaccggataccatgcctggtgaaaaaaccggaggttacacggcgcggatgcctcacggcttcaaatcatgcggacaaggcgggcgaagagccagaaacacgagagcgaccacagtttcacaacgtgttggcaacaagaaccgcgacacaaaacggggaaacaacaggatgacacaacacactaaagaaacagaccaaacagaaagcctgtccgacacacttcgg

SEQ ID NO: 632891 - DNA, 391 bp, Homo sapiens
  misc_feature (65)..(65): n is a, c, g, or t
  misc_feature (67)..(67): n is a, c, g, or t
  misc_feature (79)..(79): n is a, c, g, or t
  misc_feature (84)..(88): n is a, c, g, or t
  misc_feature (92)..(93): n is a, c, g, or t
  misc_feature (99)..(100): n is a, c, g, or t
  misc_feature (102)..(103): n is a, c, g, or t
  misc_feature (130)..(133): n is a, c, g, or t
  misc_feature (136)..(137): n is a, c, g, or t
  misc_feature (149)..(149): n is a, c, g, or t
  misc_feature (164)..(164): n is a, c, g, or t
  misc_feature (357)..(357): n is a, c, g, or t
gtttgcgaactgcgggtggactgtgtagtgaccggcgtccgctgtctcgccccgtggcgggtgancnagggtgcgtggngcgcnnnnncggnnaacganngnngtgcgggcggggcgcccgccgcagggnnnntgnnctcctgcgcgancatcgacatcgaggncgccacgcagcacctgcgggacatcctcaagctggaccggcccgcgggcggccccagtgcagagagcccacggtcatccagtgcctacaatggggacctcaatggacttctggtcccagacccgctctgctcaggtgatagttcctcagctaacaagactggtctttggaccatgccacccattaacctgctngagaagcaggtcatctgtcttttcggagatgata

SEQ ID NO: 632892 - DNA, 566 bp, Homo sapiens
cccaggaaacagtatgactattatgcacagaacagcaaaaagaacaagaaaacataaagtcaaatgttcaacaaaatacacctattaccccagacaccagccctgccatgcagaggcacggttgctccaggcttagctagtctcagagtgggttatgttacaggagaccttacccctgtattgctttacttatatacagaaaaggtgagtgtgaggcagggaccattagaccaaccagccagtaggaggtttatcactggagagtggttttgctggagaagcacccttctggggcccatttgcttaggaagtccatatactagctccagtgtcagctggaaaccttgtagcctgtccactaagctagctcagtcctggcaagctgcctccttgaaaagcttaccacaagggtgtgggggaatatgagactcaccaggacaagccagcagagggtttgtctctgcatagagtctctaatgtaatgctctgtccatttgaatataggtattatagtatccctgtacaagagaaatcctagaaatgaaagcaatgcttttaattctaac

SEQ ID NO: 632893 - DNA, 172 bp, Homo sapiens
gatgaaggccctctgtgttgcgaacgcacgtgtacatcctgaaatccttccggtgccaggactcaccctgacggctgtacaggggattgttgttcttctccatttcatcaggggccaccagggcccatggccagagacgggggctgactgaggacctcacatgggcgtctgc

SEQ ID NO: 632894 - DNA, 848 bp, Homo sapiens
  misc_feature (227)..(227): n is a, c, g, or t
  misc_feature (230)..(230): n is a, c, g, or t
  misc_feature (239)..(239): n is a, c, g, or t
  misc_feature (251)..(251): n is a, c, g, or t
  misc_feature (261)..(261): n is a, c, g, or t
  misc_feature (266)..(266): n is a, c, g, or t
  misc_feature (284)..(284): n is a, c, g, or t
  misc_feature (317)..(317): n is a, c, g, or t
  misc_feature (322)..(322): n is a, c, g, or t
  misc_feature (324)..(325): n is a, c, g, or t
  misc_feature (338)..(338): n is a, c, g, or t
  misc_feature (391)..(392): n is a, c, g, or t
  misc_feature (394)..(394): n is a, c, g, or t
  misc_feature (398)..(398): n is a, c, g, or t
  misc_feature (403)..(403): n is a, c, g, or t
  misc_feature (406)..(407): n is a, c, g, or t
  misc_feature (625)..(625): n is a, c, g, or t
  misc_feature (630)..(630): n is a, c, g, or t
  misc_feature (688)..(688): n is a, c, g, or t
  misc_feature (722)..(722): n is a, c, g, or t
  misc_feature (727)..(727): n is a, c, g, or t
  misc_feature (766)..(766): n is a, c, g, or t
  misc_feature (771)..(771): n is a, c, g, or t
  misc_feature (781)..(781): n is a, c, g, or t
  misc_feature (785)..(787): n is a, c, g, or t
  misc_feature (795)..(796): n is a, c, g, or t
  misc_feature (820)..(820): n is a, c, g, or t
gactcagcatacattttccacatacatttttacattgtaccttaggactcagtcatctccacttaaattgatgacacaagcagctaataaccatttctgggtttctgcctaaccccctaattgtctgttaaagccaattctctgggtgtcccagtgagtggtggctttttttctttccacattggcacattcacttctcccactcttggcatgtaagaatataagcnatntacataatntggaaaaatctnggatttctgntgccnaagggttaaagcttcttnggatttcatttcattgatatacagccactattntattntnngatcagtggcctntggccactgttcagggtactgaccatcagtgtcagcattagggtttggttatnntncttngggtnttnntttttggcacatgtgaatcttgtttgtgtaaaatgaaattactttctcttgttctctgatgatgggtttaaaattaaaagagcatccggtttggtatggggatgatccaggattatgttgtgactgatacatattagttacttgtgcttttatattatgtattggaatcttggcaagggcaaaactacaagtaacgagtttatataataattaaattngtacnggtttcatgtcaggataaaccatacttccaccttgggtgaaaacctgtgcaacagttntattaatgaggtgactttcaccttaggacaacgntggcnatgccaagtttttggtgtgtgtgaaacattcaaaactgntttanaagatgtaantttnnnaatgggtnngtatctaatatgccccaggttcgntaaataaacaattctttctacaacaaag

SEQ ID NO: 632895 - DNA, 717 bp, Homo sapiens
gcgcagctcatcgactccatggccaactccttcgtgggcacaaggtcctacatgtcgccagaaagactccagggactcattactctgtgcagtcagacatctggagcatgggactgtctctggtagagatggcggttggagaggtatcccatccctcctccagatgccaatggagctggagctgatgtttgggtgccaggtggaaggagatgcggttgagagcccacccaggccagggaccccgggtggagggccccttagctcatacggaatggacagccgacctcccatggcaatattgggagtatgtgggatcaccataggtcaaagcgagcctcgttccaaaaaattggccagtggagtggtcagtccgtgggaatttcaagaattgtggtgaataaagtggttattaaaaaagagccgcgccagagagagcagattgggaagcaattcatgggttcagtgcttttatcaagagatcgtgatgctgaggaaggtggattttgcaggtgtggtctgttccaacaatcgggcttaaccaggcccagtacaacaaccaatgctgatggcgtctaaagtgttagggaagcaacaaagagcgagtcccttgccgggtggttttgcatgtcgctttgggggctccttcccatgctggtctctgttccagatggtggattccacctgtgcacaaggttggaggacacacagatgtgcaga

SEQ ID NO: 632896 - DNA, 736 bp, Homo sapiens
taaattaaaccaaaaaatttttttttaacctttttcggaatttcccttaaaaacaaaaagggaatccccctccccccaaaataaaaaccctttccctcacaatatccatcccagttatgaactttcacagatattttctagagggagaatttgcggcaacattttattccaagtggtagtttcccccaccggtgtactctccgtgaattatgaggttggaacattatgtgcaaaagagccacctcttaccttctcttttattcacggtgggcttgtttctcctcctctacagagaagttttataaaagtgtacacagatattggacattggtaaaaagtaagagggtttctcccacaacccacgggggtgtgtgatacccaccttggcctaacaatattgtaaattttctcgtagatcttctccaaagggtggatctcacctttgttgataaaagcttataccccttgtggcacagtgcttttcttgtcccgggtttggacaaatatgtgcgaaaaagtggggcgataattcctcgggctttctccccaactctagtgggaatattgttatttctttcccgtggtaggagaatttacccaccccgttaaaagaaaggggactctccttaccaatattgagggctctctcccaacactttccccaatagtgtgaaaaaacttttctcacaaaaatattggatttcccccctttgctatgtgtggaaaaaacataaag

SEQ ID NO: 632897 - DNA, 703 bp, Homo sapiens
atacagaagcagaaaagcgagacccccaggaactcgtggcctccttttctgaaagagttcggaacatgtcgcctgatgaaatcaagatcccgccagaaccccctggcagatgttcaaatcacttgcaagacaagatccagaagctttatgaacgaaagataaaggagggaatggactatgaactacattatccaaaggaagaaagaatttcggaaccctagcatctacgagaagctgatccagttctgtgccattgacgagctggcaccaactacccaaaggatatgtttgatccccatggctggctctgaggactcctactatgaggcattagccaaggacccagacaacctctgaccatggacaaattggcacacggccaaaccagcgaagcgaacaaacaattgacgtaccgcgacggcgcaccaccaaaaaggcaccacgaccaacggccacgtccaccaccataccactgccagacacagctgcttgccagatgctcagaagagaaagagcaagctgggacaacggctacttcccagtgaccaaacgatagcccagcccaccatccaacaccaccacacacccaccctgcccagcttgtcgaaacaggacaccacccacgcccacgggctcaagacaccgtatctcgtgtcggccacagcgaagacagcacacgcgacctagggcaccctaaactgcc

SEQ ID NO: 632898 - DNA, 257 bp, Homo sapiens
  misc_feature (19)..(19): n is a, c, g, or t
  misc_feature (230)..(230): n is a, c, g, or t
  misc_feature (233)..(233): n is a, c, g, or t
atctttaaacatgactganggaatttcacgaaatgcccactctcttggaacttgaggagaaacggttggccacccatatgtcacctagcgctatattctttcaggctgagattcttcttctggaaaattgaggagcagaactggccacccttggctgctcaagaggcattttagagtaggagatgcagttggatggtggggaggggaaggaaatagttattaaataatgnaanatggaataaagttatcttggatgg

SEQ ID NO: 632899 - DNA, 155 bp, Homo sapiens
gtccttcaaggatttttaataggttagggccctaaattaaggatttacctccggttcgagttactttttgtattggtgaaagaatgggaaccccacaaattctatggggtccggcctaaaatccaaaaaattggcaaaccccttcttcgtggaaa

SEQ ID NO: 632900 - DNA, 289 bp, Homo sapiens
cttgcgtgtctctacacagaatggggataggggatacagcatctggtggccggctcctcaagggcttggcttgtggaccacatttacttctgcttggtcttctgctgtggctggtgctggatgtgactattggaagggcagggctcaggcacctatgggtgcattggttctggaaccttgggctaggcagggctcagtgtactttgggggtggcagggctcaggcacccttggggtaggcagggctcccttggtttaggggggatgcatgggtcccttgagggtggagg

SEQ ID NO: 632901 - DNA, 254 bp, Homo sapiens
  misc_feature (216)..(216): n is a, c, g, or t
  misc_feature (250)..(250): n is a, c, g, or t
accccatctctcccaaaaatacaaaaattagctgggcatggtggcgcgcacctatagtcccagctactcgggaggccgaggcaggtggatcacaaggtcaggagatcgagaccatcctggctaacacggtgaggccccgtctctactaaaaatacaaaaaaaattagcgaggcagtggagtttgtagcgagttgggattgtgccattgtactccancctgggcaacagacgtgagctctgtctcaaaaanaaaa

SEQ ID NO: 632902 - DNA, 154 bp, Homo sapiens
cgctgactcgtgctcccaaagtgctgggattacaggtattagccaccatgcccagccaaaaagaccctcttctgaaggagggtgtctatactagtcatgagtttggggagatctgggcccaagaaggatccttactgtgatcgtggggttgtaa

SEQ ID NO: 632903 - DNA, 147 bp, Homo sapiens
tcttaaagtatgtggcaaaacagtacacactgttaaatcactccatttctatttatttactgaattattttacacataaactgaattttagtttaaagaaaaactacactttgagtaaacaattctatcatacatttacttttacag

SEQ ID NO: 632904 - DNA, 295 bp, Homo sapiens
  misc_feature (1)..(2): n is a, c, g, or t
  misc_feature (113)..(113): n is a, c, g, or t
nngactgacattcccatggctgtggacattttggcggcttggcgtgctcccgtataggtggacggcgttcttcgcaataaacgtttcttctcaagccttaagcacaccttcgnagtctcctcatagataagaccggaaatggcgcttggacgccaccgcggccgagcccggcggatagccggttttgtaatgccctggatgttatcccggagcaccttacgatggcgcttagcaccacccttccccgccttttccgcctttgccgcggaccagacatggattcctatcggcagtc

SEQ ID NO: 632905 - DNA, 344 bp, Homo sapiens
gcactaggttacaaatccatgagtattactctatgtcattgaaaagttcaatttagatctacaaatacaattctacggccttggtgtactagcctctttccaggtagcttacaggctaggtttcactttcctgaaacggattctccgtcatagaagagatagcgtatatctactttgacatcttcagttttcctttctgccattttcctggtttccccatcaggaagaacaatatcgatctcacaaattggaccaaaaaagcctccaagaaaactcattgtcaacgccgccgacgcgtcccccctactccactcctcttccctcaggagaacgcgtcaaaatcg

SEQ ID NO: 632906 - DNA, 573 bp, Homo sapiens
gcttgaccccttatccgccacatctgctgacttccccatatccccagtgtaggcatccagtgcccctcccctgactggcaagcgagtgcggggccgcccaaggaaggacaacctgataggactcaatgttttgggtccccaggtggcctgagggaggcaggcatccttccatagcggtctatgtggtaaggtgttacactgattgccaaccggctaccggcagacacgaggcccagcacgtgtgtcaccagcctaccagactgggctacatctgaccttcctcctccgagtgctaggtgtagagaatgggctacccatctctgaagaccccgacggaccccgaaagagtgagcctggaccagggaagcaggtggcttgtagagatactgcgtgcaagatactatccgtagatgctgtaacatctataaccggcacaagcttgtacccactcttggggagaagacctactacctatgccctagtgtagtagggtaagcgggttacaagagaaaagaccgcatgtcctaaccatgtagcggtcccattgatgggtccgcaggtggcaggccttag

SEQ ID NO: 632907 - DNA, 378 bp, Homo sapiens
gctcggccttttcgctaggtgagtactcaaagcgctgtcttagtccgagagaactgcgaagtggatcccagcaagtgctcgtgccgctgtacctcccagagcaccaggacaacccctacagatgtgctgcgagtctggccttcgcgcaaggatcatctattcctactgtgtcttcccacgggagttgcagaggtgtttgcctcgtggaggcatggagtgcagcaggtctgcggccgcccggacatccgtgagcggatcatcagcgcctccctcttcctgcgcttcctctgcccagccatcatgtcgccctcactcttcaacctgctgcaggagtaccctgatgaccgcactgcccgcaccctcaccctcatcgccaag

SEQ ID NO: 632908 - DNA, 836 bp, Homo sapiens
  misc_feature (202)..(202): n is a, c, g, or t
  misc_feature (204)..(204): n is a, c, g, or t
  misc_feature (207)..(207): n is a, c, g, or t
  misc_feature (212)..(213): n is a, c, g, or t
  misc_feature (215)..(215): n is a, c, g, or t
  misc_feature (219)..(219): n is a, c, g, or t
  misc_feature (225)..(225): n is a, c, g, or t
  misc_feature (609)..(609): n is a, c, g, or t
  misc_feature (611)..(611): n is a, c, g, or t
  misc_feature (633)..(633): n is a, c, g, or t
  misc_feature (641)..(641): n is a, c, g, or t
  misc_feature (681)..(681): n is a, c, g, or t
  misc_feature (691)..(691): n is a, c, g, or t
  misc_feature (697)..(698): n is a, c, g, or t
  misc_feature (703)..(707): n is a, c, g, or t
  misc_feature (709)..(710): n is a, c, g, or t
  misc_feature (712)..(712): n is a, c, g, or t
  misc_feature (723)..(723): n is a, c, g, or t
  misc_feature (741)..(741): n is a, c, g, or t
  misc_feature (743)..(743): n is a, c, g, or t
  misc_feature (745)..(745): n is a, c, g, or t
  misc_feature (756)..(756): n is a, c, g, or t
  misc_feature (758)..(758): n is a, c, g, or t
  misc_feature (764)..(764): n is a, c, g, or t
  misc_feature (767)..(767): n is a, c, g, or t
cacgcgtcgcgcagctccctcgcggcggctcacggagatggctcttgactcggacttgtggtcgcgattggaggaaaaagcgcgggccaagtgcgaacgagatgaggctgggaacccggccaaggaaagcagcgacgctgacggagaggcggaggaagaaggggagagcgagaagggggcggggcctaggagtgctgggtgncncgngctcnngnggcnggacanggtcctggggcctgcgcggcgctggcggcgtccgctgctagcaacgtgctctactgtgcggagatcaaggacattggccacctgacccgttgcacgttgtaaccgaggaactcggaagctacagccgaaggaaggtgggagctgcagcctcgcgggggctgatgtcaagactactctctctcagatcccaggattggcatgtgatgagagagatgagccgaaggcaggagggaacgccctgggaggtgttgatgctgagttggggaggctcctagacgaactcgcccccatctactgactgtgccagtcttacattttcaggatggagtggcaagggatgatataaacaaagcctacgttaccgtgggaagaagacagactgtntncttagctgggacgttggctttngtccaggntggctctggtgtgtgggagcaacaggtcccattttagcanttctttgtcnatggtnngaatnnnnnanntnttaagatggancgggagagacgaggctantntncgcgtcctgtnantctcanttntctgggcatgtaagggatgatggtatggactggatgtttcacaatacccaggtcgggggttccgaacaa

SEQ ID NO: 632909 - DNA, 109 bp, Homo sapiens
cccgtcatcaaacttcatcaaaccctcaacccttagccacagtgaagggaatggaaaatgagaagccacgagggcccctgccagggaaggctgccccaggtttcgatga

SEQ ID NO: 632910 - DNA, 247 bp, Homo sapiens
taatactgagcttgcacacacttgggaacctgcccagacgtgaggtcagtgagagtgggttacatgcattctggaaaacgtgggattacttgattacatgtacacccaagtccccacagccctgggatccatgcagagcacacagtgcaagagacgtggctcccctgctgagatccagctgctctgaccgggcagtcactttgtcactcagaaacagagatgcgatttttacggtggtggaacatgg

SEQ ID NO: 632911 - DNA, 310 bp, Homo sapiens
tcaaaaaccaaaacattttaactcttggggctcggggaaagggccaggcagagttgcaaggtgtgctccacaggaaggggttaagcagaaggaggagctacgagggggctacagctcctagttacctgtgttgggggaaggactgagggaatggtgaagttggtgtctcgcggaggggtgctccagttccgtgggtgcccagtttcgtgacaccgtgccccttctgggagtttcacagtgggaagttcctttgcaagctccgtgaaaaccaacagaggccgtgccttgaaaccctgtgggttcaggaaga

SEQ ID NO: 632912 - DNA, 111 bp, Homo sapiens
ctggaaaggcgatggtggagtaatcttccaactcaatttttatctttgacaaggcgtgagcagtagaaaactgcattcgagtcacatcctcaagatagtcatgcacagcag

SEQ ID NO: 632913 - DNA, 905 bp, Homo sapiens
  misc_feature (417)..(417): n is a, c, g, or t
gtcaggtggagcgtcgcggcgggccgcaggtcgtggatgggcgtgttctgcggccgcgaagggcgtattgtggtcggcggatgtggaggagtctcttgaccgagatggaggtggtggtgcaggagagcgcgcgaatttcctgatgcaatatcatggtcatcgctgaagctattctctttgcgtctcatcagcgcacccaggtcacttggcagcctaagctgtgaatgcgaccaggtccgatcagccttgaatcgtcatcgagcccagctgggaaggtcgtgtctaccaggatccttggacaggttccaggtaaacagcatacactatagtctaggcttacttagtcattaactgttgcgatgtcctgcagtttcgcgcttctcgagtgctactggaaagatgtagacgacgcatccntgtgcaaagcatctacttggcgagttatacctggagctcaggttatgagggaccgtcgtcagcgagctaacgtgtctctgacaagcagttgactgacatattattgattggcacgaaggaatacaaggaaggcactacaagaggtacatgattgagcagtcattgcttgtcaatacactagaatacctgtcacagaaactgcattgaacagcgtcagtgattcacgactgtgaaaagaggtgaaagtggagtcttcacgacatctatcatggttacatgtcccgttttcccttccagggactgcagagacggtgcatgtagggtcgtgagcctgtggtcctcgtcggaaggggttgcgtagtgatgaagaagccctgtagcagtctgtgtcatgaaatatccctgatgccagatctctgacgacgcttcggtaagacaatgtccctggatggaatcacgattttagacttcagataacggcctaatat

SEQ ID NO: 632914 - DNA, 938 bp, Homo sapiens
ggcggaacgcgcgggatcttgcgtgctgctgggcctgagctgtctgtctcgtttctgtccgcgcgccctgcatcccggcccgggcgcccgctggaggtcgccgaggagccacagggctgactggtcttgctgccctgggcccaggagtgcctggtgtagcagtcgcggagccatcccggcgtctgctgccatgaccgactctcccctcagaggagactcttcctcagcggtggctgcagagacagatgagcggctggctcctggccgcgggaccgtgagactgggttctgtggcctggccatttaggtgggacgctgctgaccacctgctgctgcccctccggactggttccttgggccccggaagctcgctggctgggccctgcgggagggctggcatgctcccggcggagtgctgctggccgcctggctggctggggactgcgggggctggggggcctgcttggctgcttcatggccaatcagtgccgcttcgtcacgggcctgcgcgtgcggcgcgccgcacacagatcggcgcagctctacggccgcctctactccgagagctcacgccgcgttctcctcggccgctctggcgccggctgcacggccgacctggccatgcctctgccttgatggcggggttagccgggcgtcttcgtttggggacgaggagaggatccaggcaggaggagttgcagagatcttattaattggagatagaagcggttggaacaaattgtccacattatgttcagagctctgagagtccagcacaacccttcagaacaaaaagccaacagaagggcatgaagattcacgacggcccagaagccaacgtggaaattgtgatggctagcacaacctttagctgggcggccccaataactggacccccttcaataccgagttggacctacagttttaacccgcgttaaa

SEQ ID NO: 632915 - DNA, 234 bp, Homo sapiens
ctgctcttgaggatccctcacagctttgggcctccacgaggtcctgcctatacctggaagtcgggggcgcaccttcaccttatctccaggctggccagctgggccagtgaggagcaataggaccagtaggaccccttgggccatctttccctgggacaccatcagcacctgggccacctggatgctgctggtaactcctggtctgcaaggaatgcctggagaaagaggaggccg

SEQ ID NO: 632916 - DNA, 398 bp, Homo sapiens
  misc_feature (128)..(128): n is a, c, g, or t
ctcatcctttctcttggctaaccttcattttggtgccaaaacccaggaaggggataggctctggctgggcgtccttagaggattctctctctctctctcctatcatcccttacccagccaacctcccnttcccgaacctgctaaagaccctaaggatctcccaaaattctcccattgttggccacctcatccaccatcaaagcctctgagagggtttttacagggccgtgttagagcctaaggatctcccaaaattctcccattgttgggccacctcatccaccatcaaaggcctctgaggaggggtttttacaggggccgtgttaggaggcctttcacccatgggaacagttacaagacatggatggttattccgaggaattaccgacaggttccgg

SEQ ID NO: 632917 - DNA, 1115 bp, Homo sapiens
cggttgccgtagctgaaatggctgcaccatgtcggccttcgagaagcctcagatcatcgcccatatccagaagggcttcaactacacggtgtcagactatcgcaaaaggccaacacctcattaaatgtggcacacatttggtgcaaccatctttcacagcagagatatttcagctactggagatcttggctggacaacttcatatatgttaatctcagcacagctccagcacatgccagtatattcatgtaaagggccatcacacagcacaattataacatgccatagcatggccataggtggcactcaggcacatcggcagcaaggagcacctgaaacattgtgcactgagcacgccgcagcactgcgacacctgtagacacgcgtgctgggaccccacacggccacaccacccacgactgatccctgatagctacctactgcgaaccctgtaccacacccgagacaccaccaacgacgacgacctgctactcgggaaccctgtacaggcacatttcgcgccaacttagactttacataagtaccaacgaaacgaaacccgctgctcccgctcatgctagacctgagcctactgaaccctacctgctagcgaatacttcacaaccctactcctggactcctccacgcaaaactaatacggccaaactcaaccgcagcacgaaggaagacaacaacacgtactcccaacaaaaaaaatgaggagagataaatagccaaagccaactgcagcacacctacacagaccaccacaccaccactaccacattaaagccaacttgacaataccaggcccaacattacagcgccaacacaaccctcccacgcaaacagacaacacaggatactcccaaatagactcccagtcacgacccggcctacgcaaacacccccacgtgcaaccccccaaacccacaaacggaggaaccaggccccccaccacggcacacaccaaaccaaaaccacggcagccacaatataaacaccacaacaacagaagtaagactaacccacacgcaatccacgagaccacagccaagcgaccaccacccgaaaccaaatggagcaagaccaccctaatccgcagaacacaccct

SEQ ID NO: 632918 - DNA, 472 bp, Homo sapiens
ataccaatagtgagtaaaggaacgccggtgtaaagcaaacacgtggggaagactacacggatgccacaactgggaagacctttgtacttactaaaacacaggcaaaagaaccggtgtgctagtgaatgcattgacctactaaaagcggagtggtgcagcgtaaaggtgaaaccggtgcccggtgcgggttgcgcttgagtgctaggagggtaacggggagaaagtggcaacgactaaagtggggattgatactacgttttactatacagttgaacaatataatacgaccatacaaagtaggggggagggggtaatgtgggtgacaggggggagcgaaacttgaaaggggacactaaaatggcaaacgtaaaaagccgactggaaggaatgtagggagtgcggtaaggtaggccgtgggggaaagggcgatgctgaataaatttaatttgatgtctatggtaaggtgaccagc

SEQ ID NO: 632919 - DNA, 254 bp, Homo sapiens
acgcacaaacccactctcacccacagcggctctaccgccttggttcagcgctcgtagagcgccagcccgtgcgaggggtcgatcacctcgtcctcggtgccgcggatgatgagcacgggagacgtgatcttggacaccttctcgatgctgcgggagggtcgtggagccggtgagacttcgcgcccctccagtctccccactcagccaagtcagtgggtcaggctcaggctccacccagtcccgagggccacccc

SEQ ID NO: 632920 - DNA, 331 bp, Homo sapiens
cagctaccccgtactgagagaagatactcaaagaccacggtgcccactatcactgtaagaaagatatttgttggtagcattaaatcaagacactgcaaaaacatcacctaagatattatattgaacagtatggaacacttcaagtgattaaaatcatgactgaccgaggcagtggcgagaaaaggggctttgcctttgtaacctttgacgaccatcactccgtgcatcagattgtcattcagaaataccatactgtgaatcgccaccactgttaattttgacccgccctgtcgtagcgcgagatggctcgtgcttcatccagccgaagagg

SEQ ID NO: 632921 - DNA, 356 bp, Homo sapiens
  misc_feature (328)..(328): n is a, c, g, or t
tttttgtgacggagtttccctcttgttgcccaggctggagtgcaacggtgcagtctcggctcactgcaacctccaactcccaggttcaagtgagtctcgtgcctcagcctcccaagtagctgggattacaggcacccgccaccgtgcccggctagtttttttttgtattttttttagtacagatggggtttcaccatgttggtcaggctagtctcaaacttcctgacctcaggtgctccacctgccttggcctcccaaagtgctgggattacaggcgtgagcacttgtgcccagcctaagcatttcttaaaataaaaatgctaaaggngtagtaagtaaaataaaacttcctatgg

SEQ ID NO: 632922 - DNA, 752 bp, Homo sapiens
caggagtcatgatgatgatgttctagcaccagtaaaagatgtatggctatcctgaagacatggatcaagataagcatagaagacagtactgatgacagtgacaccgacaaatcagatggagaacagtgacggggataaattggtgcaccgagataatggtgagagagacaacaatgaagaagagaagatcaccggatctgagtgtacgcgtttgcagatatgcctggaagaatcaaggaagaaaaagaagaacatgaaggaactgactcctcttcaagccatgatgcttcgtatggcaggtcaagaaatccctgaggagggacgggaagtagcaggaattttcagaggacgactgatgaagatgcattctgatgactctgaagcagaaaaagcaatcacaaaagcagcataaagaggaatcccattctgatggcacatccactgcttcttcaccagcagcaggctcccgccgaagtctgttcctccttctcagatacaaagcacctcccatgccaggaccacacctcttggaccagcacactggcatccaaccattacagggctccttggggccaaacttaacagggccttccatcgctggtccacctcccaggagctcctccattccttgagaccaacctggaaatgcccaggaactccggagggccctattaccccaggatttttaccttccaaggaacaccaaccagggaccgacccccgggatcattccctagaaggcaacaagaaaa

SEQ ID NO: 632923 - DNA, 508 bp, Homo sapiens
atggtctctacctccagccggactccagccttctcggtgatgaaaactctgtccagttctgctacggaggggagagagatgagagccttttaggctagaggaaggccagcactgggggtgtggcagggttcgagaaaagctcccagggcctgccttccttccctgagctcatatattggtatccccttatcagactcctgaggaagaagagattttaaacaaaaaaggatctaaaaaaattcagaagaaatatgatgaagggaaaaagaatggcaaaatcagcagtctccgggaggagcagttccagcagggcaagtttctgggtgagaaggcggtggggtgggagggggggagtcgcagagatggagtgtgccgaggcacttttccctggtctcagttccttggactggccagccatgcagtctaacgggtccacggataccgggttgcaagcacaagggggaaggtggggccaccctatacgtatgaagctgaaatgggaagcata

SEQ ID NO: 632924 - DNA, 517 bp, Homo sapiens
  misc_feature (215)..(215): n is a, c, g, or t
cctgctccatggagccttcagtctcctgggaagctgtgcctgtctggctctggcactgaccacatcctctcggccatttctgaagtgcactcctcccagcccagctccagaatggccctgccccccagccccctggccatggaatatgtcaatgactttgcacttgcatgcaagtttgcaggtaaagcggcgaaccctctgcagggccgacctgngccccccttatcacgcctcactggcgctctcacaccgttacacgctcacgtcgcctccttcacccacgcttcagtgcaacctaggcactgcgtggcgggcaacccgagggcaccgcggccaggcctggacggagctgtactggctggctaccctgcacgcacgcaccctgcgcggcgcctgcgcggcacgcgccacttcggcgcgctgcacgtcctgcaacgcaggcccatggcacgctgcctgcacgggctctcggcgcccatgtccctgctcgactgggcccccatggcctcactaccca

SEQ ID NO: 632925 - DNA, 283 bp, Homo sapiens
taatcttggacaagttgagaagaattggtgttagttcctctttaaatgtttggtagaattcaccaccaaagccatcaggcccagccttttcttcgttgggagatttttgaatattgactcaatctcctcactaactacaatatagttctattcaaattttctatttcttagtgatttagtcttaacaagttttgtgtttctagaaatttgtacacttcatctaggttatccaatttattgatgaacaattgttggtagtatattttttttttttaagactggt

SEQ ID NO: 632926 - DNA, 324 bp, Homo sapiens
aagacagggtctggttgtgttgcctaggctggggtgcagtggcataatcatagcttgctgcacctttgaactccagggctccagtgatcctcccaccttagcctcctgaatggctgggactacaggtgtgtgccatcatgcccagctaatttttaaaaaaaaatttttgtagagacaagggtctgttgcccaggctggtctcaaccttcttacctcaagtgattctcccaccttggcctcctgaattgctgggattacaggcatgagctaccgtggccagctttttttctgttttgtttcttgttccccttctgtcgtcttctc

SEQ ID NO: 632927 - DNA, 293 bp, Homo sapiens
atcatgagaggtggtgtcatttgtgaagaagaatgttctcgtaactaggaggattgctcgtaggtttaggctgcttggattggcatcctagggatagatgaccgcatgttcattgttcctggtttcatccagccagcagactctacactccatcataggacatcgagtccctcctcctcttctcccatgccttcttccctgccatggcaaatctgagtggcttctctaagcatctgctggtacaagtcgatgtggcaccatgagcttcatggtggcagaagagactatacgtc

SEQ ID NO: 632928 - DNA, 304 bp, Homo sapiens
  misc_feature (125)..(125): n is a, c, g, or t
cttaaaagcccccccctttttttttaaggagaagggcccggtcttttcccaagtccacacagggggggtgaaagcattgcttttgtgtaaattatgtaaagcaaaatttttttaattttcgcccnaaaaaactttttattttggtttttttttgaaagaggggccttggggcccccccttcccccttttttttcccccaactttaaaggtatgaagggttttggtttccctgggggggggggggggcagccggggtttccctgtaccttgatttgagaccagttgaataaaagggcccccctta

SEQ ID NO: 632929 - DNA, 1614 bp, Homo sapiens
tgtacagaagccgtgataacacgaaaacaatactacgcactacaagccctgcaacgtatggccttcttgccgttagcagtcttggcaacggcgctctcgcgatcacactgctaccaacgcccctctatgtccacaggctccaatattgcgctgagctcttccaccactgtcatggacaataggccagacgaacctatcgctgacatacagcctatagcgcctgaagtacaccagcaacgtgaaaacctgtcacccatacaacacctttgggcggaacaacagacacctcactgacaagcgcaaaacggcgagatgcatccctttcgctcgataaccagtccgcgaactgcgccggacacttcgtcgagcacgacatagacacattcgatcgcatagtgcaccgggacaactcaccaattacgacattatccatgcaaaaccatatgcccccgagagaacacgacacactttacatatccgtggcgaaggcaccatatataaccaactccataacctgtgcccgcgtctcttggaacacatagggaactactgaccttgcctacaataaacacctaacgactacacccacataacattacacgagactatcatcaacaatataccatacctcacaaacgaacaaacatcagaagacaagacattagcaccgcacacttcaccgcgcgctcccagtacccttacgctcggaacacaattccaacccaaaaggtacatcataggcgccctttgcgctccgaacaacggaagaacgccaaagataaagaggacccaacataataaccttagcttgttcaatcactccttatttaaacaacccaaagaaatatcacctggacaacagaaacaaaatccatcgcagcaataaaattcaaagcgaagacgagtccacataaaaaaccaaagctgagcaaagcatgtagctcacctactggcacgcacatggcttacccaaaacaacaaccacaggccatcctgcaacacactagaccctcattgcgccccgacacactccattaccaactaccaacggcacaacgacaaaacggatggcccgaacaaaacaccccgcccctgagagccagaacaacctagaacaagcaacaagagacacgacatcaggaaaagaccagaccacaaccaacccatcccaacgagcataacacccactaagactaccacacaaaaagcaaaagcaaccacagacccgacccaaccacaccagagaacaacccaaaacgcaaacaaaaaccccctaaccgaacaaaagaaataaaacaaaaacaagactaaaaacaggcaaagcccccatctcaacacccaccccccgctcaaccacaccaacacacaaagaaccaccaaccaaaacaaacacacaccagacacacccgtaaaactcccgcgacaccacgaaaccaccgcgaacaacgagacacacgaccaaacacgacaccactcacagccacacacggcctaacccaaaaaaacaaagaacgaaaactccaacaacaaaaccacaacccactaaacaaacaaaataaacagtaaccataaccctcacactccaccccaccaccaacaggcacaaacacaaaa

SEQ ID NO: 632930 - DNA, 169 bp, Homo sapiens
tagggtgcacacgacacacaccctatctccccaagataaaatgcttaagtatttatgagcttgcaatacaggtgttagataatgtctccttaccctgtgttagacatcactcaggcccagaggcaaattcgatttcttgaattattctacagtaaaccaggctgtcttt

SEQ ID NO: 632931 - DNA, 551 bp, Homo sapiens
ggatggtctggccagtactggaaggagcctgtgcgagacccaactggtgctctacgctgacgcgtaggagctgaagaggagtgtgggcaagctccccagtcaccgggaatcactccagatagtgcaagcccaggtgcacacgctgttcagtcaggaccaatgccagggacggcgtatgactgctaaagacttactggacagactgtcttctatagacaacctgaaagcctcactcagccaagtggtggcggacttgaaaatgctcaggactgctagggacagcctgtgtgcgtactcagtctagaaaccaacgagaacaatctggaatcagccaacggtttactcgatgacctcgcgaatgatccgcatatgttgcttggtgaagtggctaagattcacagataggtctcaaagaattgagtgtacatggcacccaattaaagtcccattttttatgaccaaatgagcttgatgtaccaccttgacaacaaggcattgtatatttatgccccggtaacttaattacaatatctgatctgtgcttctgcttt

SEQ ID NO: 632932 - DNA, 215 bp, Homo sapiens
cgattcctggtccaaaggtgccagagggctcacacccagagttagcaatggagtcacgtaattccaaagcatacctgtgtccccagcgacaaagtgtaggccaggcagtgtcaacaccctgccacagcacactggataccccgggagccgtgcagtattcaactgacctccgttcacagtcccggtgctgtgctagatttgggctgacagggttt

SEQ ID NO: 632933 - DNA, 209 bp, Homo sapiens
gggggctgcggaggatactggcgtgaagccataagtcagagcttgcagttgagccgagatcccgccaatgcaggtccagcctgggcaacagagcaagattccgtctcaagaaaaaaaaagaaaaaaggagtagatacaaaaggaagcatgccctaccaaatcatcaagtaaacctgatcttgaatacgatgtagcagatttttcactag

SEQ ID NO: 632934 - DNA, 594 bp, Homo sapiens
  misc_feature (322)..(322): n is a, c, g, or t
tatattctaaagtggacctgagctatttgagcaaataatgatagggcatactcagacattttagctaccttttatacctacgatttcatgtcacatttactaatagaattaacgggaaatagaagcccgttctttcttactgcccctggagggagcatggcgctagggctctcagcctcctagaaggaagggactaaggagacgggcacagacttgcgtcatctcgtttccacagttgacgttttatattactttctccaaaatttaagtttaccaaacacaacacctgaaacagctgcaagcagtgtcttgccagaccctngcgatccttttctgtagcagtgattctaaagtggcgtttgctgtgtgcttgagagtaaaccactgcaaccggcttgcatgggctggttgcacgcagttcaagtcccaaggaaagccatcagcggcttgtaaggatcctgctaggacctctgcagactgtgctgcctgcacttctgctccagagtgtcccagccaaccctcggaagatgggattgccagtcagcctgctcaccatgcctgcaggaggctgtccagggagcaggtctgtgtgcc

SEQ ID NO: 632935 - DNA, 177 bp, Homo sapiens
accgttgtgccctgctgaccttgtgctcggctggttgccagcccacctgtgtccccttctccacgtgcaccctgttatctgcgtgtgtgacgacacgaccctggtgtactcctggtcttgccttcgcctgactcctttgctgcctgaccgacggttccacctgcctgacccccttgt

SEQ ID NO: 632936 - DNA, 187 bp, Homo sapiens
acagagagatgcgaggcgctctagaggattcccaatatagagcaggttctccttaacagggagaaaattggcagttttcccataagccactcattttcccatctatttcagggggcctctctccccaaaggagtggcatgcctcatgttaccccttcaccacctcactaccctgcctttttgcactg

SEQ ID NO: 632937 - DNA, 105 bp, Homo sapiens
tctaacgcgcagctggatcatccccattcttctgttaccagatctttgacttatgccctgaaacatgttggttagcaaaacactgtgctatatttataccaaaac

SEQ ID NO: 632938 - DNA, 807 bp, Homo sapiens
cccttcctctagcagtctttcatatttcgggaaattttccataccggctctgagagggaccccaggggatagatggaaggatttcgtcaagggtcccttgaccaaggaagactgatgatttctagcattgatgacagaatgcctttaacaggccctcttactatttaggttatctggccagaaccagattgttatgtgccttgtgtccaccaggggaaaaattgaccgcacggagcttgaaaatgattctgctcccttgaagcattcattttgctagaactgttagacaccttgccgtatgctgtattgaaagtaggaatatagttttaaaaccccttggaccaagtgtgtgcataacccgtcatgagattaaccaccccatgcatgttgcccttttaatgtagaatacccctaggtatccttaatagtgttccagatattgtggtttagtaaagttgatacctcggttataaatattatgcccttatttttggctagaagaagaattatttttagcctagatctaacccttttcatactcttaagctgattggaaccgattccaagaagtatcgagtgctatgccttgaaacttgtttttaaatgttagatggccctatgtatattaatgtaaaaaccatgttaatttactcaagttttcagtttgtaccccctggtatgtctgtgtaagaagcccatttttgtgtattgttaccgtttcaggttatttatattcgatgttttgtaaaactccaatacgactatacttatggacccaataatggcatctgcattcttgttacccca

SEQ ID NO: 632939 - DNA, 529 bp, Homo sapiens
agcgcgttaacgggccatgagcggctggactcctaaggccctgcggcacggtctgcacctgtgtatttgcagtattcagtccccacagctgccctcatgggctttgttggtgcaaagtgcctgtagtctttacccacagagggtacaaagctctggtgggtccatgactctggggtctgcatgatggtggcctccagtgtggaggctccaacccccatattttccttctgcactgccctagtagaggtttccaggaggctctgcttttctggcagctttctgtctggacatccaggcattttcatacatcttccaaaatctatatgaaggctctgaagcctctgggctagtgctctatggactcgctggcttaagactatgtggaagccgtgaagccttatagctgtaccctctgaagcagtgatgcaatctgtaccctgtgcatctttcagccaaggtcggagcaggagctgcggctgctgggatgcaggcagcagtatcctgaggctgcacacagcaacagggccat

SEQ ID NO: 632940 - DNA, 100 bp, Homo sapiens
gttacttgcaccacagctcatccagggtatggcagtcttgccaccaatgtcagcatgtagggctgctggtcagctggtatgcaacagcctgtttgtctag

SEQ ID NO: 632941 - DNA, 193 bp, Homo sapiens
tattcaggtaagtcgctaggtaagagatcacaatgagaaaaaactttcaaggtctgcacttagctatatctagaacactaacaggactcttttcccttacaggctgaagctcatgaccacaaatgacgctcatgctattagaaagggactccagtaaaagataaacatttattgatgtcaaggataacattta

SEQ ID NO: 632942 - DNA, 942 bp, Homo sapiens
gaatgagagggagagagggaaaaaacagggagcgtgcacgtgccgtgaagagacagagacagagagagagaatattgagacagtgagaagagaaaatgggagagggagagaaaacttacaattatgtatgtctgagcacaccatattaaaggaggggagtggcagaaaaccgtgagtgggggaatcaacatcatgctgggctttttgggccagcaaactgtgcaactcagtgtctcagagatcaaggagccaagagatgagacaagcctggtccctaggtgataggggtgtgttgtgtccccaacccaaattctcatctggaatggtagtctcccataatccccacacatgtgtgtgacgcgcaccctgtgaaagatctttcactaaacttgacatctaccttgtgccctgtatgtccttaaatcccaatttcctgtgggttcttccatgtctcctcagaggaaggggctgaggacgacgaagaccaccatagtccatgctgattaaaatcaagattcacctaaaattaccaaatggcaaagatgtgtgccctggagccttgcctgttgcccacaggcggttctacccgtggcccacaagtgcgaaagatccgagcagatacccgagaagaaaacgggaggctcccattttcaaggcctgctctcccggaaggcccatgttggggtccttgccggccgggaacccagtgttccatcctctcgttcccaggtcgtgtgaatgcagcgggaaggggctgctgcaacccacctgcatattcccccaggcccgctgggtcctgtcagctcaccatgtcacacgggacagcgcgtcccctgggcaccattcgttgctcttctggcccacgtgccgcgcgtggccccccccgggcacgaggaacagcgccaccgggggggacccctggggagccccagttctgtgcct

SEQ ID NO: 632943 - DNA, 159 bp, Homo sapiens
agctgattcttgtcctaggagagagcaaagagttagatgtcggaagtataaatggtttgagaatagaaagaactaattttgcaacaactgagtttcaatggtgcaacacttatacccacgcattttcaaaggatgcccctccagggaaagttaacgatg

SEQ ID NO: 632944 - DNA, 254 bp, Homo sapiens
caggaggatcacaaatttatgtggaaaaaattaacttgaggtccaaaatatagatagataaaagccatagataaaaagataaaagccatatttttatagtttttgttggaaaaggaaatagttgagcattgtccaaagggaccctggccctttagctataggaacctcatttcaatacttgtttacatagtggctagaatattaatgtgggtaagaatcttgatttttttttttaacttcagaaaaatgtttag

SEQ ID NO: 632945 - DNA, 157 bp, Homo sapiens
  misc_feature (119)..(119): n is a, c, g, or t
tcacgcttatacttcaattccacccagtgctacagaagaagacagatttagtctggaagctcttcaaacaatacataaacaaatggatgatgacaaagatggtggaattgaagtagagngcaaagtgatgaattcatcagacgaagagggtaccgag

SEQ ID NO: 632946 - DNA, 545 bp, Homo sapiens
tagaggatccctcgtcttcaactgcggttttatggtttaggtctaacgtttgaatctttaatccatcttgaattgatttttgtataagttgtaagggagggatcccgtttcagctttctaaatattggttagccagtttccccagcaccatttattaaatagggaatcctttccccattgcttgtttttctcaggtttgtcaaagatcagatagttgtaggtatgcggcattatttctgagggctctgttctgttccattggtctatatctctgttttggtaccagtagcatgctgttttggttactgtagccttgtagtatagtttgaagtcaggtagtgtgatgcctccagctttgttcttttggcttaggattgacttggctatgcgggctcttttttggttccatatgaagtttaaagtagttttttgcgattcaaagtacaaaaatgccccggtgtcaatgacatagattccccaatgtcgaacatcccatcaaatattaccagtcatgttataaagcaggtgaataaacctgttttgaa

SEQ ID NO: 632947 - DNA, 439 bp, Homo sapiens
ctcgtattgtgcgtgcaccaaaaacgaccaataagagatcaactcctttcaaagaaacacaaacttgcgatacaacgagcacaaaaacacgtataaactcgagttcaagatcacaggataaatgaatatacgatttacaaactccggataaatgaaaatttaacaaattatttcattaaccaataaaaaataggttctatggcactttagatgtaactttacatacacacgccgatcttacttctcccaatcaaagagcccgaatagatagatggtcttggcatccagaatgccagtctactgtgatatttattggctatttatctccgaggcttattattttattttaaccaccacttttattcatttatattaacggcaacattgaaacttgattcaaagacaaagatttgagagccgtgaattctcgaatcaattt

SEQ ID NO: 632948 - DNA, 563 bp, Homo sapiens
  misc_feature (38)..(38): n is a, c, g, or t
  misc_feature (40)..(40): n is a, c, g, or t
tccaaagttaaacacttagatggctgtccaagggcggngnaagagccctgcaaattctgtgtcttgaagaaagcagtggccacgcagtagttccgtgcccaggatctcccagaactagacttggcaaccacagctgggccagccttttttgttagaccattcttcctgactcctgcttaccatcagcacccttaaaatgacgaaatcaggcttaagttgcttttaggttacacagactggagtgtaggccctctcaggccaaacatctttcctcttctgtggtgctaaaattctgtatgaccagacaagtatggtaataggtttttccttatttttttttggtgcaaatgatttggtgtttagtaaaataagtggctaaacacagtggactccattcaaacacacaaattgtggaacagtattgacacggaaggaaaggctttgaagaattactgcctcaggaagcagtgccagtggagtgcgaatttaacacagtctacttcttcctaagggaatatcatcccagggaagtgtcaaaaattaaaatccccttttaagtgtac

SEQ ID NO: 632949 - DNA, 109 bp, Homo sapiens
ctgatacagagtttattagaattagatttttctatttacaactgagatcacatctactactattgctagtctactgggacatatttccaacaagcttagacttaccatg

SEQ ID NO: 632950 - DNA, 243 bp, Homo sapiens
aaatgtgctcaatgtgatcccttaaagttgtacttccactgcttactatcgcggcactgttcgtcattttactcctgcttgactgaactgacctgtatgttccaacatcaagtcctacctgaggttccttccttccacaccaaacatgagctatgcagaggccggaggaaatggcccctgagaatcctttttctccccatgtttcccacggagaaattaatcccctgctttcccacccctgca

SEQ ID NO: 632951 - DNA, 434 bp, Homo sapiens
  misc_feature (409)..(409): n is a, c, g, or t
  misc_feature (411)..(411): n is a, c, g, or t
tttaaagtccctttctgtattgtttaaatgtatacaatgtgtcatttttcaaaaagctatataattctttggaagagaacaagagtaaaagaatccctatcaggaaaccatcatcagcaaagataaatgtgccccattctctggaatccaacatgatacatccagcaatctgaaagcagagcagtgggaacacaggagatggaacagactttttgcttcatgcctgccctaagcagaagtttggcacccaagtatgaagccatcctttataaagaagtcaccagagacagcttaatcaatcactaaaacaagtagctccctacatggaatgatgtgagatgcattaggggaaaatctctcttgtcctaagacagttcatgaccatcttctggaagcttaattcaccccnangataatgattacaaaaaaaaaaa

SEQ ID NO: 632952 - DNA, 249 bp, Homo sapiens
caacaggtgtgatgtcttaatgccactgaactgtacgctgaacaacgaattaagacagtaaattttatgttgtgcatattttacttcaataaaaaccagctaggctgctggccagcatgtccatcagcgccgtgggtggtggctcctgagggtggggtgcagtctccctcatctacccaacacctgcaggcacctggcctgggatacctcattcctggccaggtatcacatcatcctccatggtgctga

SEQ ID NO: 632953 - DNA, 168 bp, Homo sapiens
tccctcttacagaacaacttcattacacgtatataatataaatacttctgagtatcccagaattgtagaaccacatggtagaatcagaaacgtcttggacttgaggtttttcttcccttagggtaaattttaggttttctggttagtttccagagaggggcggagcag

SEQ ID NO: 632954 - DNA, 538 bp, Homo sapiens
gccaggctttcggacagcagcatcaccagcaagctaagtcacaagcagaacctctttcacgaaacaaagaaaccacaagcatacaccagtagtaaccagcagaagaattaaaaatgcaatcagctgcattttccattgctgcagatgtaaaggatgtcaaggcgggtcagtcaaatgagaatctaagcgactctcaacaagagccacctaaaggtaaagtcccggaagggcccgtagagccctctaattgggaaccagaatgttcaaagtatggagactcaaatcgacaaagcccaagctggttactcagcctgtacccctttgcgaataagcctgtacctgctccaatctacttttccttcaaaaacaggggggatggagggagggaacagcagtagcaacatcatcattaacagcagataatgattttaaacctgtgggtattggtcttacccattcagaaaacaaacaagataaaggcctgcctcggccagataatagagattattgattagaaggcaatagaggcacagctcat

SEQ ID NO: 632955 - DNA, 908 bp, Homo sapiens
gctccactcatagagcgtacgtatcacagatcatccctggacacagcaagtgactgatcaaaagaaccactacatagcaagggagacctcggggagtctcctacatgtagcgaggtactgtctcgacgtgcactacgaaagtatgctgaggaaaatatgccatggcatcgtgtccgtacctggacactacactcactattatcctcctagtggcacaccactggtatactagtataagccgtagcccagtgtgtcacagtccccattagtgacagcgagcgtcggcccattgactatactaggcgactggtatctccatcttaggcattcacacgagaattgcactcgtcaggcgcacgagagttccgtaaagccgagcacaaggtggcgagcaacaccgtagcgattcgcactgagtatgtttcgctcaaaatacgtatacagtagatacacgtctgagaagaccatctgcacagacaacgtcaccatccacatatagcaactaacaaagattagacgccccttgggggaactgctcacgtgacacttactactctgggcctaacaccacagtatgagactaggccaatagggcccgagactgtagacgtgctagtggcgacagcgtcaaagtatgggtaaaacagccgacccaaggcaactcatggacgtaaactaatcgaacataccaaatattgagccacagttcacacatcaggtactaggggtgcacatccaagtccatacgagcaacagaacacgatagcagtacgcatatgattgcaggcataacattgcataaggccaaggatacggacatggttccagcagcaagtacaattctacaccaggatgggcgcaatcaaccgcattaaataatgacagtaaaatatgcaatatcactacag

SEQ ID NO: 632956 - DNA, 287 bp, Homo sapiens
  misc_feature (262)..(262): n is a, c, g, or t
  misc_feature (264)..(264): n is a, c, g, or t
caacatgaaacatccatccatgtgatagatgtgatgatggtcttaagctgattattattaaaccaatgattgctgcgagcaagaagcagaagtttggcacccaagtatgaagccatcctttataaagaagtcaccagagacagcttaatcaatcactaaaacaagtagctccctacatggaatgatgtgagatgcattaggggaaaatctctcttgtcctaagacagttcatgaccatcttctggaagcttaattcaccccnangataatgattacaaaaaaaaaaa

SEQ ID NO: 632957 - DNA, 329 bp, Homo sapiens
gctcgacctgtcatgaacattctgtggcttaaaaatatctgtaaattctggctgggcgtggtggctcacacctgtaatcccagcactttgggaggccaaggcaggtggatcatgaggtcaggagatcgagaccatcctgactaacatggtgaaaccctgtctctactaaaaatacaaacaattggccgggcgtggtggcaggcacctgtagtcccagctacttgggaggctgaggcaggagaatggcatgaacctgggaggcggacttgcaatgagctgagattgcaccactgcactccagcctggatgatagagcgagactctgtctc

SEQ ID NO: 632958 - DNA, 403 bp, Homo sapiens
atgtatagacttgcaagaggaactacattagtacacagcaccagaatgtatattacggtgtggctttgagagccgtgggagggtaccagcagaaaggttcgtatcatcagatagcatcttatcacgactactatgcctgctatttgaagtgtaattgagaaggcaaattttagcgtgctcactgacctgcctgtagccccagtgacagctaggatgtgcattctccagccatcaagagactgagtcacgttgttccttaagtcagaacagcagactcagctctgacattctgattcgaatgacactgtacaggaatcggaatcctgtcgattagactggacagcttgtggcaagtgaatttgcctgtcaacaagccagattttttcacaaatttatattgtaa

SEQ ID NO: 632959 - DNA, 118 bp, Homo sapiens
ccgacagaagaaggagagtgaggctgtggagtggctggcggaaggcccagcatgtacaggatagtacttggagaaagacccggtgctgagtcgtgaagactggccatgaagtacacct

SEQ ID NO: 632960 - DNA, 187 bp, Homo sapiens
  misc_feature (181)..(181): n is a, c, g, or t
tggaatgtttcattctcccagatttatgaacattttttcttgagcaattggtaaagtatacttttgtaaacaaaaattgaaacatttccttttgctctctatctgagtgccccagaattgggaatctattcatgagtattcatatgtttatggtaataaagctatttgcacaagttcagtnagaaaa

SEQ ID NO: 632961 - DNA, 472 bp, Homo sapiens
tgttgagtggtattctattgtgtgaatgtatctattcatcacttgaaagatattgggattgtctctaacttttagacattacgaataaactgttgtaaatatttgcttataagtttgtgtgagcataacgttttatctcttttgggtaaatattgaggagtgctactgctggatcatatgataggtatatatttaactttataagaagctaccaaattgtttcccaaaggggctgtatcattttatgttcctactggccatgtatagaaattctggctgtttctaattctcactgatccttgatattgttagttttttaaaaatttatgttagttattctaatatatttgtagtagtatctcatcttgattttaatttacattttcctaatgactaaggctgtttggcctcatttcatttggtaaagtctcagatcaaaattttgctcattaaaaaattttcttgttttctt

SEQ ID NO: 632962 - DNA, 109 bp, Homo sapiens
gacttacgtccttacaaaactccatctttccctgacactgcatcttctctcttttttttttcttgagacggagtctgtggcccaggctggaatgcagtggtgtgatctt

SEQ ID NO: 632963 - DNA, 903 bp, Homo sapiens
ggaagaatagcttgaactcaggaggcagtggttgcagtgagccaacgatcgcgtcactgcactccagcctgggtgacagagcaaaactccgtctcaaaataaaataagaataaaatggccatcctggcaggtgtgaggtttatctcattgtagtttcgactttgcatttccctgaacactgatgttgagccttttctctatatacccagctggccatctgacatgctcttctttggcagaacctgtctattgcaagctccttctgcctcatgcttcctaaagtgctccccatactctgcgccacttgcagttgctcgcgagctcccttatcacattccggcatactagccctctcactcacgactactatgcgctcgccaaactatcctctatcccctctgctcacggttggccttccccatccctcgatcattcccccctgtgcctgtcgcacacaacctcttcccagcttcgacgctccgtcccaagctgcgtcacgccctcgctcccccgtcgcgccctgcgccgcacccaggcgccgtcaccactcctacagaatacttgactaggccctctctaccccatattgctgaacaccgcgcaatacgagaggctcgcaaacaagcgcaaacagtgacccgggtggtacacacgctccgtacctgaactcccccaagggggcgttacacgaactgggcgcccacaccaccgcgacccgaacacgggtcacagggatgtcctccaacaacgaagccgggtaacctcgggaacccccccccggtagttcccccctcgacaccacttcaaacccacaaaacggcggccacacgacgcacggggaacaacacaacgcccatcgtaggcccaacggaccaccaaccagcgttgggcctacgcaaacaa

SEQ ID NO: 632964 - DNA, 128 bp, Homo sapiens
atcgcctgaatacattgccttctgggacaagctcaagcgcggcgaatacgacgccgggcgctatcgccgcatccacaaggatggcggcgacgtctggctgcaggccagctacaacccgatcctcgatg

SEQ ID NO: 632965 - DNA, 130 bp, Homo sapiens
taactgtcatccaggagtgaggatccccctactaggagctgcagcctgtctttcttcccctccatcagtttccaacacaccctcgatccaggactgaggcctggctcccacgccccatcccctttccatc

SEQ ID NO: 632966 - DNA, 332 bp, Homo sapiens
gtcccagaagagaccgcaagaacccgctgacccccagcgttggcgtggttgacaagaccgaggagacgcagccgcccgtggcgcttaagacagaaggaataagacgagtttggaagaagacctgatcaacaacttcagggtgaagggaacatcatttgatagaagaccagaaaaggcgaccacctcgtgaacgaagattcgaaaagccacttgacgacacagggtgaaggaggcgaatttacagttgatagaccgattattgaccgcactattcgaggtcgtggtggtcttggaagaaggtcgaggaggccgtggacgcagaacgcgcctaa

SEQ ID NO: 632967 - DNA, 459 bp, Homo sapiens
gtgagcgacacctgggtcttccggggccactccaggtgcctgtaggccgctgttaggttcagctcctgctgggggcctttcaaccagcagttcaggatcttacggtcccggctgttctcagcatggatctcgccctgcactgctgtgttccaggctgactcgagttcgctccagctgtggaagaggctctgtgccaagactgtcactgtggaaacccggaggtaggtggtagctgcggtgtaaacctggatcttgccttccctgttggggccctgactcctgcagcccacgctgaccaccaggtcctttagggtccaggccttgcccagcgttagctccaggacagcctggaacacagctcggtgtggccagtatagcctgtgagctgcagagaccatcagccatggactatccaggttcaagactccttcccacttccacagggtggcccgagatgtg

SEQ ID NO: 632968 - DNA, 465 bp, Homo sapiens
  misc_feature (233)..(233): n is a, c, g, or t
tgtggtcgattctgaggatccccttatctcggccatcactcattgctccttcctgtgaagtcccccagctaacacggtgaactgtccccagccctatcatgcattcgcatttttcaacttgcgatgccaaggtatctcaactcagccccttactccacaatctgctttattttatatcctagaatcttagcgttcacatccttttcagttgtttgttcccctgatatttgtantcctttaataagtcaaggtatctctaagacctggctcttttattatgtacggtttcttcaaagagaagggtgtatagttgttaaagtgccagctgaccatataaagtgctctataaatactcttctccttcaccacagggatgcacttacagcccagggaaggggtctggacatcagctgtacgagagagacattcatgaccaaaatggtgaaagtcactcacaaccagtgt

SEQ ID NO: 632969 - DNA, 1171 bp, Homo sapiens
ctctgaccagcaccatggtcgtgttggctaagtaacaagtcgccttacgaaaggcggcaaaaagggagccaagaagaacgtggttagtatccatatttctaaggaaagtattggtatgatgtgataagcacctgctatgttcaatatagagaaatattggcaaagacgctcgtcaccaggacccgaaggcaaccaaaattgcatctgatggtctcaagggtcgtgtgttctgaagtgagtctcgcgtgatttgcagaatgatgaagttgcatttagaacaattcaagctggattactggaagatgtatcagggtaacaaactgcctgactacacttccatggccatggcatcttagccgtgacaaaatgtgttgccatggtcagaaaaatggcagacaatgagttgaacgctcacgattggatgtcaaagacgtaccgatggttcacttggcttcgatctgttcgtgtgtaggttttactaataagaacgcagacaatcagatacggaagacctcttatgctcagcagcaacaggtcctgtcaaatccggcagagaagatgatggcaatcatgatccgagaggtgcgagaaaatgacttgaacagaagtggtcagtgccttgattccagacagcatgggcacacgacgttgaacacgcttgccaatctatctatcctctccatgatgtcttcgttagaaaagtgaaaggatgctgaagaagaccccagtatgggactggggacagcgtcatgggagctccaaggtgaaggccaggaaactgggaacaggccacgggggacgaaacggggcgccacagctgaacaggcggaggatatcgagcacaagtcacgccatcggacaacgtccaactccactagaggcaagacaaaagggcactcggggaacccatccacacactaaatcaattacacaaaaaaacccaagaagacaaactacacaaatagaagaatcacaaccacctaacaaacaaaaagacataaataatatatacacttatctcactaccaccaaacataacaccaatattgaaatcacaacacaacactcaagctaccaaactagttaactaatatataccatacatagacataaccctcactaactacatctactcatacatatatattaaagcaacataatacaacccaac

SEQ ID NO: 632970 - DNA, 781 bp, Homo sapiens
tgccggagccctctgtcctgtctgaggtcaccaagcctcctccttgcttggagaactcctcgcctccctccaggattccggagcctgaatccccagcgaagccaaacgtccccacagcctccacggcgcccccagcggactcccgggaccgacggaggtcctaccagatgcctgtgcgggatgaggagtcggaatcccagagaaaagctcgctcccgtctcatgcgccagtctcggaggtccacacagggtgtgactcttacagacctgaaggaggcagagaaggctgcagggaaggccccagagtcagagaagccggcgcagagcctggacccttcccgaaggccccgcgtccctggagtggagaactctgacagccctgcccagagagcagaggcgcccgacgggcagggtccgggaccgcaggcggccagggagcaccgcaaggtcggacaggacagttggacgggggcttgccgaaggggacagacagcggaagccgggtgagacacgaacacagagagtcccagacacccctgagaaggggcgggccccctcgagccgcgcaggacaggcggtggccagcggggacctcagacccagaatgctgaggccagacatcggaagagccagacggacggcttaggaccgctgtatgcaagagctgcgcaagggagaccgcagcggcttcgccgaggccctgaccgaggaccacgctgcggatggcgcagctccaggtggagctggacgggacagcaaaggccgaccgctcggtgacaagg

SEQ ID NO: 632971 - DNA, 164 bp, Homo sapiens
tcttggagaatcaaagctttgcgcgaggcccacgacgctccgctcctccctcagctctgcccagtgctgacttcaaccagctggccgagctggaccgccagatctaagagcttcctgcgtagcctccaacccctacacctggtttaccatggaaggccctagga

SEQ ID NO: 632972 - DNA, 143 bp, Homo sapiens
tgagccggtcccagtgatgtgtcagaagcacagtgcactagcataacaactcggctttggcaattgtctgaagctctaaaacgctaagcctgtctggtggcttgaagaaccaacaggacataagttttgggctttatgacact

SEQ ID NO: 632973 - DNA, 433 bp, Homo sapiens
  misc_feature (43)..(43): n is a, c, g, or t
  misc_feature (121)..(121): n is a, c, g, or t
tcctcaaaaaaaaatgcccatagttggttatagaaagaaattntgggcccaggtgcagtggctcatgccctgtaatccccagcactttgggaggccaaggcgggcagatcacttgaacccnggaagttagagacccagccctgggcaaccgtggtgaaaccacatttccacaaaagatacaaaaattagctgggcactgtcatgcgtacctgtagtcccaggtactcgggagggtcaaggctgcagtgaaccgtgatcatgtcactgcactccagcctgggcaacagagtgagaccctgtctcaaaagaaaaagttgtgaaagccatcaagcccaaaacaataaattactgctgaagaaaactgtgtccagaaattgtatgtgacttcataggatctgtgacagagccaatcaaggaaatcatgaaagagata

SEQ ID NO: 632974 - DNA, 714 bp, Homo sapiens
gagaggcgcgctgactgctataactaagtgatgccgcggtggtgggctcctgttgtaactcatgtcagggcccactaacaactcgtgcgcggttttatcatcattgctgagtcaacatgcctagcggcctttactacgtctctcactgagagtcccacacctttatcagatgagatagtgcagcgtctatgtaccctaggtatatgcgacagtgccatctcgcggtgatactgagacgctaatactgctaccctgcacaacactatctcctacgtggtaccctacacctatagtgagttgcataagagacgcaatatgtgtcataggctgaacccatgggctgaaacctgtattgacagcatatcatgaggctgagctctgaagaatgatataccccacgagtctgagaccccactggcgatgattgagacctcggcggacagataacactttctgagctgaggggcggaggagcatgcaattgcactactcgagatggtgaggacagagagcctgcacttcagcagctgagggctgtgttagcacatattacaccacctcgctcctgcgggacagatgccgactctgtgtcctgatcataacacagagggcatacaacgcgcagctgttaacatgacggctgagagtatagagaccgctgcttctctgcgcatattctcctgactaggggccattcctgtttacagacatact

SEQ ID NO: 632975 - DNA, 747 bp, Homo sapiens
ggagtgcacctgaagatggcggatgctgtaggacgggttgctccgagcgtcggttgtcccgacatgtgacgtgccattccttggggcgatgactgccacgtgtggccctcacggcctgctgcgatgtgggaatgaacagattcttgacaaatttattggtgtactggttccagtcacatcaaaattattcgaggctacgcagttctctcatgccatgctacctgattgtcaaaccgatgcatgcaccctattttaaggcgtacagccgtcgtcaatggcaacggagtccaatagacctaaggccatcgatgactccagaggggaaactatttcttggtcgctctctcttctatcctcttgtgcatttcacctcttgtgtcgtcctacagacacatctgttgctttctagtgacaaatgctaacgaatttcacgaacgtgaaccgtgaacgttgtcgcagcctcagtggattggccactttaggccaatcttgcctcggatgagatatcgccaagaaacgaattgggggattgggccacatgaacatcagcgctctcgtcatgactgtgaactaatcagagttcccagagactacggtgtgcgtgtcacgaaggtcctggtcttgcactaagaggtctcttcataattgaccccaaatggagtcatcaagcatctgagcgtcaaccgaatctcacagtgggcggaaccgttggcaaaaaacctcgcttgttgaaggcgtccagaatta

SEQ ID NO: 632976 - DNA, 227 bp, Homo sapiens
aggaggtcagactcgatcatcgcattattgcctacatgtctcaaggtctaggtgcatgatgtggatgcgactgagagtgcttgtgtactatctgaactcaagtcgtaactaactaggttcctcattctatcagtcacatcatcgcatcgaagggtaaaatgtaaaatctcggcaaactcctttgccagggccggttccctttccaggtgtggggttggtgtgtaggg

SEQ ID NO: 632977 - DNA, 1190 bp, Homo sapiens
agcgggggcggaggcgacgttggggttgtttgggctcctatctttgcctctggagctcacggtcggcgcttgtcataacccagcacatcgcacttttcgcacggaagtacgtcttactagaaaggcctaggcgaggcctagagacgaggagcggcggagaattgcggggagaagcccaccacgcagaggagccagcgcgcacgcgacggagcggagagataaccgggaaccaagaccactactgcgcgagacactcgaggacgcagggcccgacgcaatcaacagcacccgggacggatcgatcatcacgataagcacagcgtaacagtcacactccagcaacaccaagaagaacataacggcacaacaactaagacgaacatgagccaacatccgtcggaacgcacgccccaggcagcgagcacagactcccgccgcatgacatgccgcacggagcacaggagagacaacagaggagatgcagatacagcgcaacaacaagatgacaccgcaggaacccgacccccaagtcatcaaggggcagtcaacagagccggacaaccgacgctccgactgaggacggccacgcgctcccaccccccacccacacggatggcaaacacacccagcggctcagcacacgactcactcgcgtgcggaacacgcaggcaaggcgaagtcaagccggacacacgcgacctcccagcattcggtacagactgcaaccgcaagcagggccgatcaaacaggcagcatacacagtcgaagcaggagaagcaccagaaaactgggaagaaatagcaaacccgcaagacggcgtacatggataacgcccaggaaagcgggcaagcaccaaactcacagaggaagcgcaggcgaagatcaacagaacaatcagcgagaccgcagcggttagaggagaagataccaaagggacgcagagacgcaggcacgcgaaaggcaaaagcccagccagaaggaagcagagacgcagaaagcaacaggggatggacggcagaggcaacgaacagcggaacaaccagcaggggaccagggcacagacaacagcgacaacgcgacaggagaagacagcacagaataaaaagaacgagaacagcaagaagagaacacccacacacgcaccaccgcaggcaccacccacacagacacagacaccaccagacacagag

SEQ ID NO: 632978 - DNA, 264 bp, Homo sapiens
gccctcacacatgagcaagaaagagatgtggccaaagacattcatggagccctgtttgttaaaacagagaaaaagaaattaagaaatacccagcctgggcaacatagggagaccctgtctctactaaaaataaaaatttatacttgggaggctaaggcaggaggatcacttgagctcagaagatcgaagcttgcaatcagctgtgatcgtgtcactgcatgccagcctgggtgacagagagtgagaccctgtatcaataaagaa

SEQ ID NO: 632979 - DNA, 150 bp, Homo sapiens
acgacttatccaaggaggaagagaccaacgaaatataacctcccacgtttgtctgtacatactggccgctgtgttagacagctgtccacctcctctgtggaggaaaggccttggggatctcagagaatgggacagcccccctcctctgtg

SEQ ID NO: 632980 - DNA, 170 bp, Homo sapiens
agagagagaaggggaatgggagtcactactaatgggtatggagtttcttttgaggtgataaaaatgttctagaattagatagtgataagcattacacagcttcatgagtatatttaaaaccaatgacttatatacttaaaaatgaattatttggactgcaatccatctca

SEQ ID NO: 632981 - DNA, 1324 bp, Homo sapiens
tttttttttaatcctctaaaaatctttactttttaaaaatcagccacccaaatgggtggtgcgcggtggggagcagggtgggtgggtagaaggaactgggggtgctcgtggccagtggcccactatacatgaggagacttcgtgagagcccgtcttcccgtgcctgagggacactttaacttttatatagcagcatacattaggggtcaacggggaaggcccaccaatgtcccttgaacatccatgggcacaggggaaaggaagtgggggagaggtgggatgtgttgacccacctctaaaaggtgtttgtcgccactatgagtcagagcccccaggggtgagaagggcctacaagataagagccgccaacaggtccccctcagtgataacgcaggggggctcacatcctctgtggccctcagcataccacacaagcccgcggcatcagcacaggggcaaccaagatatagcaaaaattcgggtcacatcacttttgtcacaagtgccacaggagaactggcatagtagatggggaggtcccatggggggagcggcctcacaagaggattgtggagaccttgagagggtggcccccacaggggttttgtcgcaaaacattgtatagtgctccctacgcaatagggcgccccatagataccgcacaattacccaagaaacacacatacgtgtagatcgtgggcccacaataccgggaggccaagatagacgatgagacagagattcgtcgcccctttggagcggccctaccaggacaggcaccgggatatcagctagaaggtgcattgtgtcataaacgcacgtggcataccacacaaaaaattctgcaaaatgagagaacaagccaatatacaatggagggaagcaacagtagaagtagaaacccaaatggaacccaccccaaagaatttatggaccacagcaccaatacgtggcaccacgagcgcccatcaaccaggatgtagaggcccacactatgcagacaacgacaactaataaagacgcacccaaaaacgagacgatgacaacaaacaaagagggtggaacccaagtgggggacatcatctgggcacacctatgaggcccaagaagacggggtttgtgagggatataaactgaggagacaagcgccgccaaatctacgtgagaagaacagagcgatcaacaggggcggcaagaacaagcagcgagagcgaccagaagcgaacgaacagaggggcaaatgagacccgatgaggtaggacagaaaaacaagaagaaaacaactagcaagcaacacaaacactaagaatgccaaacaaatgag

SEQ ID NO: 632982 - DNA, 141 bp, Homo sapiens
tggaaggaggcacagttaacccagaaacaacacccggtagtaaaggcatctgctggaaactaagtctagaaaaacaaaggtctgcattgaaatatgtagtttaaaaaacttctaagagggggaatacgagtatagggagtg

SEQ ID NO: 632983 - DNA, 235 bp, Homo sapiens
atcaagacccacgttatgaaaatgtcagcataactcgcctaattagttgtcctttatataatctcattgcagtgtaaatcaattgcgatcaactattttattcatgatgatctttcattttataatttatcctttagattcagtcgctatgtgtttttataaaggaaacattttttagagacgtctgagctcacttttacactggtggtgcctactgccgttcctgttctagttt

SEQ ID NO: 632984 - DNA, 251 bp, Homo sapiens
acacttttatagattaaactttgctaatactctacagtaaatgcttttgcggttagttactagaaggatgcgctaccgtggcggcacggctgagccagtgtgagctcagcgcaattgtatctgctggactaagcgaccggatggcttgaactgaccgctcaacatatggcccagataccatcgctcttcgatgcgcctgcatgtactgatcagtcccaccaagggctgctgcacgcgaccttgaaccaggg

SEQ ID NO: 632985 - DNA, 939 bp, Homo sapiens
tcagagtaagtgagaatacagtgctgttattgatatgctataatacttattagttatggtgcagcattagattattcttatattataatatgaatataaaaattgttaaggtaaatgaaaaaaaaaagaataaaaacaggatggaaaaaaatatataaagatagtgaatattgttaatgttgaggcatgtgaaaacttaaatgaatttatgtagaacagacatcttttatttaaatccatctgaactgtcccaaaaatgtaatttgcaaagagcttcaaacagcaaaaatataccattttaaggcatgtggtgacaatgctatttgccttagttcattcgttgtttactttgcaaaattgtgacttttaagtactaacacatttgattgaatgtgtattgaattggaatattatttctaaattcagcattgagtccttagttgatgattttcttttaaagaaattagtttatttaaaagcagataagccatgggggtgggagttagtgcatatcatcagcctccatctaaatgtgatggtaaagatgtgcaggataggacagttagaatgagtggcttgacactacatatggtgcatcatacctcaagtgaagaagcgaggatgtgacacacagtgaatgtggagggatccgagaaacttgcacagggattaagtgagggtcctttggtaaaggtaaacttgaaacacttcagttaaagtcctcactcgatagaatatggggtacccaaaccataatgtctcgttaaagagccctattaaattgatgggctggagaaaggtaggacatatttaaagcaatggcgggtacatatgctacaaagtgcttacaaacaaaggcggcgaatagagaaagacagatatgcatagtatgagggacaagacacgagagatggagaataaagtgtattatagtagagt

SEQ ID NO: 632986 - DNA, 420 bp, Homo sapiens
  misc_feature (420)..(420): n is a, c, g, or t
taacgaggaacacactgtacaaagggttgacgattcatggaccggacgatcctgctcctgactcaccgctagacgctctagcggaggaacacgacggtgaggaagcccgcgcgcaacagccatgggtgttaaggataccgcaaaaacacccggggagccggaggaggcaatgtaccggaacggaataaccctaacaagccgcaacgcaaaagccaagaaaaaggagtatgcagactcgagaagaggagcaaaagaagagacactgaaagggggaccaggacgaatgcctaccaagactttgagaatcactacaagactccaagtggtgaaggttctaggacgtgggatcggtgccagaggagaattcacaagcgactcactgacttgcacagtcccgctgagatggttgcagactactcn

SEQ ID NO: 632987 - DNA, 329 bp, Homo sapiens
cagcatcaccttgggcggtatctccggcagctgcacgccatcggaacttcctgtgtttttcgtgagcatggacctggtgcagacagcaccctgtccaggttcagatgtgacgcctgtaatcccagcacttcgggacgccaaggtggaaagaccgctttgcgcccaggatttcgaggctccattggtttttaatgcaccacttcacttcccgctgggccgccggggaaggcttcctctcttaaaaaaggagggcttagtgctgttccttaaacctgccgtattttaactgggcgaacttagaaataaactgttttcatgttatgaaaaaa

SEQ ID NO: 632988 - DNA, 1248 bp, Homo sapiens
gcgtgcgacgagatgccctcgttcggagaggggctcttccccgcctcccgttgaagaaagaggtctcgccccaaagagatgaacccgggggtgaagaagtggcgaccagagcaccccccaagagaggaccccctcgggtttttccctttggggcgccccaacgaaagaagaggcgccccccccccctgattggggaggattccccagggggtggacccgcgggggcgcaccctcgtggggcgccggagagaagcctgggaacttgggggcccccgggagaaggggcttttgtggtctagccccgggttgaacccgttgttggaaagccccagatgttttttggggccaagggtatgtagaatttgaatgcggaacaggttcattcgggggggtggagccccacaggggccaaaaaggggcttacccaaaagaggggggtttcacccccagtgcgtttgggcgaccaccccaaagaaaagcgttgcgccccccgccaagagccccccccccgaggggcgcttgggcgcaaaaggtggccccttgtatttgggggcactatggcgaatctcctgcggttgtttttaggcccttttttcttgttggcacccgccgcctgtggcgcagaaaaaggcgcgatccagtcacccccgcacctttgaggagtctcaccacaagagaagaatttaatataagaatttgtgcacacggggttatcccttattctaacaggagccgcgcacaagcttgagttcacaggggacccatatgcgctccccactcggctatttgagcctaattcttgaaccaagagagcacttcaacacccttcttggggtgtggcgtttttgtgccacctaatgggtggagaagtggagccacactggagattttgttcatatgctcgagaaagggcttgttgttggtggggagacccacaagagaagcgggtggctccacaccctctccccaaagttcctttgctgcggtggcacagagcgaaacgcgcgggcttcttggagagaaagagttgagccttaaagttcacttgagcacccaccctccacaagtttggccactggccggttccacgagaccactggagaggagagaaagaaagcacatttcacatgggagccacactgagagagaaagagccgagaattgcacaaaggagaagaaggagcttaaagccagggaccagattttgcagattggtggggtttccaatataaagttattttcccctga

SEQ ID NO: 632989 - DNA, 927 bp, Homo sapiens
tggaaaaagtcagggaggccagggggtgggtttgaaaccagcttgggggggttcgattccttcctttttggtctaaatttatgtataggggttctcgaaggtgtggtaggggggggggcatccatatagtcaccccaggtttagggagggttctctctactataaggactttctcgctctcgaagcagaaggcttctcaaatcatgaaaattataaatataacggcggtagaggaaatgaatgagcctacagatgataggatgttcagggggtgtatagcatcggggatagccgagatacagctcgggagcattaccgggataaggccgcaaacagtgtcgcgcagaaacaccaagttagattcaccgccgactgaactattgcctcagagaacagggattagggagcgaacagaagggaacaacggggtgtacaccatgcaagcaactacggggaacaatcacgcagacagtgaagcccccacatgaatgaaatcaacacgccccataattgaaaacgaccacagcgacagtggccaaacaacagaacacgatactcgctagatacaaaccaagtgtaacagcgacagcagactaggcataactactagcggccccgcaggcccacacctcagagaaaacaaagaaaaagaagactacgctagagacacaagcaaccactgaaagcacacacacaatacaaactgagaccccggcgagaattgagcgcacaacacaagaaaacaaaattataccacccgcaggacagacatccaacgatacttgacacacgcgaacagtacccacccacgtgtctacgcgcatcccctcgtgcaaagacgtaacgtgcccaccacacaaacacccgacagcccactacccaacacacacacgagaccccaccggactcaccgcgaacaacacatgc

SEQ ID NO: 632990 - DNA, 321 bp, Homo sapiens
gatcccgcctggattctctatggatgtacatagaaaggagtatggatgagctatatcctttttaaaggatgagaccttcataaatggcccctcggatactggtgatcccgccgcaagcgcaaatgctccagtagagttatgaaaatatatgttaatctgctctgtttcttcactggatacaagattcgagaggtcttctcaaatctttaggataagctggtttaaaacctgaatagttaccgcatcatttaccttttcataaaaatagatatatctgtacagaatttctataaaaagctgcacttgtagagagggtccagg

SEQ ID NO: 632991 - DNA, 265 bp, Homo sapiens
ctcgaactcctgacctcaggtgatatgcccggcgcattcacatattttgaggatttaattcaccaatctgttttcctctctcttgtttccttagctagactgaaggccttcagtgtgtttcctagacacaactcccaaatctgtggtccctttttctattgcatatttacacagtggtcagtttctgattactttaaccactagaacagaaatctgaaactagaagtgatgaggcaaagctttggaacagcagcaaaaacagccc

SEQ ID NO: 632992 - DNA, 1025 bp, Homo sapiens
ggcgtctgtgaagaccgaattggatggagccgagctgagtgctcggtattcctgcatgatggtcatgggttttggtagattcaccgcgtgtgtgagatggggtagaggagatgttgcctctggtgagtgatggtggtccgagtttcagctaagactgtcgggggacagataagctcagaaatgagtcacgtgaagcagtgctatagtacgtgtgatggacgagagtagcggggatgtgaactgatcgcccggcgcgctgcgagactagtgcgccaggatagcacttgagtgcggccaataccgcattgtaaccctagagggcatctcgagtttcacacaggtatagtacgagcggactggcacagagtccaagagtcccataagccatattggagaagctttaggcattcacatactgcgtgggcgcgaggccgagatgggaaagcgtcgccctggccataagaggacaattgggcatcatagaaaacgaaatgtggggtgggtggcataactttcttctgtggacagtgtgcttatgaaggattagcatttttcaacactcggggagtatgactttttggaaatgattgaccaccttcaccgtgttgggacattgcttgacttgcacgcgtattggtaggaacacaaggtatgtgaacaaccagttgcggacagattcacgagttgaactaacctctggacgtaagtattgaggacttcggcgtgagtacacggttcaccgttaatagtcactacggccagaccgcgggatccaaggcgacagttggacccacagaaacattgtggtcacacgtactacactctgatgggccggctagtatcccccaacgggacaagtacaatccagacccaaggacaaatgggtcgccgaattgaacagtcgccaccgccacggacgaaggcgctccggggatatccccaaaggacgaccacgaccaactttggcgccccattcggacacacaacagcagtacactgcgggcgagggccatgtacccacacag

SEQ ID NO: 632993 - DNA, 753 bp, Homo sapiens
agcggcggaggcccatattacactatgacggttgatacacagtagaaaaggcagataatactagagaagagacccgaaggcaagaagggttgatgcttggtggcaaggtgaagaagggtaagctcgataagctaacgatgcttcaagaaggggaagaaccctatggcagccgcatagcctgtccgttgtgcagaggaatttgacaggtattcctcagagtctgcctgtgtataccagtaaaggcactgtgcaagaggaagtactcaggccgctaaaatccaacagttgaaaacgacaaaagaacggagaaggtactcgcaactgttacaaaagcagttggtggtgacaagaacggaggtacccgggtggttaaacattcgcaaaactgcctagatattatcctactgaagatgtgcctcgaaaagactgtagagaccacaggcaaaaaagcccttcaagtcagacacgtgagcaaactgcgaagacacagacattaccacccgggacacatactgatcaatccatcactggacgccacaggggcaacgagggtggtaaaacctgaatgcagctggctaagtgagctatacttacttgttgacctggaacctcatgagtcctcaaatcgaagtcccgtcatacagacagaacaccaccaggaaaatacagtcattagccactacaaacacaaaatcgatcatcaagcaatgtaaacaatgcaaaacatcttacggatgctcacttcacgaagag

SEQ ID NO: 632994 - DNA, 780 bp, Homo sapiens
gtgcatgtgcttctccgcggcgctccgggcccgggcggctggcctctccgtccacatgtggagagacatgtaaggaattggcataagacagttatgctatagtggagctggaggagcttgattgtgtgcacagaagaatactcctgtataataaccctggatacgtccgatttgatttctacaccaagaaagactataagaggatcagaggcgaattgtagtgatagagaaacgtagtcgcagaaggccatagacagcaagcagctgttacttccagtactctggatttaggcccatataggcagaatgggtggttgcccagtcatcgtgctatgaacaagggtgcatgaagttttgagctacatgtacctccaagtgagagtatatgaagtagcagacttggtttatacatatgtagtacatcgaaagccagttgggaaagtatggacgattcaggtctgcgactactacaccctgcatgcttcgaaagtctgacaggatactggaggccattcagaaaaagcttggaatgaaggtcggggagactacacctgacaaacttttcactcttatagaagtggaatgtttaggggcctgtgtgaacgcaccacgtggttcaaataaatgacaattactatgaggattgacagctaaggatatcgaagaaattatcgatgagctcaggctggaaatcccaaacagggccagagtggacgctctcttgtgacagctgagtttacctttggatggacaccaggactggttgggtcagcggctaaa

SEQ ID NO: 632995 - DNA, 785 bp, Homo sapiens
agcgttctgaggagcctccatctccagttgtgggtgaccgcccttattctccccgggggtatctctcctcctccctctctttaggtccccctgtatacggtgttcgcacacaatatttgtggggcgttactcttcgcggccttttcaatggggcaatagagctgccaagcagttattcacttgcgcccccgttggtgggccccgcgaatgctccccttgttggggtttctcgtctaccgccacccggtcaccccttgggtttggcaccccagtaataagttgggttaaacttgaatttcccgcgggttttcttgtgactgagcacttataatcccccttattgggggctcctccactaatatgattattctaaaacaggatgcaatccccccacccctcttttttttcagcacagacttttaatcgagacaagaaaatcatcggggtcaccaacagccccgaagatggccaatttgtgcagcggctcctcggactcacctcgccagatgtctccttccccagggtggggttctagcaaatctcgtgcctcatgcctccccacgtagtgctgacaataacaggacgcatttctcagcgcataaccacgaatttttttttgtagtgcccgcgtgacgcacgattggggtcaactcccccatgactgccccacgtcttcgctggtgcaggcatctacaaggacgcggcgaggataccactgcgtccccgcggtggtcgagaacgctgccgggaccaaacattagacacccctttccccccacaaaaca

SEQ ID NO: 632996 - DNA, 356 bp, Homo sapiens
ccctagcggggaggtgcaatgcgccgcaagtctcgtgctcactagcaacctactgcctcctgggttcaagtgaactactgccgcagcctcccaagtagctagggattacaggcgcctgccactacacctagagactaaatataatgtattttatagtaggaggtgaggtactatagctatgttagcccagagctgggattagaacttctagagctacaagacaatcctaccaagtttaggcctacccaaagtagctgggattaacaggcatagagccaccgtaacctggtctatggcaagcttcttatactgcaccctgtatttatcagcagtcttatgtgatctgtgtctatgtg

SEQ ID NO: 632997 - DNA, 209 bp, Homo sapiens
ttatgctcagaaatgtctgaactatttaagaattatctaacacacacttcagagaggccgaggcaggtggatcacctgaggtcaggagttcgagaccagcctggccaacacagcgaaaccccgtctctaactaaatatacgaaaaatagccgggcgtggtggcgggtgcctgcaatcccagctacatgggagtctgaaggcagtctgga

SEQ ID NO: 632998 - DNA, 430 bp, Homo sapiens
  misc_feature (261)..(261): n is a, c, g, or t
  misc_feature (317)..(317): n is a, c, g, or t
  misc_feature (330)..(330): n is a, c, g, or t
  misc_feature (359)..(359): n is a, c, g, or t
  misc_feature (383)..(383): n is a, c, g, or t
tggtgatcagtgaggaggtgagacctgtacctaaaagatttccctcatttcctgcgctcataaggcctttctccaatgtgacctcgttggtgttgaatgaggttgcccttttgtctaaaacatttcccacattgtccacactcataaggatctttttccagtgtgaattcactgatgattactgaaggtattacatttgctaaagggatttcccacatttcactggcacacgtaacatccttctctaggtggaaaaggttngggtggggaacaagtgagtgagtaggttgccgaaaggttttgtgggggccagacanggtgggctcatgncccgttaattcccagcactttggggaggntgagggttgggggcggatcaaccnagggtcaagggttttcaagagcagtcggggggccacttgggtggaaa

SEQ ID NO: 632999 - DNA, 127 bp, Homo sapiens
tctgaatacttcgcgtggggcacatgatccaacgttgcaccaacccgaaacatccagcgtatcaccattacggtggtcgcggcatcaccgtttgccagagatggagggagtcgttcgaaaacttcct

SEQ ID NO: 633000 - DNA, 1203 bp, Homo sapiens
  misc_feature (1113)..(1113): n is a, c, g, or t
  misc_feature (1117)..(1117): n is a, c, g, or t
  misc_feature (1119)..(1119): n is a, c, g, or t
  misc_feature (1122)..(1122): n is a, c, g, or t
  misc_feature (1125)..(1125): n is a, c, g, or t
  misc_feature (1127)..(1127): n is a, c, g, or t
cttacatgaggtaaaagctaaatgaatgattatatatgtaaaagggttttgtcaagtattaggcaacagtaaggcatttcagctactgagggtaatcagaattgcttggaatcagtcttcatttttgtctgtccccaagatcatagtatgcagagtctgctaacattgagtgcttcttacgtgttactcactttggtgggctttaacatttatattaataattttacttgtgtttctaacaggggtcttaggctatcagtttaggctccattttctagattggaagggcctcagtattgggccatagaatcaatttctgctggtatccttttcccttaatctccactctcggctcagcttagcactttgcatatataagttctcttgccagtaatgataggacttgtattacttcgttaaattctgcctggaacatatataaataaaatttgctgttagctttagacctatattcctaaatccatttgaatggatttacccatttattccttacattaaagaatcttggagaatattgtgcaaagaatggccagatgggattaacaaagggaggttttccctgagaaagaaaaaggtaagaattatccaatgttaactttacaaagtctgtaaatctattctgaatagctttttttcctcgaaaaattttagttgatgaggaatctggattaaaggattcagaaccagagcgaaaacgcaagaagactgaagactcttcttcaggcaaatcagtggcgtctgatgtccctgaggaattagactttcttgtacctaaggctggattcttctgtccaatttgttccctcttctactcaggtgaaaaagcaatgacaaatcactgcaagagtacacgtcataagcaaaatactgagaaattcatggccaagcaaagaaaggaaaaggagcagaatgaggctgaagaaagaagctctaggtgattgggggaaaggaaagaattcactagaaatttgtttagggtccagttgatttgtgtatttttgttatcatttaatttgtaattttcgtttcagaagcaaatattcgtgttgtacaaatttctgattgccctaaatgtagagagactgatggggnagtngntgngtntnatttttaaatcaaatcatcaggcatggagaaatattttttaaaagtgttaaaataaatgttccccctgtatattta

SEQ ID NO: 633001 - DNA, 1168 bp, Homo sapiens
  misc_feature (1052)..(1052): n is a, c, g, or t
cttacatgaggtaaaagctaaatgaatgattatatatgtaaaagggttttgtcaagtattaggcaacagtaaggcatttcagctactgagggtaatcagaattgcttggaatcagtcttcatttttgtctgtccccaagatcatagtatgcagagtctgctaacattgagtgcttcttacgtgttactcactttggtgggctttaacatttatattaataattttacttgtgtttctaacaggggtcttaggctatcagtttaggctccattttctagattggaagggcctcagtattgggccatagaatcaatttctgctggtatccttttcccttaatctccactctcggctcagcttagcactttgcatatataagttctcttgccagtaatgataggacttgtattacttcgttaaattctgcctggaacatatataaataaaatttgctgttagctttagacctatattcctaaatccatttgaatggatttacccatttattccttacattaaagaatcttggagaatattgtgcaaagaatggccagatgggattaacaaagggaggttttccctgagaaagaaaaaggtaagaattatccaatgttaactttacaaagtctgtaaatctattctgaatagctttttttcctcgaaaaattttagttgatgaggaatctggattaaaggattcagaaccagagcgaaaacgcaagaagactgaagactcttcttcaggcaaatcagtggcgtctgatgtccctgaggaattagactttcttgtacctaaggctggattcttctgtccaatttgttccctcttctactcaggtgaaaaagcaatgacaaatcactgcaagagtacacgtcataagcaaaatactgaggtaattttaaaaattcttactcttgaggtgttgttattgtcttagaatcaaattatttatctccccaaacgtacatttccccccgctttaggagaatgtttatgccagtttattcctcttaagtcctgttttctccttcagtgtaccttgcctgtaatntctagtccttattccttttccttgaacatcaacatttgccagagtagattctgcagatcactagtctcatatgacacttcattattaaagtgcttgctgttttgatgccctcttgc

SEQ ID NO: 633002 - DNA, 850 bp, Homo sapiens
cttacatgaggtaaaagctaaatgaatgattatatatgtaaaagggttttgtcaagtattaggcaacagtaaggcatttcagctactgagggtaatcagaattgcttggaatcagtcttcatttttgtctgtccccaagatcatagtatgcagagtctgctaacattgagtgcttcttacgtgttactcactttggtgggctttaacatttatattaataattttacttgtgtttctaacaggggtcttaggctatcagtttaggctccattttctagattggaagggcctcagtattgggccatagaatcaatttctgctggtatccttttcccttaatctccactctcggctcagcttagcactttgcatatataagttctcttgccagtaatgataggacttgtattacttcgttaaattctgcctggaacatatataaataaaatttgctgttagctttagacctatattcctaaatccatttgaatggatttacccatttattccttacattaaagaatcttggagaatattgtgcaaagaatggccagatgggattaacaaagggaggttttccctgagaaagaaaaaggtaagaattatccaatgttaactttacaaagtctgtaaatctattctgaatagctttttttcctcgaaaaattttagttgatgaggaatctggattaaaggattcagaaccagagcgaaaacgcaagaagactgaagactcttcttcaggcaaatcagtggcgtctgatgtccctgagggtaaagttaaaatgacatttttttctcccatatgaaatttaaaagtcgtccgagcgaccgagatcctgtagagtct

SEQ ID NO: 633003 - DNA, 448 bp, Homo sapiens
  misc_feature (8)..(8): n is a, c, g, or t
  misc_feature (21)..(21): n is a, c, g, or t
  misc_feature (37)..(37): n is a, c, g, or t
cctacctnatggaaaagctcntggaaacaataaggantttggggatttaccataaaattaattgggtgaaatagtcagccttgagtatagataaggtacgcaggtgaggggagcgcaggctcatgtcagtgactcaaaatgtgccctaaaacaattgtgaaggagaagtcggtgcctatctacaaatccctttagtaaagttccttcagtcttcagctgaaaaatgaagagactggcctaatgtaaaaaattctcagaagttctttctggttctaataccatgattcactaactgctattctgcagtacatcctgcctgaccgctattgaaagcaagcaagggcaaccctggggcagctggaaccggcccagcaacatcagcaatacacaccctaggcagtgtttctcaaattgtgttgctcagaatagtaataagtgtcccctacta

SEQ ID NO: 633004 - DNA, 443 bp, Homo sapiens
taatttaaaggctcatattacattattatttccccttccccatttcccagaagatactcaactattatagattattagctaacaaaacaaaaaccagtgatggttggtaaaaattgttcaagttcagataagaagctatgttctctagaagacaattctagagttcaattcccattgacttggtaagattcatgggatagagaaattcttagatctgagggtcccaggtcccagatgtttggggcattattcttaaatggtccggccacgggagatttcccccgaggcagctatgttttggagtcccttggtgtcccaggccttgggtttcatgtacagttgactcattttttcttgacacttgacataggcttcgtagtctgcaaagattttaaacctgtcatgataaaatagcatgtggatgatttcttggaagaggtcag

SEQ ID NO: 633005 - DNA, 3107 bp, Homo sapiens
  misc_feature (3017)..(3017): n is a, c, g, or t
  misc_feature (3021)..(3021): n is a, c, g, or t
  misc_feature (3023)..(3023): n is a, c, g, or t
  misc_feature (3026)..(3026): n is a, c, g, or t
  misc_feature (3029)..(3029): n is a, c, g, or t
  misc_feature (3031)..(3031): n is a, c, g, or t
ggggcgcccctcccccagcctcgttgccgccttgcagtttgatctcagagtgctgtgctagcaatcagcgagattccgtgggcataggaccctctgagccaggtgtgggatatagtctcgtggtgtgccgtttcttaagctggtctgaaaagcgcaatattcgggtgggagtgacccgattttccaggtgcaaattgagcatgacccagaattagaaaaagaaagccctggcttgaaaaccagtccaattgatgaaagtgaggtgcaaacagcaactgatagtccctctgttaaacctaatgagcttgaagaagaaagtactcccagcattcaaacagaaactttggtacagcaggaagagccttgtgaggaagaagctgaaaaagcaacatgtgattctgactttgctgttgaaactttggagcttgaaactcaaggagaggaggtcaaagaagaaattcctcttgtagcatccgcttcagtcagtattgaacaattcactgaaaatgccgaggagtgtgctttaaatcagcagatgtttaacagtgacttggagaagaaaggggcagaaattattaaccctaaaacagcattgttaccatctgacagtgtgtttgcagaagaaaggaacctcaaaggaattctagaagaatctccatctgaagcagaagatttcatttctggaattacacagactatggtagaagctgtagctgaagtagaaaaaaatgaaactgtttcggaaatattgccatcaacttgtattgtgacgttagtaccaggaattcccactggggatgagaagacagtggacaaaaagaatatttctgaaaaaaaaggtaacatggatgaaaaggaggagaaggaatttaatactaaggaaaccagaatggatcttcaaataggaacagagaaggctgaaaagaatgaaggtaggatggatgcagaaaaggtggaaaagatggcagcaatgaaagaaaagcctgcagaaaacactttattcaaggcatacccaaataaaggagtgggtcaggctaataagcctgatgaaactagtaaaactagtattctggctgtatcagatgtatctagcagtaaaccaagcatcaaggctgttatagtctcttctcctaaggcaaaagctacagtttcaaaaactgaaaatcagaaaagttttccaaaatctgtgcccagagatcaaataaatgctgaaaagaaactttcagccaaggaatttggtctgcttaaacccacaagtgccaggtcaggcttggcagaaagcagcagtaaattcaaacctactcagagcagtcttaccagaggaggcagtggaaggatctcagccctgcaaggcaagctttctaaactggattacagagatataacaaaacaatctcaggaaacagaggctagaccttccatcatgaaacgggatgacagcaacaataagactttggctgagcaaaacactaagaatcctaaaagcactactggtagaagttccaaatctaaagaggagccattatttccatttaatttggatgaatttgttactgtggatgaggttatagaagaagtgaatccttctcaggccaagcagaatccactaaagggaaaaaggaaagaaactctcaaaaatgttcctttctctgaacttaacttaaagaagaaaaaggggaaaacttccactcctcgtggtgttgagggagaactatcttttgtgacattggatgagattggggaagaggaagatgcagctgcacatctagcacaagctctagtcactgtggatgaagtaattgatgaagaagaactaaatatggaagaaatggtaaaaaattcaaattcactttttacattagatgaattaattgaccaagatgattgcatttcccacagtgaacctaaagatgttactgttctgtcagtggctgaagaacaagatctcctcaaacaggaacgcttggtaactgtggatgaaattggagaagtggaagagctacctttgaatgagtcagcagacataacttttgccactttaaatactaaaggaaatgaaggagatactgtaagggattccattggcttcatttcttctcaggtgcccgaagacccttctactttagttactgtagatgaaatacaagatgacagcagtgatttgcatttagtgactttggatgaagtaactgaagaggatgaagactctctggcggattttaacaaccttaaagaagagcttaattttgttactgttgatgaagttggagaggaggaagatggagataatgatttaaaagttgagttagcacaaagcaaaaatgaccatcccacagataaaaaagggaatagaaagaagagagctgtggacacaaaaaagacaaaacttgaatccttgtcccaagtgggtccagtaaatgagaatgttatggaagaagatctaaaaaccatgattgaaagacacttaacagctaaaactccaaccaagagagttagaattgggaaaactctgccatcagaaaaagctgttgtgacagaaccagcaaaaggtgaagaggccttccagatgagtgaagttgatgaggaatctggattaaaggattcagaaccagagcgaaaacgcaagaagactgaagactcttcttcaggcaaatcagtggcgtctgatgtccctgaggaattagactttcttgtacctaaggctggattcttctgtccaatttgttccctcttctactcaggtgaaaaagcaatgacaaatcactgcaagagtacacgtcataagcaaaatactgagaaattcatggccaagcaaagaaaggaaaaggagcagaatgaggctgaagaaagaagctctaggtgattgggggaaaggaaagaattcactagaaatttgtttagggtccagttgatttgtgtatttttgttatcatttaatttgtaattttcgtttcagaagcaaatattcgtgttgtacaaatttctgattgccctaaatgtagagagactgatggggnagtngntgngtntnatttttaaatcaaatcatcaggcatggagaaatattttttaaaagtgttaaaataaatgttccccctgtatattta

SEQ ID NO: 633006 - DNA, 2457 bp, Homo sapiens
  misc_feature (2367)..(2367): n is a, c, g, or t
  misc_feature (2371)..(2371): n is a, c, g, or t
  misc_feature (2373)..(2373): n is a, c, g, or t
  misc_feature (2376)..(2376): n is a, c, g, or t
  misc_feature (2379)..(2379): n is a, c, g, or t
  misc_feature (2381)..(2381): n is a, c, g, or t
gctcttaccctcgcgacgtgtatccactgagagtatccgacatgttagatcgctgtagctgtcgctataatgcacaatgtatgctgtcgcgtcgaatattgccatcaacttgtattgtgacgttagtaccaggaattcccactggggatgagaagacagtggacaaaaagaatatttctgaaaaaaaaggtaacatggatgaaaaggaggagaaggaatttaatactaaggaaaccagaatggatcttcaaataggaacagagaaggctgaaaagaatgaaggtaggatggatgcagaaaaggtggaaaagatggcagcaatgaaagaaaagcctgcagaaaacactttattcaaggcatacccaaataaaggagtgggtcaggctaataagcctgatgaaactagtaaaactagtattctggctgtatcagatgtatctagcagtaaaccaagcatcaaggctgttatagtctcttctcctaaggcaaaagctacagtttcaaaaactgaaaatcagaaaagttttccaaaatctgtgcccagagatcaaataaatgctgaaaagaaactttcagccaaggaatttggtctgcttaaacccacaagtgccaggtcaggcttggcagaaagcagcagtaaattcaaacctactcagagcagtcttaccagaggaggcagtggaaggatctcagccctgcaaggcaagctttctaaactggattacagagatataacaaaacaatctcaggaaacagaggctagaccttccatcatgaaacgggatgacagcaacaataagactttggctgagcaaaacactaagaatcctaaaagcactactggtagaagttccaaatctaaagaggagccattatttccatttaatttggatgaatttgttactgtggatgaggttatagaagaagtgaatccttctcaggccaagcagaatccactaaagggaaaaaggaaagaaactctcaaaaatgttcctttctctgaacttaacttaaagaagaaaaaggggaaaacttccactcctcgtggtgttgagggagaactatcttttgtgacattggatgagattggggaagaggaagatgcagctgcacatctagcacaagctctagtcactgtggatgaagtaattgatgaagaagaactaaatatggaagaaatggtaaaaaattcaaattcactttttacattagatgaattaattgaccaagatgattgcatttcccacagtgaacctaaagatgttactgttctgtcagtggctgaagaacaagatctcctcaaacaggaacgcttggtaactgtggatgaaattggagaagtggaagagctacctttgaatgagtcagcagacataacttttgccactttaaatactaaaggaaatgaaggagatactgtaagggattccattggcttcatttcttctcaggtgcccgaagacccttctactttagttactgtagatgaaatacaagatgacagcagtgatttgcatttagtgactttggatgaagtaactgaagaggatgaagactctctggcggattttaacaaccttaaagaagagcttaattttgttactgttgatgaagttggagaggaggaagatggagataatgatttaaaagttgagttagcacaaagcaaaaatgaccatcccacagataaaaaagggaatagaaagaagagagctgtggacacaaaaaagacaaaacttgaatccttgtcccaagtgggtccagtaaatgagaatgttatggaagaagatctaaaaaccatgattgaaagacacttaacagctaaaactccaaccaagagagttagaattgggaaaactctgccatcagaaaaagctgttgtgacagaaccagcaaaaggtgaagaggccttccagatgagtgaagttgatgaggaatctggattaaaggattcagaaccagagcgaaaacgcaagaagactgaagactcttcttcaggcaaatcagtggcgtctgatgtccctgaggaattagactttcttgtacctaaggctggattcttctgtccaatttgttccctcttctactcaggtgaaaaagcaatgacaaatcactgcaagagtacacgtcataagcaaaatactgagaaattcatggccaagcaaagaaaggaaaaggagcagaatgaggctgaagaaagaagctctaggtgattgggggaaaggaaagaattcactagaaatttgtttagggtccagttgatttgtgtatttttgttatcatttaatttgtaattttcgtttcagaagcaaatattcgtgttgtacaaatttctgattgccctaaatgtagagagactgatggggnagtngntgngtntnatttttaaatcaaatcatcaggcatggagaaatattttttaaaagtgttaaaataaatgttccccctgtatattta

SEQ ID NO: 633007 - DNA, 3053 bp, Homo sapiens
  misc_feature (2963)..(2963): n is a, c, g, or t
  misc_feature (2967)..(2967): n is a, c, g, or t
  misc_feature (2969)..(2969): n is a, c, g, or t
  misc_feature (2972)..(2972): n is a, c, g, or t
  misc_feature (2975)..(2975): n is a, c, g, or t
  misc_feature (2977)..(2977): n is a, c, g, or t
ggggcgcccctcccccagcctcgttgccgccttgcagtttgatctcagagtgctgtgctagcaatcagcgagattccgtgggcataggaccctctgagccaggtgtgggatatagtctcgtggtgtgccgtttcttaagctggtctgaaaagcgcaatattcgggtgggagtgacccgattttccaggtgcaaattgagcatgacccagaattagaaaaagaaagccctggcttgaaaaccagtccaattgatgaaagtgaggtgcaaacagcaactgatagtccctctgttaaacctaatgagcttgaagaagaaagtactcccagcattcaaacagaaactttggtacagcaggaagagccttgtgaggaagaagctgaaaaagcaacatgtgattctgactttgctgttgaaactttggagcttgaaactcaaggagaggaggtcaaagaagaaattcctcttgtagcatccgcttcagtcagtattgaacaattcactgaaaatgccgaggagtgtgctttaaatcagcagatgtttaacagtgacttggagaagaaaggggcagaaattattaaccctaaaacagcattgttaccatctgacagtgtgtttgcagaagaaaggaacctcaaaggaattctagaagaatctccatctgaagcagaagatttcatttctggaattacacagactatggtagaagctgtagctgaagtagaaaaaaatgaaactgtttcggaaatattgccatcaacttgtattgtgacgttagtaccaggaattcccactggggatgagaagacagtggacaaaaagaatatttctgaaaaaaaaggtaacatggatgaaaaggaggagaaggaatttaatactaaggaaaccagaatggatcttcaaataggaacagagaaggctgaaaagaatgaaggtaggatggatgcagaaaaggtggaaaagatggcagcaatgaaagaaaagcctgcagaaaacactttattcaaggcatacccaaataaaggagtgggtcaggctaataagcctgatgaaactagtaaaactagtattctggctgtatcagatgtatctagcagtaaaccaagcatcaaggctgttatagtctcttctcctaaggcaaaagctacagtttcaaaaactgaaaatcagaaaagttttccaaaatctgtgcccagagatcaaataaatgctgaaaagaaactttcagccaaggaatttggtctgcttaaacccacaagtgccaggtcaggcttggcagaaagcagcagtaaattcaaacctactcagagcagtcttaccagaggaggcagtggaaggatctcagccctgcaaggcaagctttctaaactggattacagagatataacaaaacaatctcaggaaacagaggctagaccttccatcatgaaacgggatgacagcaacaataagactttggctgagcaaaacactaagaatcctaaaagcactactggtagaagttccaaatctaaagaggagccattatttccatttaatttggatgaatttgttactgtggatgaggttatagaagaagtgaatccttctcaggccaagcagaatccactaaagggaaaaaggaaagaaactctcaaaaatgttcctttctctgaacttaacttaaagaagaaaaaggggaaaacttccactcctcgtggtgttgagggagaactatcttttgtgacattggatgagattggggaagaggaagatgcagctgcacatctagcacaagctctagtcactgtggatgaagtaattgatgaagaagaactaaatatggaagaaatggtaaaaaattcaaattcactttttacattagatgaattaattgaccaagatgattgcatttcccacagtgaacctaaagatgttactgttctgtcagtggctgaagaacaagatctcctcaaacaggaacgcttggtaactgtggatgaaattggagaagtggaagagctacctttgaatgagtcagcagacataacttttgccactttaaatactaaaggaaatgaaggagatactgtaagggattccattggcttcatttcttctcaggtgcccgaagacccttctactttagttactgtagatgaaatacaagatgacagcagtgatttgcatttagtgactttggatgaagtaactgaagaggatgaagactctctggcggattttaacaaccttaaagaagagcttaattttgttactgttgatgaagttggagaggaggaagatggagataatgatttaaaagttgagttagcacaaagcaaaaatgaccatcccacagataaaaaagggaatagaaagaagagagctgtggacacaaaaaagacaaaacttgaatccttgtcccaagtgggtccagtaaatgagaatgttatggaagaagatctaaaaaccatgattgaaagacacttaacagctaaaactccaaccaagagagttagaattgggaaaactctgccatcagaaaaagctgttgtgacagaaccagcaaaaggtgaagaggccttccagatgagtgaagttgatgaggaatctggattaaaggattcagaaccagagcgaaaacgcaagaagactgaagactcttcttcaggcaaatcagtggcgtctgatgtccctgaggaattagactttcttgtacctaaggctggattcttctgtccaatttgttccctcttctactcaggtgaaaaagcaatgacaaatcactgcaagagtacacgtcataagcctgaagaaagaagctctaggtgattgggggaaaggaaagaattcactagaaatttgtttagggtccagttgatttgtgtatttttgttatcatttaatttgtaattttcgtttcagaagcaaatattcgtgttgtacaaatttctgattgccctaaatgtagagagactgatggggnagtngntgngtntnatttttaaatcaaatcatcaggcatggagaaatattttttaaaagtgttaaaataaatgttccccctgtatattta

SEQ ID NO: 633008 - DNA, 586 bp, Homo sapiens
gtctccagcacccagaatctcattaaagcttatttattgtacctccaaaaaaaaaaaaaaaaaaaaaaaaaaaaaaaaaaaaaaaaaaaaaaaaaaaaaaaaaaaaaaaaaaaaaaaaaagggggggaaaaggacaaaaaaaaaaaaaaaaaaaaaacgagggggagggcacgggccggagttaaacaaaaggggggacgggaaaaaatagggggggaccaaaaaaaaaggattgggaggggaaaacccttgggcaagctggagtaaaagccaagggggccgaaccgaatgcccaagcgaacagaagagcagacggaatggaaaaagggaaagtgaaagggttaaggttaagttaaaaggcgagtgaaaaaaaggaaaggcaagataatttgaaaaacaaggggccgaaatggggaaagacccttaaaaagtaaacgaaaggaccgagaaggggtgagcgttgttaaagtagggaacaagagttcactagtaaagaacggggcctcaaatgtgaaagggggggaaactgaaatagggggagggaccgtcgggagccaaaccttaaaaaggggtggggccaggaggg

SEQ ID NO: 633009 - DNA, 2915 bp, Homo sapiens
ggggcgcccctcccccagcctcgttgccgccttgcagtttgatctcagagtgctgtgctagcaatcagcgagattccgtgggcataggaccctctgagccaggtgtgggatatagtctcgtggtgtgccgtttcttaagctggtctgaaaagcgcaatattcgggtgggagtgacccgattttccaggtgcaaattgagcatgacccagaattagaaaaagaaagccctggcttgaaaaccagtccaattgatgaaagtgaggtgcaaacagcaactgatagtccctctgttaaacctaatgagcttgaagaagaaagtactcccagcattcaaacagaaactttggtacagcaggaagagccttgtgaggaagaagctgaaaaagcaacatgtgattctgactttgctgttgaaactttggagcttgaaactcaaggagaggaggtcaaagaagaaattcctcttgtagcatccgcttcagtcagtattgaacaattcactgaaaatgccgaggagtgtgctttaaatcagcagatgtttaacagtgacttggagaagaaaggggcagaaattattaaccctaaaacagcattgttaccatctgacagtgtgtttgcagaagaaaggaacctcaaaggaattctagaagaatctccatctgaagcagaagatttcatttctggaattacacagactatggtagaagctgtagctgaagtagaaaaaaatgaaactgtttcggaaatattgccatcaacttgtattgtgacgttagtaccaggaattcccactggggatgagaagacagtggacaaaaagaatatttctgaaaaaaaaggtaacatggatgaaaaggaggagaaggaatttaatactaaggaaaccagaatggatcttcaaataggaacagagaaggctgaaaagaatgaaggtaggatggatgcagaaaaggtggaaaagatggcagcaatgaaagaaaagcctgcagaaaacactttattcaaggcatacccaaataaaggagtgggtcaggctaataagcctgatgaaactagtaaaactagtattctggctgtatcagatgtatctagcagtaaaccaagcatcaaggctgttatagtctcttctcctaaggcaaaagctacagtttcaaaaactgaaaatcagaaaagttttccaaaatctgtgcccagagatcaaataaatgctgaaaagaaactttcagccaaggaatttggtctgcttaaacccacaagtgccaggtcaggcttggcagaaagcagcagtaaattcaaacctactcagagcagtcttaccagaggaggcagtggaaggatctcagccctgcaaggcaagctttctaaactggattacagagatataacaaaacaatctcaggaaacagaggctagaccttccatcatgaaacgggatgacagcaacaataagactttggctgagcaaaacactaagaatcctaaaagcactactggtagaagttccaaatctaaagaggagccattatttccatttaatttggatgaatttgttactgtggatgaggttatagaagaagtgaatccttctcaggccaagcagaatccactaaagggaaaaaggaaagaaactctcaaaaatgttcctttctctgaacttaacttaaagaagaaaaaggggaaaacttccactcctcgtggtgttgagggagaactatcttttgtgacattggatgagattggggaagaggaagatgcagctgcacatctagcacaagctctagtcactgtggatgaagtaattgatgaagaagaactaaatatggaagaaatggtaaaaaattcaaattcactttttacattagatgaattaattgaccaagatgattgcatttcccacagtgaacctaaagatgttactgttctgtcagtggctgaagaacaagatctcctcaaacaggaacgcttggtaactgtggatgaaattggagaagtggaagagctacctttgaatgagtcagcagacataacttttgccactttaaatactaaaggaaatgaaggagatactgtaagggattccattggcttcatttcttctcaggtgcccgaagacccttctactttagttactgtagatgaaatacaagatgacagcagtgatttgcatttagtgactttggatgaagtaactgaagaggatgaagactctctggcggattttaacaaccttaaagaagagcttaattttgttactgttgatgaagttggagaggaggaagatggagataatgatttaaaagttgagttagcacaaagcaaaaatgaccatcccacagataaaaaagggaatagaaagaagagagctgtggacacaaaaaagacaaaacttgaatccttgtcccaagtgggtccagtaaatgagaatgttatggaagaagatctaaaaaccatgattgaaagacacttaacagctaaaactccaaccaagagagttagaattgggaaaactctgccatcagaaaaagctgttgtgacagaaccagcaaaaggtgaagaggccttccagatgagtgaagttgatgaggaatctggattaaaggattcagaaccagagcgaaaacgcaagaagactgaagactcttcttcaggcaaatcagtggcgtctgatgtccctgaggaattagactttcttgtacctaaggctggattcttctgtccaatttgttccctcttctactcaggtgaaaaagcaatgacaaatcactgcaagagtacacgtcataagcaaaatacacaaatcaactggaccctaaacaaatttctagtgaattctttcctttcccccaatcacctagagcttctttcttcagcctcattctgctccttttcctttctttgcttggccatgaatttct

SEQ ID NO: 633010 - DNA, 117 bp, Homo sapiens
gctctgaggatcccccgctgtacagttgcgcctgcggctctccgggatcggtcgcgttcctgcactgactgcctcgggcgcccatctcctgcatctggattcggggatctgaacccg

SEQ ID NO: 633011 - DNA, 1733 bp, Homo sapiens
  misc_feature (1643)..(1643): n is a, c, g, or t
  misc_feature (1647)..(1647): n is a, c, g, or t
  misc_feature (1649)..(1649): n is a, c, g, or t
  misc_feature (1652)..(1652): n is a, c, g, or t
  misc_feature (1655)..(1655): n is a, c, g, or t
  misc_feature (1657)..(1657): n is a, c, g, or t
gtggaatagcctctaataaaatgctgattatattacaggtgcaaattgagcatgacccagaattagaaaaagaaagactttggctgagcaaaacactaagaatcctaaaagcactactggtagaagttccaaatctaaagaggagccattatttccatttaatttggatgaatttgttactgtggatgaggttatagaagaagtgaatccttctcaggccaagcagaatccactaaagggaaaaaggaaagaaactctcaaaaatgttcctttctctgaacttaacttaaagaagaaaaaggggaaaacttccactcctcgtggtgttgagggagaactatcttttgtgacattggatgagattggggaagaggaagatgcagctgcacatctagcacaagctctagtcactgtggatgaagtaattgatgaagaagaactaaatatggaagaaatggtaaaaaattcaaattcactttttacattagatgaattaattgaccaagatgattgcatttcccacagtgaacctaaagatgttactgttctgtcagtggctgaagaacaagatctcctcaaacaggaacgcttggtaactgtggatgaaattggagaagtggaagagctacctttgaatgagtcagcagacataacttttgccactttaaatactaaaggaaatgaaggagatactgtaagggattccattggcttcatttcttctcaggtgcccgaagacccttctactttagttactgtagatgaaatacaagatgacagcagtgatttgcatttagtgactttggatgaagtaactgaagaggatgaagactctctggcggattttaacaaccttaaagaagagcttaattttgttactgttgatgaagttggagaggaggaagatggagataatgatttaaaagttgagttagcacaaagcaaaaatgaccatcccacagataaaaaagggaatagaaagaagagagctgtggacacaaaaaagacaaaacttgaatccttgtcccaagtgggtccagtaaatgagaatgttatggaagaagatctaaaaaccatgattgaaagacacttaacagctaaaactccaaccaagagagttagaattgggaaaactctgccatcagaaaaagctgttgtgacagaaccagcaaaaggtgaagaggccttccagatgagtgaagttgatgaggaatctggattaaaggattcagaaccagagcgaaaacgcaagaagactgaagactcttcttcaggcaaatcagtggcgtctgatgtccctgaggaattagactttcttgtacctaaggctggattcttctgtccaatttgttccctcttctactcaggtgaaaaagcaatgacaaatcactgcaagagtacacgtcataagcaaaatactgagaaattcatggccaagcaaagaaaggaaaaggagcagaatgaggctgaagaaagaagctctaggtgattgggggaaaggaaagaattcactagaaatttgtttagggtccagttgatttgtgtatttttgttatcatttaatttgtaattttcgtttcagaagcaaatattcgtgttgtacaaatttctgattgccctaaatgtagagagactgatggggnagtngntgngtntnatttttaaatcaaatcatcaggcatggagaaatattttttaaaagtgttaaaataaatgttccccctgtatattta

SEQ ID NO: 633012 - DNA, 138 bp, Homo sapiens
gactgaggcgtagcggaggaaacaaaattttttttctcttcctggtgtttagattacccaattaaatccagaaccattacattgtcaattatatccataggttttagtttctagtatatacatttgagaccctgtcac

SEQ ID NO: 633013 - DNA, 142 bp, Homo sapiens
actgtcggggtgtcgacgagggacagcacatgggaaggagtcagttttgtatccataattcatcttgtgtgctagaatgcatgcttattttcctccaaatgaggactattcatttcaaataggaatttcttttattctcctg

SEQ ID NO: 633014 - DNA, 2296 bp, Homo sapiens
ggggcgcccctcccccagcctcgttgccgccttgcagtttgatctcagagtgctgtgctagcaatcagcgagattccgtgggcataggaccctctgagccaggtgtgggatatagtctcgtggtgtgccgtttcttaagctggtctgaaaagcgcaatattcgggtgggagtgacccgattttccaggtgcaaattgagcatgacccagaattagaaaaagaaagccctggcttgaaaaccagtccaattgatgaaagtgaggtgcaaacagcaactgatagtccctctgttaaacctaatgagcttgaagaagaaagtactcccagcattcaaacagaaactttggtacagcaggaagagccttgtgaggaagaagctgaaaaagcaacatgtgattctgactttgctgttgaaactttggagcttgaaactcaaggagaggaggtcaaagaagaaattcctcttgtagcatccgcttcagtcagtattgaacaattcactgaaaatgccgaggagtgtgctttaaatcagcagatgtttaacagtgacttggagaagaaaggggcagaaattattaaccctaaaacagcattgttaccatctgacagtgtgtttgcagaagaaaggaacctcaaaggaattctagaagaatctccatctgaagcagaagatttcatttctggaattacacagactatggtagaagctgtagctgaagtagaaaaaaatgaaactgtttcggaaatattgccatcaacttgtattgtgacgttagtaccaggaattcccactggggatgagaagacagtggacaaaaagaatatttctgaaaaaaaaggtaacatggatgaaaaggaggagaaggaatttaatactaaggaaaccagaatggatcttcaaataggaacagagaaggctgaaaagaatgaaggtaggatggatgcagaaaaggtggaaaagatggcagcaatgaaagaaaagcctgcagaaaacactttattcaaggcatacccaaataaaggagtgggtcaggctaataagcctgatgaaactagtaaaactagtattctggctgtatcagatgtatctagcagtaaaccaagcatcaaggctgttatagtctcttctcctaaggcaaaagctacagtttcaaaaactgaaaatcagaaaagttttccaaaatctgtgcccagagatcaaataaatgctgaaaagaaactttcagccaaggaatttggtctgcttaaacccacaagtgccaggtcaggcttggcagaaagcagcagtaaattcaaacctactcagagcagtcttaccagaggaggcagtggaaggatctcagccctgcaaggcaagctttctaaactggattacagagatataacaaaacaatctcaggaaacagaggctagaccttccatcatgaaacgggatgacagcaacaataagactttggctgagcaaaacactaagaatcctaaaagcactactggtagaagttccaaatctaaagaggagccattatttccatttaatttggatgaatttgttactgtggatgaggttatagaagaagtgaatccttctcaggccaagcagaatccactaaagggaaaaaggaaagaaactctcaaaaatgttcctttctctgaacttaacttaaagaagaaaaaggggaaaacttccactcctcgtggtgttgagggagaactatcttttgtgacattggatgagattggggaagaggaagatgcagctgcacatctagcacaagctctagtcactgtggatgaagtaattgatgaagaagaactaaatatggaagaaatggtaaaaaattcaaattcactttttacattagatgaattaattgaccaagatgattgcatttcccacagtgaacctaaagatgttactgttctgtcagtggctgaagaacaagatctcctcaaacaggaacgcttggtaactgtggatgaaattggagaagtggaagagctacctttgaatgagtcagcagacataacttttgccactttaaatactaaaggaaatgaaggagatactgtaagggattccattggcttcatttcttctcaggtgcccgaagacccttctactttagttactgtagatgaaatacaagatgacagcagtgatttgcatttagtgactttggatgaagtaactgaagaggatgaagactctctggcggattcgggcatctgagaagaaatgaagccaatgaatcccttacagtatctccttcatttcctttagtattatgtggctccc

SEQ ID NO: 633015 - DNA, 177 bp, Homo sapiens
caggtaaatgcatgtcagtgtgacacatcaaacttctgtgagaaaaaaaaaaaaaaagcagattattttaatagggcaaggatttactctaaaaatatttggaaaacaaggcatctctcaaggaaggtaagacatactttttaatccccaaaaggttcattaaaacgggaacttggg

SEQ ID NO: 633016 - DNA, 2152 bp, Homo sapiens
  misc_feature (2062)..(2062): n is a, c, g, or t
  misc_feature (2066)..(2066): n is a, c, g, or t
  misc_feature (2068)..(2068): n is a, c, g, or t
  misc_feature (2071)..(2071): n is a, c, g, or t
  misc_feature (2074)..(2074): n is a, c, g, or t
  misc_feature (2076)..(2076): n is a, c, g, or t
ggggcgcccctcccccagcctcgttgccgccttgcagtttgatctcagagtgctgtgctagcaatcagcgagattccgtgggcataggaccctctgagccaggtgtgggatatagtctcgtggtgtgccgtttcttaagctggtctgaaaagcgcaatattcgggtgggagtgacccgattttccaggtgcaaattgagcatgacccagaattagaaaaagaaagccctggcttgaaaaccagtccaattgatgaaagtgaggtgcaaacagcaactgatagtccctctgttaaacctaatgagcttgaagaagaaagtactcccagcattcaaacagaaactttggtacagcaggaagagccttgtgaggaagaagctgaaaaagcaacatgtgattctgactttgctgttgaaactttggagcttgaaactcaaggagaggaggtcaaagaagaaattcctcttgtagcatccgcttcagtcagtattgaacaattcactgaaaatgccgaggagtgtgctttaaatcagcagatgtttaacagtgacttggagaagaaaggggcagaaattattaaccctaaaacagcattgttaccatctgacagtgtgtttgcagaagaaaggaacctcaaaggaattctagaagaatctccatctgaagcagaagatttcatttctggaattacacagactatggtagaagctgtagctgaagtagaaaaaaatgaaactgtttcggaaatattgccatcaacttgtattgtgacgttagtaccaggaattcccactggggatgagaagacagtggacaaaaagaatatttctgaaaaaaaaggtaacatggatgaaaaggaggagaaggaatttaatactaaggaaaccagaatggatcttcaaataggaacagagaaggctgaaaagaatgaaggtaggatggatgcagaaaaggtggaaaagatggcagcaatgaaagaaaagcctgcagaaaacactttattcaaggcatacccaaataaaggagtgggtcaggctaataagcctgatgaaactagtaaaactagtattctggctgtatcagatgtatctagcagtaaaccaagcatcaaggctgttatagtctcttctcctaaggcaaaagctacagtttcaaaaactgaaaatcagaaaagttttccaaaatctgtgcccagagatcaaataaatgctgaaaagaaactttcagccaaggaatttggtctgcttaaacccacaagtgccaggtcaggcttggcagaaagcagcagtaaattcaaacctactcagagcagtcttaccagaggaggcagtggaaggatctcagccctgcaaggcaagctttctaaactggattacagagatataacaaaacaatctcaggaaacagaggctagaccttccatcatgaaacgggatgacagcaacaataagactttggctgagcaaaacactaagaatcctaaaagcactactggtagaagttccaaatctaaagagctaaaactccaaccaagagagttagaattgggaaaactctgccatcagaaaaagctgttgtgacagaaccagcaaaaggtgaagaggccttccagatgagtgaagttgatgaggaatctggattaaaggattcagaaccagagcgaaaacgcaagaagactgaagactcttcttcaggcaaatcagtggcgtctgatgtccctgaggaattagactttcttgtacctaaggctggattcttctgtccaatttgttccctcttctactcaggtgaaaaagcaatgacaaatcactgcaagagtacacgtcataagcaaaatactgagaaattcatggccaagcaaagaaaggaaaaggagcagaatgaggctgaagaaagaagctctaggtgattgggggaaaggaaagaattcactagaaatttgtttagggtccagttgatttgtgtatttttgttatcatttaatttgtaattttcgtttcagaagcaaatattcgtgttgtacaaatttctgattgccctaaatgtagagagactgatggggnagtngntgngtntnatttttaaatcaaatcatcaggcatggagaaatattttttaaaagtgttaaaataaatgttccccctgtatattta

SEQ ID NO: 633017 - DNA, 141 bp, Homo sapiens
ttcgacggtgtctgacattagcggctcagctttccgctgatacgtgactccaggaggctccttgagttctgtgtgttcagctggcctccggtggccccattattattttctggccaggtaaaggtcagtcaccgtgcacac

SEQ ID NO: 633018 - DNA, 1988 bp, Homo sapiens
  misc_feature (24)..(24): n is a, c, g, or t
  misc_feature (62)..(62): n is a, c, g, or t
  misc_feature (109)..(109): n is a, c, g, or t
  misc_feature (242)..(242): n is a, c, g, or t
  misc_feature (565)..(565): n is a, c, g, or t
  misc_feature (678)..(678): n is a, c, g, or t
  misc_feature (681)..(682): n is a, c, g, or t
  misc_feature (1975)..(1975): n is a, c, g, or t
  misc_feature (1978)..(1978): n is a, c, g, or t
ttgttaaggttacttttcttgtantaaaaatactgccctgtggctcctctcatgcctgtaancccaacgtgctgggattacaggtgtgagccaccgcgcctgtccctantgctcactttttaagcctgttccccagataggattggagaaatatgccaattatcacaaatgtttttactacatttcttcttgctttatgaattgctgtattaactgcagtaaagctatgaaaatatttcctngaacactctattctgccatactcttttgtgaatttttttaaaaatctggtgtttgctctttagcaaaatgtgactggaaaatctctctaagattctgctgtggataatttttcccctctgtagatgaatagtaatgagttgtcagggcttctgactcttaagtgccgaagtctttatagtcctgtgttcaaaacaacctggcttttttgcctttttcacttgtaacgtgatcaattggtgttcataacaacaaaatacattattttagccattttcttaattggtactaaatacttatataatgccaagttaaaagataacangtatctggtgaaaactttaattattaaatcaattttcttttattctgatatagctgaattttaagatcattctatttttatttacttacagtcattaattgaccaataatggnttnntgttgttgttgttattattgttgctactactcatgggaaagtatcttcaagctgggcctggttacactgagtgtttgtgtgctgagcagccctctgatttctatttttgtgatctgatgtgagctgtctttgcatgcctctatctaagtagaacttaggttaaattcctgcgtttcaaatagctggccgttaataggtttgttaacatgtttcacagtgttttagtccagaagtctgaggtgtgtttactgatgtgtaaattcatttttaaaaggcgatgagaaatgtccagagtgacattgagaatggcctaaatacaaatggtgcaaagatgtccttgtcttgccagcttagaaaagttattgtcatcgctgtgtacctgataccatacaaaacatgctcatcatcttccagaaaagaagctcttcatcagattcaaggccagctttcattctagtctttttgttgtgctttctgtctacctcaggaaccatggaagtcatgtgtaatcaaggggtgatacggtatttgtgtgtgtttgtttttttttgacatttatattttaatcttgagtttataaatttttttgtcaagatgttactacagtatttaagaaaataatatcattcatgttttcattaacctaaaataagttttcttgcttgcttatcatccttcagctcttgtccatattcatacatagcattattgttcagtatttcattcaaccaatattgggtatttattgagaacctactacgcctcctgttatgttcctgtgccaggcacataacaggaaaaataactgtaaacaaaacagacaaaaatctctgccctggtagacattgcattataataatcagtagatatatgtattttatgcattctgcttttttcatgtatatttcaaacatttccccatttttactttgtcctcataaatactttaaatggctgtgtagcatgccatcttgtttttgaactgtaatttgcttaagctttctgcattgggcatttaagtgagtacctatatattacagttgttgggggactggttacattgttgtgaatgtctttatggatatgacttttatgtctgttgggccttgtccagagtctgggctagtggtcagatgattgggttccagtcccattttttccatttaatataatatgacctcagataagtctgtcagcatctctatgcttgagtttcctcatctgtaaaataatgataacacctccttcacaacattaaatgtgatgataatgcagataaagtgcctggaacanaangttcaaatcg

SEQ ID NO: 633019 - DNA, 345 bp, Homo sapiens
cagtgtactcttgagtggggtgggtctgttcctctatcagcatcacaggcttctggctgcgcaggatggctgctggacctgcggatggcatgccatgcgcaggtcggggcggtactatgttcttgcggatcatgtgtctgatgcttgtgagcgtggcgcgagcattcttgtatgatggtggtccgcacatacggagtgtggccggcttcctgcttgtgcctggatctccgcttaatgaccaacacgacacctttgccgtcggctgccggctccactgcccacagtcttgaggttgaatcagtccgtagtagcggccgtgaattgcgggccttcaaagttattgtg

SEQ ID NO: 633020 - DNA, 1934 bp, Homo sapiens
  misc_feature (24)..(24): n is a, c, g, or t
  misc_feature (62)..(62): n is a, c, g, or t
  misc_feature (109)..(109): n is a, c, g, or t
  misc_feature (242)..(242): n is a, c, g, or t
  misc_feature (565)..(565): n is a, c, g, or t
  misc_feature (624)..(624): n is a, c, g, or t
  misc_feature (627)..(628): n is a, c, g, or t
  misc_feature (1921)..(1921): n is a, c, g, or t
  misc_feature (1924)..(1924): n is a, c, g, or t
ttgttaaggttacttttcttgtantaaaaatactgccctgtggctcctctcatgcctgtaancccaacgtgctgggattacaggtgtgagccaccgcgcctgtccctantgctcactttttaagcctgttccccagataggattggagaaatatgccaattatcacaaatgtttttactacatttcttcttgctttatgaattgctgtattaactgcagtaaagctatgaaaatatttcctngaacactctattctgccatactcttttgtgaatttttttaaaaatctggtgtttgctctttagcaaaatgtgactggaaaatctctctaagattctgctgtggataatttttcccctctgtagatgaatagtaatgagttgtcagggcttctgactcttaagtgccgaagtctttatagtcctgtgttcaaaacaacctggcttttttgcctttttcacttgtaacgtgatcaattggtgttcataacaacaaaatacattattttagccattttcttaattggtactaaatacttatataatgccaagttaaaagataacangtatctggtggatcattctatttttatttacttacagtcattaattgaccaataatggnttnntgttgttgttgttattattgttgctactactcatgggaaagtatcttcaagctgggcctggttacactgagtgtttgtgtgctgagcagccctctgatttctatttttgtgatctgatgtgagctgtctttgcatgcctctatctaagtagaacttaggttaaattcctgcgtttcaaatagctggccgttaataggtttgttaacatgtttcacagtgttttagtccagaagtctgaggtgtgtttactgatgtgtaaattcatttttaaaaggcgatgagaaatgtccagagtgacattgagaatggcctaaatacaaatggtgcaaagatgtccttgtcttgccagcttagaaaagttattgtcatcgctgtgtacctgataccatacaaaacatgctcatcatcttccagaaaagaagctcttcatcagattcaaggccagctttcattctagtctttttgttgtgctttctgtctacctcaggaaccatggaagtcatgtgtaatcaaggggtgatacggtatttgtgtgtgtttgtttttttttgacatttatattttaatcttgagtttataaatttttttgtcaagatgttactacagtatttaagaaaataatatcattcatgttttcattaacctaaaataagttttcttgcttgcttatcatccttcagctcttgtccatattcatacatagcattattgttcagtatttcattcaaccaatattgggtatttattgagaacctactacgcctcctgttatgttcctgtgccaggcacataacaggaaaaataactgtaaacaaaacagacaaaaatctctgccctggtagacattgcattataataatcagtagatatatgtattttatgcattctgcttttttcatgtatatttcaaacatttccccatttttactttgtcctcataaatactttaaatggctgtgtagcatgccatcttgtttttgaactgtaatttgcttaagctttctgcattgggcatttaagtgagtacctatatattacagttgttgggggactggttacattgttgtgaatgtctttatggatatgacttttatgtctgttgggccttgtccagagtctgggctagtggtcagatgattgggttccagtcccattttttccatttaatataatatgacctcagataagtctgtcagcatctctatgcttgagtttcctcatctgtaaaataatgataacacctccttcacaacattaaatgtgatgataatgcagataaagtgcctggaacanaangttcaaatcg

SEQ ID NO: 633021 - DNA, 919 bp, Homo sapiens
  misc_feature (530)..(530): n is a, c, g, or t
cgcagtggctcacgcctgtaatcccagcactttgggaggccgaggcaagtggatcacttgaggtcaggatttcgaaaccagcctgaccaacacggtgaaacccgtctctactaaaaatacaaaacattagccgggcttggtggcaggagcctgtaatcccacctacttgggaggctgaggcaggaaaatcacttgaacttgggaggcagaggttgcagtgagctgaattcacattattgcattccagcctgagtgacagagtgagactctgtctcaaaacaaaaaaaaaggagaaaagaaacggttaaaaatggaaaagatagcctgtgttttcatctggcaaagaaaatcagtacagaaaactattactagtttggccatattagaatgaaagctgtttctgggtttggaccttaagtttcgggtctgggataatgccgttttatttaaccagccttcattttcatcatcataattattataacacgtaatgcagttcacattgatcaataaagcaaaactcaaatagncatagaatgtataccactgaaacagtacttctggcaaagtagcaaatgacacaggctgctgattccctttccccagaattaacccagagaactaccatttgcgagccagtgggatttccagaaaatccttaataagactgaggctcactctccccagattaccttcattatttttaccctgtcactatagaaattacaggggtagctagcaaatagggtcagaattcgcggggcaacattatgtccggtgcagaaaccggctgcgagtcaactggctgcaacctgtggctgtgacattggtcccaaatccatctaactacactgtcccttgtgccgggaactgggtccctcccttaacctgtttcaaggtcaggtcacacggggcaacg

SEQ ID NO: 633022 - DNA, 293 bp, Homo sapiens
atgagagagcgagatgaatgaaggttgacaacgtatactccttaccagagaaacactgcattcctcgatgtcactgagaggactatgaacaggcgagaggacagtaactgtccatatgtgccttatatactgtattgggtaattgaatgccagttgggctgttgaggaatggcttgctggaacattgaaacattgaaagacttcatccttgtcgtatactggcacatcagcggaacattcagtgctcctgactgggtgatagatttcttccacatctcctctcctctcttgta

SEQ ID NO: 633023 - DNA, 252 bp, Homo sapiens
ggtttgtgttgtgagtactgtaggtggatgggaggcgtccttagaagtagagtgtccagtctttgtttcctcaaacaggaagaaaagttagaagtaaagagagggtgggccttcccattgggtctaagctgtacccttttcatgcagtttgtctttgggatgggttgacttctggtcttctcaaggaggggaagtggccaagctgtctttgattcagctctttgggaacacctggacttggaaagggccttg

SEQ ID NO: 633024 - DNA, 239 bp, Homo sapiens
gcttaaggaaaggaaaagggtccccacccccaaaccaattttccccggggtgggggttaaagggattcccccggaaccccctttcccccgcccccggggttcccccccaaaaattttgggggcaaaattttttgaacgccccttggatgttaagcctttttgggggggggggggtccccccccccccccctttttttttgtttccccccaccccaataaaccttttttggtttttttga

SEQ ID NO: 633025 - DNA, 181 bp, Homo sapiens
caccaggcgcagtcattctcatatcgcccacgggttacatcctcattactattctgcctagcacaactcaaactacgaacgcactcatagtcacatcataatcctctctcaaggacttcaaactctactcccacagaactaatcatattttatatcttcttcgaaaccacacttatcccca

SEQ ID NO: 633026 - DNA, 392 bp, Homo sapiens
ctgtttaacgagactccccacaataagctccctggggaagggaatgcagagctgctgctgctcggcccagaagcagcatcaccaggaatgaggattcgaaaaccctctctctagtatgaggtctcggagagccccacaatggcttcggtgcctgctttgcaacttacccctgccaacccaccacccccggtgaggtccaatcccaaaaagccaggacgagttaccaaccagctgcaatacctacacaaggtagcgatgaaggctctgtggaaacatcagttcgcatggccattccggcagcctgtggatgctgacaaactgggccatattccctcagaatggcccccaagggacagccatgtcttgctagtctcctcagatcagacctgtgt

SEQ ID NO: 633027 - DNA, 106 bp, Homo sapiens
aaacatcacctcttagcatcaccagtattagaggcaccgcgcccagcctcatctattttatattaccctccttctagaaaatgatcccgtcatagaaattgttcct

SEQ ID NO: 633028 - DNA, 141 bp, Homo sapiens
aaaaagggggtttccccaaggtcgttccactcctccccggtgggcgtatgggcgggaggcgtttctcggggaggtcttttatgcgtgttcgttttgttggcgcccggtccctgtttttcccccccttttatttgcccgcgg

SEQ ID NO: 633029 - DNA, 114 bp, Homo sapiens
caagtcactggttcaggcagggtgcatggtggctcatgcatggtggttgcatccatccaggctcattgtaatgtgaatcttgcataatggccatttggccaaaagccgtcacgg

SEQ ID NO: 633030 - DNA, 585 bp, Homo sapiens
tccctctctgcgtccagattctcatctgcctccattcaatcgattatcatgtctcagcctcccgaatagctgagattacaggcacgtgccacatacctggctaatttttgtattttcaatcagagacagggttactccatgattggtcaggctggtctcgaactctcgatctcaggtggttcgcccacctcgggctcccaaggtgctgggattgcaggcgtgagccccaaagcctggcctaaaaatcatttattgaaaggtcactctttgaaggactataatgtgaccaatagatttgggccacaaggagagcattgtgccatgtgccaaaaaaaatgggatgtcagggtggcagctgatgacgtttcgttgaagagtgcgtcatagagggggaagacaagacagcaggtgtggactctgctccttcagtacaacttactgtatgtgtagtatggtgaccacccacccttgactgcggtagttcctggaatgctgactttcaattgttacaccaaaagtctggggcaatctggggccttggtcactagcgggagatatatgcaggtctaggatgtaggaataaat

SEQ ID NO: 633031 - DNA, 142 bp, Homo sapiens
ggagcgcgcgggcacagggtgcgctgaccgaggcgtgaaagactccagaattggaggcatgatgaagactctgctgctgttttgtgggggctgcttctgaccctgggagagttggcaagttcctgggtggaccagacggtct

SEQ ID NO: 633032 - DNA, 480 bp, Homo sapiens
ctgcccggacaaagcattgggacacacgcctcgtacggaagctggcttttcctctccagaccagagcacgccaggctgccaggtgccactcccgagctcactctttgcgcatctcatccctcatgccggatgctcttctccccgccctagtctgaccttttcagtacatctggataaacctgctgtgctgcctgtccgtgacgcgaggcgctccccgaacctggagccaaactctggtgatgaaacagctggcaccaaagagctggttctgcctcctcctcaccaagtaaacacgtactttattttttaaggaaagaaaagtcttaaaaatatatggcactagagtgtaaaactatacaactgcatccaatgaaaattccctgcagcttgcagcctgtggcacaccatgtccctcagatgtagagctgatgggaggccagggtgtccatgaacggccgcaccaggttgtccggggttgtt

SEQ ID NO: 633033 - DNA, 421 bp, Homo sapiens
agaaagggattatggatgaatctgctgttcaccaccacacagatggatcatgggtggtggtgaacagagatcatcaagtctgattgcgtagctgctgcgacacacggcttcgacggcgaagtacgccgcgtcgaacgaggcacgacgcacttcgcacggacagtagacgcacgcgaggaagcaccgcacacgtgcttatagcgcacagaactcaacgcgactcagccaccccccgcacaacaccacgcggaaccacccctaaaccgcacacaaccaccaccaacaaaaaaaacgacgcagcacaccccacgaacgaacaccacccacagcgacgcaccccaacccaaaacgcacccagacaacaaccacacgaaacacaaaaggcaacacgcacccaacgacaaggcagcagacgacacaa

SEQ ID NO: 633034 - DNA, 141 bp, Homo sapiens
agccccagatctgcctactgccatagcgtttggtcgggcaggtcagggcgggggagcgcaactcaaaacggaagaaacaccctagtgactaggcatggatgagaatcaccccccgagtcgcagatgcagagcccacgtgca

SEQ ID NO: 633035 - DNA, 814 bp, Homo sapiens
  misc_feature (814)..(814): n is a, c, g, or t
agcgggtcggctggtgtcccctgtccgcatgtcgaccactcgtgtgctcctgcacctgacccgctgcccgctgctgctttgcgctgctgtccctgtgctgctgtgcgctgctgtcgctgccctgtcagcgcggccactgcgtcgctgggtgggcgtccaggctgggggcgccccaggggcgggtgcccgatggcgcggcccaacagcatggtggtggaacaccccgagttcctcaaggcacgggaacggatgcctggcctgcagatctggcgtgtggagaagttagactctggtgcccgtgcccaccaacctttactggagacttcttcaccgggcgacgcctacgtcatcctgaatcacagtgcagctgagggaactggaaatctgcagtatgacctccactactgggctgggcaaatgagtgcaggcacggatgagaagcgtgggcatggccgccatctttaccgtgccagctggattgactaccttgaacggcctggagccacgtgcagcaaccgctgaaggtccaggggctttcgaagtccgggccaactatccttaggcgtacttccaaggtcctggccctgacagttacaacgaccgtgacggtgtgcccatccaggacttcaagccaccgtggctacccaacaccacgctggcgtgcgtgccacaagactcctttccaaggggtcaaaacgtgggccgccaccgtagctagcatccccgtggcccaacccgaagtgtaaacccctgttgttacctagggaaagaacgctttacaaaccaagctggcgaccatggcttacaatccccn

SEQ ID NO: 633036 - DNA, 149 bp, Homo sapiens
actctacaggactcccactacggcgatacctgtggggggtgtgtgtgctgtgtgtgtgtgtgctgtgtgttgtgctgtgtgtggtgtgtgtgtgtgctgtgttgtccgtgtgtgcttgtgtgtgtgtgtttggcggggctgggtggttg

SEQ ID NO: 633037 - DNA, 576 bp, Homo sapiens
tgtagtaggggtgcgtgcctgtagcctcagctactcgggaggccgaggtgggaggactgattgagccagggaggcaaggctgaggctgcagtgggctgtgatcatgccactgcattccaacctgggtgagagagaccccattttttaaaaaatatatagggccgggcgcagtggctcacacctgtaatcccagcactctgggatgccaaggcaggcagataacccgaggtcaggagtttgagaccagcctggccaacatggtgaaaccccattcctactaaaaatacaaaaattagccaggcatggtggcaaatgcctttagtcccagctactagggaggctgaggcagaagaatggcttgaacccaggaggcagaggtttcagggaaccgcgattgcgccactgcactccagcctgggcgacagaacaagactccgtctcaaaaaaaaaaaaaaaaaaaggataatcccttctgggcttgattcaaagacagagtgggaaaatgaaaaaattctggccggcttaatctccaccgaatcagaattggaggagcccaactttattccatatgggccc

SEQ ID NO: 633038 - DNA, 424 bp, Homo sapiens
gcgaaccgagggagcccatgggccattggtaccagaggcttatggtttgtcggcttggtctttgagatacatgaagagaagtggctacagcgaacctagtgggcaaagcattgtgatactctacacaaaggccctccagctgctccaagaagaatatctgccttcttgagagctgatatggattggctctgtgtccccaccctctcatctcgaatagcaatccccatgtgccagaggaaggccctggtgggaggtgactgaatcatgggggcggacttcctgcttgctgctcttgcgatagtgagtgagttctcacgagatctgatcattggtgtgcgggacattccgcgatacccgcctactgctccatcatggtgatgtgcatgctgcccctccaccttctgccatgattgttagtcttctg

SEQ ID NO: 633039 - DNA, 106 bp, Homo sapiens
cgatacacgtgtatgtagctatgtgtcatctaaattgctgtctagtagtaacaaaactacaaatcatcaaatcgcaactgatcagaaagttctcggagactagaaa

SEQ ID NO: 633040 - DNA, 295 bp, Homo sapiens
accacctctcctgtgcagatctaggccgcactccccgtgagtgctcctcaccttgccggcatagtggataatgcagaaatcagctgtgtccttcagctgctataggcttctggaacttgtgggtggtgtgccctgctcctgcatcaccttctccacgtaagctctcgatcggtcggcttatggggaaccacgcactcctctgtcctagcagggcacagaatgccctggggtggcctgcatggcattctcgaatgcaggtcggatgcaagggctgcagtgtcgcaggcccaatgtc

SEQ ID NO: 633041 - DNA, 281 bp, Homo sapiens
  misc_feature (208)..(208): n is a, c, g, or t
  misc_feature (226)..(226): n is a, c, g, or t
gtattatctttttgaaatgttgttggattcagttagctagtactttgtttaggattttagcatctatattcatcaggaatattggtctgtggttttctttttttgttatgtcctttcccccctcttggtattaggatgatactagcttcacgatgatttaggagggttcctctctctatcttgtagaaacagtgtcaaacaggattgngtacccaatttatcttgnaatggtcctgggtagaaattcctgggtgttgaattccggttcttggagcccttgg

SEQ ID NO: 633042 - DNA, 191 bp, Homo sapiens
ctgtgaatacaccagcgtgtgtactcaacaaaaggatgggctcattgccacctgcacggaggcgacgccacctggatgctgaataggcttccaattctccacacatgccgaccctgtgtgcacagcaactgttggttcttgtgctacattccatgtagtggctccgactgggacggtaatacaaactgtta

SEQ ID NO: 633043 - DNA, 84 bp, Homo sapiens
cagcaggaggactcggccgtgtatctctgtgccagcagctccgagccccagggactagcggggctctcttacgagcagtacttc

SEQ ID NO: 633044 - DNA, 225 bp, Homo sapiens
tttggagggtccatatcatttattgtaaagcacaaaacaggcattttattttttaaggtgtccattgaaaaagtccttttatttcacattgcttcacccacataattgcaaatacatttgctggaatgtgtacatctaccctaaatactaaaaacaaaccatttttcatttttacacagaaatattaccctcctatcagtagggatagatattttgtccattttc

SEQ ID NO: 633045 - DNA, 160 bp, Homo sapiens
ttttttttttttaccaggccccttttttcttttaaaatttgggggggggggggcccccccccaaaccccccgggtgttttttttttttccccccccccttttaaaaaacctttctcctgttttttttttttggttttaaaaaacctttttgccgggggga

SEQ ID NO: 633046 - DNA, 278 bp, Homo sapiens
gtttggtgaaaaggcttagttgaagaaaccttaaggccctgaccaccctgtgttagtaatttgggcggggagggggggaacccaaccatgttttgtgttggcaaaacaaaactgttaaagattgttgatcacccttttaagggaatttgtcttttatgaggaacccagggcaagcccctaaaaattgtttaaaagggccatcggcataaaccttgtaaaagctgaagttaattgagcttaaaggaattgttccccttaaagtttgggtttaaagccca

SEQ ID NO: 633047 - DNA, 125 bp, Homo sapiens
gtagaggattctgatgacggcgggggtagccagtacgtatccaggagagcaggtcacagctgcggaaacagcactcctcaacgatgccacggttgcgacgactcacacggcttgcggggccctgc

SEQ ID NO: 633048 - DNA, 402 bp, Homo sapiens
agtatcaggtcgtcaccaagggtggtgcggagtgaaccagggctttttctcagtatgaaagatggaagccaatgttgatagagctaaatgaatgaaggggagagtgataaggcaatgactagattatgtatattttgtagtccatgttaatgagtttagattttatgctaactacaataggaagccattgatgcttattgttagtaaattaatgggagacattttgcctatcggttggggcacttgacagacagccatatgatcatttccatgagaaaatgtcccttccattaataaacagtccgctttaggaataacaatcgtgtttctgagggatctagatatgtgctatcatagaaaaaaatctaccgcagtatttttttgtttcgaaaaacactattt

SEQ ID NO: 633049 - DNA, 357 bp, Homo sapiens
  misc_feature (49)..(49): n is a, c, g, or t
tcggtcatgcacctatgcctccaggtacaagtagttactcctgctcagnctcccgagagatggactacaggtgtgcccacaacgccaggctaattttggtattttcagtagagacagggtttcaccatgcatggccaggctggtctccaactcctggcctcaggtaatcctcccgccttagcctcccaaagtgctggaattacaggcatgagacaccaggcccgggcatcttcttgccagcaactcttagaccaggaagcctcggatggcagctatgaagtcctgtgcgcggacagcgtggatccagtggccagcgtccgccaccgcctgcatctgggcccgagggaggagccgcat

SEQ ID NO: 633050 - DNA, 1506 bp, Homo sapiens
cgagcacagagcgggaggacggacaggtagaggaggagagggggtttgcgcgcggccgctacccagaagccagcggaacggcagcacgggaagtgggactgtccccgaggcccagggcccggagcagagtgcaaggaagaaagaaagagggagaggaaaaagagaggaggagaaaagaatcgaagaaaagagaaaagaaggaaagagaaagagaaaaggaggagagaaaagaaggagagaagaaagaggagatgaaggataatagaatagatgagagagaggagagaagatagaaggaaggagagaggaaggaagaagaagaggaaggaggggagaaggagaagagatgagagaaagagatggagagagagagagtgagaagaaggagagagagagagatgagaaaagagaagaaggaaagagagaagaagcagagagaggagagaaggaggggagatagagagagagagagagagagaggagagaagagagaggaagagagagaagatagagggagaagagagaaggaggagaagagaagagagaagagaagaagaagaagagaaagggaggtgaaggggagatgaggaggtagagaagagagagagggaaggagaggagaaggaagagaatggggaagaataagaagaagaaggaagaaggaagaggataggaggagagagtgaaagattagaaggtagaagaggaggaggaaagaggaggaaggagaggaagagaaggtgatgagtaggggaaaagagagaaaagaaagcagagagaagagcaagggaggaatagacgagagaaggaggagaaaaagaagtgagagagaataagaagagacagaggaaagagaggaaggagagaagcaggaaataaaaatagaaagagcaagagaaaaaagaggaagggagaagaaaagaggggagaagaaaagagaggagagacacagagaaagaaacagagagaaatggatggaggagaaagagaggagtgcagagaagagatggaagagaagaaatggagatgaagaggaagagagagagagaagaagagagagcggatgaaggaagggaaggaacgagaaggagagggaggtgaagggagagagagagaaagagatgaaacgagagaaagggaagagaacaagagagagaaaagaaaaaaacagagagagggaggacaagagaagagagaaggagagaagagaagaagagagaggacagagggagaacaagatcatatgatcgacaaacaacggaggaggggatggaggaaacagagaagaaagagatgtaaagagaatgaagaaggatgtgagagaggagagagagagtggaggtcggtggggtgagagagaaggagtagagaggtagagagaaaaggatggagaaaaggaagagaggagaagggaagagtagaggaagacgtctttctggtaggtggtttactgtaggagaattaagaaggatagagcggaagtgacaggaggaagagagaaagagg

SEQ ID NO: 633051 - DNA, 204 bp, Homo sapiens
tagcggtaatcccagcacttggggaggcggaggcgggagatcacctgagcccaggaattcaagaccagccgggggaacagggcgaaactccatctccataaaaaatacaaaaagtagcggggcgtgggggcacacagcagtaatcccacctactggggaagcggaggggggaggacggcttgagccgggcaggttgaggatgca

SEQ ID NO: 633052 - DNA, 216 bp, Homo sapiens
  misc_feature (2)..(2): n is a, c, g, or t
  misc_feature (62)..(62): n is a, c, g, or t
  misc_feature (137)..(137): n is a, c, g, or t
  misc_feature (160)..(160): n is a, c, g, or t
anctcctccccccctcgccccactcccacccccttctctcccccacccttctccacaacccnctccgtccctatctccccacctccaccctctccaccttcaccctccccccccccccgcctcctctccccccgccncccccttcctccagccgcactcntccacttccccccccccactccaccggtcctcctctctctcccctcccctccctcc

SEQ ID NO: 633053 - DNA, 322 bp, Homo sapiens
  misc_feature (118)..(118): n is a, c, g, or t
  misc_feature (128)..(128): n is a, c, g, or t
  misc_feature (198)..(198): n is a, c, g, or t
  misc_feature (220)..(220): n is a, c, g, or t
  misc_feature (245)..(245): n is a, c, g, or t
  misc_feature (255)..(255): n is a, c, g, or t
  misc_feature (312)..(312): n is a, c, g, or t
gatctttgctgccagccacttcatcccctcccagatgttggccaacaaccctccctgccaccaggcactgcctggaagggagggaagtggggagccaatgaacaaggatgcaagtaangagtttctgnagttttctcctgtcgggttttggcctgttttgccttcacccataagcccttggaattttggtggaaggtnccttgtcctaagggttaaggantagggaggtcattctttgtgctcgntttaagggtnccttttccccaaataggtggtccattgggtattaattcggtactagtttctttgtgncaaattcttg

SEQ ID NO: 633054 - DNA, 120 bp, Homo sapiens
aaagcctgggggagggggtttttggggggcaaggaaccagtcagggggttgtttcccctcaaaaagctccccaaaggggcctccgcaaagccttaaacccaaacctagggtaaaaaaggg

SEQ ID NO: 633055 - DNA, 301 bp, Homo sapiens
ttaagtttgccaagaaaaattgatgtgttagtatcagaggaaaggggactggatcaaaagaaaaggagccaggcagaagcaactgctgggtcatcaatatagtcatatatttggtttgggacagaattagtgtcataatagcattcttctctttcacatgaatagtttctaaaaatataatatgttctttgaaatatatttcatatttcattcgtagagtgttaggagtggaatgaaaccctgaggctctgatgtttcagttataagctttaccacatcaaaaattgactcaggtggtgtg

SEQ ID NO: 633056 - DNA, 1301 bp, Homo sapiens
tgggacaaaattctcccaccccgctttaccccccctcctcgagagagaggccccctcttctggtgggcccccccaagaaaacttatcccccccccctctctcatgtgcgaaattctctctgtgtgggtctccccagaggaaacgaggctctctttttcttccgtgtggtcgctgctgggtcgcccagagagggctcaccacaacactcctcacacacagtgtgaaaaaaacccctattatctctcgagagaggagagagaaaacaagaggagagagagagatgtgttcttatatcatcaatatacacgctgtgggggtggtgagccccacaaaaaaacccgcgaggtgtgtgtgagaggtggcgggagaggtgtgtgggcggagctctccacacactcatcagagggcgctccccggtgtgtgggggctctctcgtgtcgctcccccctctctcctctcatcaaacacctctctcccgcgggggaggagtttgtgtgtgcgcgccccacccccgcgcgagagagagaagcaccgcgaaaagcgcgctccccccccccgcgcgcgcgcgagcgcgcgagcgcgcccgcgacgagagtgtatgagagaagaggccgcgcggtgtgatatagggagcccagagagccccacaaagcgcgcgcgggagagatgtgtgtcaactctctctcaaaagaccccgcgccgcgtgtttgttgtgaccccccgggggagcccccccccctcgcgctcacccaacagattttgtttgtgtgcgccgggcgagcccccccaacgagggggggcgcccatataaaaagcgctcgcgcgctctacagggtgtgtggccaaccacaatagaggcatcacacgaagaagagaactacccccgcggagagagaaccaagagaggggggaagcggagaaaaaaacaccttttttccaccacgaagaggggggagaattaacccccaggggggaacacaccccaaaaaacaaagcccccaaaaaaaacagcgggaggaggccctccccagagataacttcgtcaacacaagaacagagggaggagaacaccctctaattatatgatacccacaagaggagggccccccaccaaaagaggagacgggaaaaaagagctcccagacacccccccgcagaggaggaagacaccacacagaggagttgtgaccggcaggaaccacaccagagaaaaccgggtaaccctgcagtttcccccgaaaaaaaaaaggtcttgtttgtgttgggcaaaaaccccgcagccacctgtggagggggccctg

SEQ ID NO: 633057 - DNA, 275 bp, Homo sapiens
tagaggatcctacgtaatatgtaactattaacctaggtgaagattatgagcccacaggatgtgaatttcttaaagtaatacttgaatagttagaggaaaattggcatgtactttatctggtctggaatgtgtacaggacatgggtaaaggccagtatttgaactgggtgtattcttagctggccatgcctgcattccttagaagaggtatcttgggaataaatccaaatccctagggcacaaaagattatagcctttgtggtcgggccaaaggca

SEQ ID NO: 633058 - DNA, 222 bp, Homo sapiens
tttaaatgcaccaaagataactcatatacatagttaatcttcggtatccatggaggacctcctgcagataccaaaatccaaggatgctcaagtccctgatataaaatggcggccaggcgcagtgactcacgcctgtaatcccagcactttgggaggcggagatgggaggatcatttgagcccaggagttcaagacaccaacctgagcaagatgtctctatta

SEQ ID NO: 633059 - DNA, 498 bp, Homo sapiens
  misc_feature (339)..(339): n is a, c, g, or t
aaaagaggagctgctttccggctgggccaccaacagtgcccggggttttggtgagtctcttctcgcttgtaaagcctaaaacaaccggctggttgggagtaaaaagcaggattttttcccccctttcctttggggtctcaaaagcccctgggatttctttttccaaagggattttaaagggtttgggttcctgttagcaaaatttgggggggtggaaaaacagcccccccccgggttccccggggcccctggtcccccactgacctggggttcccccccgaatattttttctggttcaaaaaagggggggggggggttccctctttgtttccacctttnggggggggtgagggggcacttttttcttcccccctggaaaaaagaatttggaaattaatttggtttttccaaattttggtttgggggggtggggggtttatttaataaggccatttctgggaggtgggggggccaattaaggccttgggaccttcccga

SEQ ID NO: 633060 - DNA, 413 bp, Homo sapiens
  misc_feature (1)..(1): n is a, c, g, or t
ntatgaatatatatctatatctctcatcttaatttccaaaggtaccaaagggagttctacagagttaagcgttgcttgcctaaatctaaagatttggaaccttcatagcaagacccttgttgccagtaatttccaattcgccttaaaaaaagccggttagagaatccatttaaccagtcattaaagccagagagtctaagacagccatgtgtaattgcacagacacccttcttatttaagtatagaaagcatgtgaccctttgccattcttccacatccaccacacaggtggctctcttcacccacagggctatctttcaccttagaggcaaaaaccccagagattctcctcacaccgtgttcccccttctcctcgagctctctctctctctctctctctctccccgcgtgca

SEQ ID NO: 633061 - DNA, 474 bp, Homo sapiens
agcgtctcgtaggccgtcgagctctgtcgtgcatggccgtgcatccaagatatgtatgatcagcgacggagggtgccgacagcgcttccctgccgtagctcacatgatctgtactatgcccaaggctgctcctacttgccacatggctccatacccatcatcctcaaaaactcagttcagggaccagccccttcaggaaactttccaaggggtagaattacttgtcttttctatgtgcacctgccagaccctgtgcatcttactatagccacagttagcatactgaattagagccgggacacggttgtgctcacgcctgtaatcccagcactttgggacgtgccactgatggggcagatcacgaggtcaggagttcgagaccagcctggccaatatgttgaacccctgtctctactaaaaatacaaacaaattcggcgggcaaggtgtcaggtgcctgtaatcccagctacttg

SEQ ID NO: 633062 - DNA, 898 bp, Homo sapiens
gagtgcgttacttacctcgattcttagcttgtcgggcgaggtaaccgggaccggtgtctgctccgtgtcgcgcttccgcctcctaatccctagcgcatatgcgtgagatgcatctccatccacgtgggcaggctgctgtccagatggcaatgcctggtggtgacgctctagtgtcctgaacacgtggatccagcccgatggcctgatgccaagtgacaagaccatgggggaggagatgactccttcgacaccttcttgcagtgagacgggcgcgtgtgcatccacacgtgccctggatgtgtttgtagacttgtgaacccagagtcatggatgaatgttcgcactggcatctaaccgcaggtcttccaccctgagcagttcatcacaggcaggaagatgctgcgaataactatgccgaggtagtacaccatgtgcagggggctcatggacgctcgttgtgtaccgcattcgcaagctggttgaccagtgcacgggtcttcaggacttcacttggtttttccacagctttggtgggggaactgatctgggttccacctccctgactcatggaacgtctctcagtgattatggaagaagtcccagctgagttctcattcacccagaccccgagtttccacacggttggttggagcccctaaaatccattcttaccaccaaaacaacctggggcactcttatggtgcctcacggtagccaaggaggcccttgacttgtgtggtgaaactcatttggggccaccatataccaacggtttaacgagtgtgtctcccccgttccggaagtggcgcattgtgtgaatacaagtgtgcccccactcctgcaaactcgtgtggaccacaacttacacatgtgcaccgagacccaatgtgtgtctcca

SEQ ID NO: 633063 - DNA, 1177 bp, Homo sapiens
ggagagagagaactagtctcgagttattatatttttatttatctgggggctgtgactgtttttacattcattcttgaatcccgcgttccccgttggcgtgggggcatgaacacatctctgtgggcaccatgtggtgaacttctccgtggtgggtctcccataaccctttgctgtgttcccttgactcgtgatagcaccccaccaaagagaaagggatccaagagaatagggggaaggtacctaccctcaccatttgaaaccccgtggtgtccacatctgtgttcaagggagaacaggccttctgtgggccacacgacaccttttgtgaaaaagcgctatgagaaagacagaagagaggacgtcaggggccttaggctcacaaggggcctattgtggccaccccacaacaccatccaaagacccccccgaggaaagtgcccagcggcgccctcaaagagcccgggtgagctaaaggggcggcccacgcaaagaccagcggtgacacgcaacaacaacatccgtggaagagtggaaaaaacacggaggtgaaacaggaagggactacgagggcgaataaaaacggcaagggtgcaccacacccaagcccaacagcagaggtggcaaatgtgcccacagtagaggaagagagggagacaggagagcacccacccacacaaccacccaatggaggcggccccaagaggagacaggaacacccacaaaaaccgccccacaagagagagcccctagcaagcactacggcgccacaacgagggaataacagaagagagtagccaccacaccagcgcccccccacagagagaacaagaaaacaacgcagagcacaaagagagcaacaagaggacaaggcagacacagacataaaccgatacggacccagaacaagggagagcagcacccaaagaaaggagccgaggactaagaaaaccgccacacaaaacataagcgaagcgacacacagctaagcgcaacaaacagcaagaccccaaacatcaggcagcacaaatgaagcgccccaccaacacggggacaccaaagcccatgaacacaacaaacacacacccaaaaaaaacgcagaagccgacacaaccaaagctgcacaaacatcagagagacagaggcaatagaccaaggacggaccatgacacagaaagga

SEQ ID NO: 633064 - DNA, 369 bp, Homo sapiens
gaggcaggaggattgcttgagtccaggagtttgaaaccagcctggtcaacttagtctctacaaaagaaaaattttaaaaattagttggggctgggcacagtgctcatgcctataattccagcactttggtaggctgaggtgggcggatcacttggggtcaggagtttgagaccagcctggccgacatggtgaaacctatctctgctaaaaacacaaaaaattaactggatgtggcagcgcgtgcctatagtctagctactctgggggctaagacgggagaatcgcttgaatgagggagccagaggttgcagtgagccaagattgtgccactgcactccagcctgcactccaaacagagtgagactgttt

SEQ ID NO: 633065 - DNA, 125 bp, Homo sapiens
atcatcagctcggtaccttcgattgggccagaggcggaagatgaggaggacgcagcggtcacgggccccaaaggacagtgacgaaatgcttctcgctctccgtgcagatctggatggcgttgggg

SEQ ID NO: 633066 - DNA, 814 bp, Homo sapiens
acaaggccctgcagcggcgccggcggacacctgagcccttgtctcgcaccggctcccaggagggcactccatggagggctccgccccgctgcccctgcagagccaggcaccctcaagacagtctggtggctactccaggcattgacaagctgaccgagaagtccaggtgtcagaggatggcaccttgcgggtccctggaacctgagccccagcagagcttggagggattgggcagcccggctaagggggagccccaagccaggcatggaggggagcagcgggccgacgtccaacctcatcaaggcccaagttgggcaagtgagaagcccaacgccagagtgggtcctctccttggaaggttcgaagctgccgcttgcagaaccatcatgaggcttgctgcagtgtgctggttcccgcaggtggagaagatctgcatcgaccaaagggcctggacggatgagtctgagatcctgcgggttcctgcagctattggcaccctggtgggggcctgctgcccgtgccccaaccccatcctcatccgcaagtaccaggccaactcggggccactgccatgtggttccgcacctacatgtggggcgtcatctatcttgaggaatgtcggacccccctgtctggtacgacaccgacgtgaagctgtttgagatacagcgggtgtgagggatgaagccgacgaggggctcaggtctagggggaaaggcagggccttggtcctgagggcttccccaatcacatttctgagctttaaatttaccacgatcaggcctggaacatggcagaattgccctgatgtctc

SEQ ID NO: 633067 - DNA, 824 bp, Homo sapiens
agcggaaaaaggcggaagcggaagtcggggggcgcgccagctcgtagcaggggagcgcccgcggcgtcgggtttgggctggaggtcgccatggggcgaggcagctgcctccctgtcctctactgccggaaggaatggactccaacggacagggaaagaagaagtgtggagagacgggcaggataagcaggcactgggcccaagccgcccttggaggctctgcctgttctgatctgaaggcggaggctcagccgtgctctcccaggaagccacctgggcgtttggggctttagctaggaaagaggatgtcgcctgcggctgcgaaggcgccaaagcccagacctcgcgcctccgcccgcgacggcggcactgggggcccggagcgggcgggagacgtggattactgcgggcttcggggccctagcctcgaccgcgacgttcgctcgcatcgcgtacggacagaaacccgtgagcgctgaagaaagaacacctgaatccggagccccagcccccgtcgctcgtttgcgcgaccccaaaacctggcgggacgagggtcgcccgatgtctagctgccgccacagacgacgcttttgcgtctgcgcagcgcgccgccttgtgggtaatctcagggtgagacgaggctagcgcgaggtacggctagagcgtcatttccggctcgaatgcccggcagccgtggcggctagagcgttcctccccagctcgaatgcccggcggccgaggcggctagagcgtcgcctcctcccggggaaccgcgtgtgaccttccagcccgcggaccgatgctgccggcggccgcaagcttatc

SEQ ID NO: 633068 - DNA, 2925 bp, Homo sapiens
agcggaaaaaggcggaagcggaagtcggggggcgcgccagctcgtagcaggggagcgcccgcggcgtcgggtttgggctggaggtcgccatggggcgaggcagcggcaccttcgagcgtctcctagacaaggcgaccagccagctcctgttggagacagattgggagtccattttgcagatctgcgacctgatccgccaaggggacacacaagcaaaatatgctgtgaattccatcaagaagaaagtcaacgacaagaacccacacgtcgccttgtatgccctggaggtcatggaatctgtggtaaagaactgtggccagacagttcatgatgaggtggccaacaagcagaccatggaggagctgaaggacctgctgaagagacaagtggaggtaaacgtccgtaacaagatcctgtacctgatccaggcctgggcgcatgccttccggaacgagcccaagtacaaggtggtccaggacacctaccagatcatgaaggtggaggggcacgtctttccagaattcaaagagagcgatgccatgtttgctgccgagagagccccagactgggtggacgctgaggaatgccaccgctgcagggtgcagttcggggtgatgacccgtaagcaccactgccgggcgtgtgggcagatattctgtggaaagtgttcttccaagtactccaccatccccaagtttggcatcgagaaggaggtgcgcgtgtgtgagccctgctacgagcagctgaacaggaaagcggagggaaaggccacttccaccactgagctgccccccgagtacctgaccagccccctgtctcagcagtcccagctgccccccaagagggacgagacggccctgcaggaggaggaggagctgcagctggccctggcgctgtcacagtcagaggcggaggagaaggagaggctgagacagaagtccacgtacacttcgtaccccaaggcggagcccatgccctcggcctcctcagcgccccccgccagcagcctgtactcttcacctgtgaactcgtcggcgcctctggctgaggacatcgaccctgagctcgcacggtatctcaaccggaactactgggagaagaagcaggaggaggctcgcaagagccccacgccatctgcgcccgtgcccctgacggagccggctgcacagcctggggaagggcacgcagcccccaccaacgtggtggagaaccccctcccggagacagactctcagcccattcctccctctggtggcccctttagtgagccacagttccacaatggcgagtctgaggagagccacgagcagttcctgaaggcgctgcagaacgccgtcaccaccttcgtgaaccgcatgaagagtaaccacatgcggggccgcagcatcaccaatgactcggccgtgctctcactcttccagtccatcaacggcatgcacccgcagctgctggagctgctcaaccagctggacgagcgcaggctgtactatgaggggctgcaggacaagctggcacagatccgcgatgcccggggggcgctgagtgccctgcgcgaagagcaccgggagaagcttcgccgggcagccgaggaggcagagcgccagcgccagatccagctggcccagaagctggagataatgcggcagaagaagcaggagtacctggaggtgcagaggcagctggccatccagcgcctgcaggagcaggagaaggagcggcagatgcggctggagcagcagaagcagacggtccagatgcgcgcgcagatgcccgccttccccctgccctacgcccagctccaggccatgcccgcagccggaggtgtgctctaccagccctcgggaccagccagcttccccagcaccttcagccctgccggctcggtggagggctccccaatgcacggcgtgtacatgagccagccggcccctgccgctggcccctaccccagcatgcccagcactgcggctgatcccagcatggtgagtgcctacatgtacccagcaggggccactggggcgcaggcggccccccaggcccaggccggaccaccgccagccccgcttactcatcctaccagcctactcccacagcgggctaccagaacgtggcctcccaggccccacagagcctcccggccatctctcagcctccgcagtccagcaccatgggctacatggggagccagtcagtctccatgggctaccagccttacaacatgcagaatctcatgaccaccctcccaagccaggatgcgtctctgccaccccagcagccctacatcgcggggcagcagcccatgtaccagcagatggcaccctctggcggtcccccccagcagcagccccccgtggcccagcaaccgcaggcacaggggccgccggcacagggcagcgaggcccagctcatttcattcgactgacccaggccatgctcacgtccggagtaacactacatacagttcacctgaaacgcctcgtctctaactgccgtcgtcctgcctccctgtcctctactgccggtagtgtcccttctctgcgagtgagggggggccttcaccccaagcccacctcccttgtcctcagcctactgcagtccctgagttagtctctgctttctttccccagggctgggccatggggagggaaggactttctcccaggggaagcccccagccctgtgggtcatggtctgtgagaggtggcaggaatggggaccctcaccccccaagcagcctgtgccctctggccgcactgtgagctggctgtggtgtctgggtgtggcctggggctccctctgcaggggcctctctcggcagccacagccaagggtggaggcttcaggtctccagcttctctgcttctcagctgccatctccagtgccccagaatggtacagcgataataaaatgtatttcagaaagca

SEQ ID NO: 633069 - DNA, 2662 bp, Homo sapiens
agcggaaaaaggcggaagcggaagtcggggggcgcgccagctcgtagcaggggagcgcccgcggcgtcgggtttgggctggaggtcgccatggggcgaggcagcggcaccttcgagcgtctcctagacaaggcgaccagccagctcctgttggagacagattgggagtccattttgcagatctgcgacctgatccgccaaggggacacacaagcaaaatatgctgtgaattccatcaagaagaaagtcaacgacaagaacccacacgtcgccttgtatgccctggaggtcatggaatctgtggtaaagaactgtggccagacagttcatgatgaggtggccaacaagcagaccatggaggagctgaaggacctgctgaagagacaagtggaggtaaacgtccgtaacaagatcctgtacctgatccaggcctgggcgcatgccttccggaacgagcccaagtacaaggtggtccaggacacctaccagatcatgaaggtggaggggcacgtctttccagaattcaaagagagcgatgccatgtttgctgccgagagagccccagactgggtggacgctgaggaatgccaccgctgcagggtgcagttcggggtgatgacccgtaagcaccactgccgggcgtgtgggcagatattctgtggaaagtgttcttccaagtactccaccatccccaagtttggcatcgagaaggaggtgcgcgtgtgtgagccctgctacgagcagctgaacaggaaagcggagggaaaggccacttccaccactgagctgccccccgagtacctgaccagccccctgtctcagcagtcccagctgccccccaagagggacgagacggccctgcaggaggaggaggagctgcagctggccctggcgctgtcacagtcagaggcggaggagaaggagaggctgagacagaagtccacgtacacttcgtaccccaaggcggagcccatgccctcggcctcctcagcgccccccgccagcagcctgtactcttcacctgtgaactcgtcggcgcctctggctgaggacatcgaccctgagctcgcacggtatctcaaccggaactactgggagaagaagcaggaggaggctcgcaagagccccacgccatctgcgcccgtgcccctgacggagccggctgcacagcctggggaagggcacgcagcccccaccaacgtggtggagaaccccctcccggagacagactctcagcccattcctccctctggtggcccctttagtgagccacagttccacaatggcgagtctgaggagagccacgagcagttcctgaaggcgctgcagaacgccgtcaccaccttcgtgaaccgcatgaagagtaaccacatgcggggccgcagcatcaccaatgactcggccgtgctctcactcttccagtccatcaacggcatgcacccgcagctgctggagctgctcaaccagctggacgagcgcaggctgtactatgaggggctgcaggacaagctggcacagatccgcgatgcccggggggcgctgagtgccctgcgcgaagagcaccgggagaagcttcgccgggcagccgaggaggcagagcgccagcgccagatccagctggcccagaagctggagataatgcggcgtgtacatgagccagccggcccctgccgctggcccctaccccagcatgcccagcactgcggctgatcccagcatggtgagtgcctacatgtacccagcaggggccactggggcgcaggcggccccccaggcccaggccggaccaccgccagccccgcttactcatcctaccagcctactcccacagcgggctaccagaacgtggcctcccaggccccacagagcctcccggccatctctcagcctccgcagtccagcaccatgggctacatggggagccagtcagtctccatgggctaccagccttacaacatgcagaatctcatgaccaccctcccaagccaggatgcgtctctgccaccccagcagccctacatcgcggggcagcagcccatgtaccagcagatggcaccctctggcggtcccccccagcagcagccccccgtggcccagcaaccgcaggcacaggggccgccggcacagggcagcgaggcccagctcatttcattcgactgacccaggccatgctcacgtccggagtaacactacatacagttcacctgaaacgcctcgtctctaactgccgtcgtcctgcctccctgtcctctactgccggtagtgtcccttctctgcgagtgagggggggccttcaccccaagcccacctcccttgtcctcagcctactgcagtccctgagttagtctctgctttctttccccagggctgggccatggggagggaaggactttctcccaggggaagcccccagccctgtgggtcatggtctgtgagaggtggcaggaatggggaccctcaccccccaagcagcctgtgccctctggccgcactgtgagctggctgtggtgtctgggtgtggcctggggctccctctgcaggggcctctctcggcagccacagccaagggtggaggcttcaggtctccagcttctctgcttctcagctgccatctccagtgccccagaatggtacagcgataataaaatgtatttcagaaagca

SEQ ID NO: 633070 - DNA, 426 bp, Homo sapiens
ttcagcgactgcagctcagccaacccaagggaagacctgggtgccttcagcagaggtcagatgcagaacccatttaaagacgcctcgtttccgctgcgaactggggatatgagcggccccgtgttcacgtattccggcatccacatcatcctccgcactgagtgagtgtgaggagcccacgcctgccctcgtagcagtgcagggcggtaggccggcgggctcccccttgcccgccagccattggcggaacctcccactccctgccaccgtcacacagtgctggagggagactcgaggggggaattgtttctagttaggcgacgctcctctgttcagtcgcaaaggtggagactcatggcgcggagccatggggggtctgagcaactgtgcggcaccctttcacccccaattaaacccagaaccact

SEQ ID NO: 633071 - DNA, 282 bp, Homo sapiens
ccatggacatctaaaccaacagccatgatgggggcagaagctgtgtgccagacattatacaggcagcaaaagcttgtggtcatgcctgggctcatagtgactgagcaggtacttcaggcccttggaagcaggcagagcggtagatcatgagacatattgcaaagaaggggcctctgatttcaagtcgaaactttgaaggtcctactgtgggttgcctggcaggatttcccacaagccaggaagtaatttccttatgcagacaactaaaactcacttgaaagc

SEQ ID NO: 633072 - DNA, 2901 bp, Homo sapiens
agcggaaaaaggcggaagcggaagtcggggggcgcgccagctcgtagcaggggagcgcccgcggcgtcgggtttgggctggaggtcgccatggggcgaggcagcggcaccttcgagcgtctcctagacaaggcgaccagccagctcctgttggagacagattgggagtccattttgcagatctgcgacctgatccgccaaggggacacacaagcaaaatatgctgtgaattccatcaagaagaaagtcaacgacaagaacccacacgtcgccttgtatgccctggaggtcatggaatctgtggtaaagaactgtggccagacagttcatgatgaggtggccaacaagcagaccatggaggagctgaaggacctgctgaagagacaagtggaggtaaacgtccgtaacaagatcctgtacctgatccaggcctgggcgcatgccttccggaacgagcccaagtacaaggtggtccaggacacctaccagatcatgaaggtggaggggcacgtctttccagaattcaaagagagcgatgccatgtttgctgccgagagagccccagactgggtggacgctgaggaatgccaccgctgcagggtgcagttcggggtgatgacccgtaagcaccactgccgggcgtgtgggcagatattctgtggaaagtgttcttccaagtactccaccatccccaagtttggcatcgagaaggaggtgcgcgtgtgtgagccctgctacgagcagctgaacaggaaagcggagggaaaggccacttccaccactgagctgccccccgagtacctgaccagccccctgtctcagcagtcccagctgccccccaagagggacgagacggccctgcaggaggaggaggagctgcagctggccctggcgctgtcacagtcagaggcggaggagaaggagaggctgagacagaagtccacgtacacttcgtaccccaaggcggagcccatgccctcggcctcctcagcgccccccgccagcagcctgtactcttcacctgtgaactcgtcggcgcctctggctgaggacatcgaccctgagctcgcacggtatctcaaccggaactactgggagaagaagcaggaggaggctcgcaagagccccacgccatctgcgcccgtgcccctgacggagccggctgcacagcctggggaagggcacgcagcccccaccaacgtggtggagaaccccctcccggagacagactctcagcccattcctccctctggtggcccctttagtgagccacagttccacaatggcgagtctgaggagagccacgagcagttcctgaaggcgctgcagaacgccgtcaccaccttcgtgaaccgcatgaagagtaaccacatgcggggccgcagcatcaccaatgactcggccgtgctctcactcttccagtccatcaacggcatgcacccgcagctgctggagctgctcaaccagctggacgagcgcaggctgtactatgaggggctgcaggacaagctggcacagatccgcgatgcccggggggcgctgagtgccctgcgcgaagagcaccgggagaagcttcgccgggcagccgaggaggcagagcgccagcgccagatccagctggcccagaagctggagataatgcggcagaagaagcaggagtacctggaggtgcagaggcagctggccatccagcgcctgcaggagcaggagaaggagcggcagatgcggctggagcagcagaagcagacggtccagatgcgcgcgcagatgcccgccttccccctgccctacgcccagctccaggccatgcccgcagccggaggtgtgctctaccagccctcgggaccagccagcttccccagcaccttcagccctgccggctcggtggagggctccccaatgcacggcgtgtacatgagccagccggcccctgccgctggcccctaccccagcatgcccagcactgcggctgatcccagcatggtgagtgcctacatgtacccagcaggggccactggggcgcaggcggccccccaggcccaggccggaccaccgccagccccgcttactcatcctaccagaacgtggcctcccaggccccacagagcctcccggccatctctcagcctccgcagtccagcaccatgggctacatggggagccagtcagtctccatgggctaccagccttacaacatgcagaatctcatgaccaccctcccaagccaggatgcgtctctgccaccccagcagccctacatcgcggggcagcagcccatgtaccagcagatggcaccctctggcggtcccccccagcagcagccccccgtggcccagcaaccgcaggcacaggggccgccggcacagggcagcgaggcccagctcatttcattcgactgacccaggccatgctcacgtccggagtaacactacatacagttcacctgaaacgcctcgtctctaactgccgtcgtcctgcctccctgtcctctactgccggtagtgtcccttctctgcgagtgagggggggccttcaccccaagcccacctcccttgtcctcagcctactgcagtccctgagttagtctctgctttctttccccagggctgggccatggggagggaaggactttctcccaggggaagcccccagccctgtgggtcatggtctgtgagaggtggcaggaatggggaccctcaccccccaagcagcctgtgccctctggccgcactgtgagctggctgtggtgtctgggtgtggcctggggctccctctgcaggggcctctctcggcagccacagccaagggtggaggcttcaggtctccagcttctctgcttctcagctgccatctccagtgccccagaatggtacagcgataataaaatgtatttcagaaagca

SEQ ID NO: 633073 - DNA, 143 bp, Homo sapiens
actagaggaccggaggtatgctgcacagaaaggggtcagtcccagatccaagagcagaagctggacctgtatgggaaagaattaatatggagaaaaaactgaaaaagtaagtatatcgaactgtatcatgggacagaaacatg

SEQ ID NO: 633074 - DNA, 3200 bp, Homo sapiens
  misc_feature (2299)..(2299): n is a, c, g, or t
agcggaaaaaggcggaagcggaagtcggggggcgcgccagctcgtagcaggggagcgcccgcggcgtcgggtttgggctggaggtcgccatggggcgaggcagcggcaccttcgagcgtctcctagacaaggcgaccagccagctcctgttggagacagattgggagtccattttgcagatctgcgacctgatccgccaaggggacacacaagcaaaatatgctgtgaattccatcaagaagaaagtcaacgacaagaacccacacgtcgccttgtatgccctggaggtcatggaatctgtggtaaagaactgtggccagacagttcatgatgaggtggccaacaagcagaccatggaggagctgaaggacctgctgaagagacaagtggaggtaaacgtccgtaacaagatcctgtacctgatccaggcctgggcgcatgccttccggaacgagcccaagtacaaggtggtccaggacacctaccagatcatgaaggtggaggggcacgtctttccagaattcaaagagagcgatgccatgtttgctgccgagagagccccagactgggtggacgctgaggaatgccaccgctgcagggtgcagttcggggtgatgacccgtaagcaccactgccgggcgtgtgggcagatattctgtggaaagtgttcttccaagtactccaccatccccaagtttggcatcgagaaggaggtgcgcgtgtgtgagccctgctacgagcagctgaacaggaaagcggagggaaaggccacttccaccactgagctgccccccgagtacctgaccagccccctgtctcagcagtcccagctgccccccaagagggacgagacggccctgcaggaggaggaggagctgcagctggccctggcgctgtcacagtcagaggcggaggagaaggagaggctgagacagaagtccacgtacacttcgtaccccaaggcggagcccatgccctcggcctcctcagcgccccccgccagcagcctgtactcttcacctgtgaactcgtcggcgcctctggctgaggacatcgaccctgagctcgcacggtatctcaaccggaactactgggagaagaagcaggaggaggctcgcaagagccccacgccatctgcgcccgtgcccctgacggagccggctgcacagcctggggaagggcacgcagcccccaccaacgtggtggagaaccccctcccggagacagactctcagcccattcctccctctggtggcccctttagtgagccacagttccacaatggcgagtctgaggagagccacgagcagttcctgaaggcgctgcagaacgccgtcaccaccttcgtgaaccgcatgaagagtaaccacatgcggggccgcagcatcaccaatgactcggccgtgctctcactcttccagtccatcaacggcatgcacccgcagctgctggagctgctcaaccagctggacgagcgcaggctgtactatgaggggctgcaggacaagctggcacagatccgcgatgcccggggggcgctgagtgccctgcgcgaagagcaccgggagaagcttcgccgggcagccgaggaggcagagcgccagcgccagatccagctggcccagaagctggagataatgcggcagaagaagcaggagtacctggaggtgcagaggcagctggccatccagcgcctgcaggagcaggagaaggagcggcagatgcggctggagcagcagaagcagacggtccagatgcgcgcgcagatgcccgccttccccctgccctacgcccagctccaggccatgcccgcagccggaggtgtgctctaccagccctcgggaccagccagcttccccagcaccttcagccctgccggctcggtggagggctccccaatgcacggcgtgtacatgagccagccggcccctgccgctggcccctaccccagcatgcccagcactgcggctgatcccagcatggtgagtgcctacatgtacccagcaggggccactggggcgcaggcggccccccaggcccaggccggaccaccgccagccccgcttactcatcctaccagcctactcccacagcgggctaccagaacgtggcctcccaggccccacagagcctcccggccatctctcagcctccgcagtccagcaccatgggctacatggggagccagtcagtctccatgggctaccagccttacaacatgcagaatctcatgaccaccctcccaagccaggatgcgtctctgccaccccagcagccctacatcgcggggcagcagcantggtaccagcagggggagacgcatacccgaggccccttctcagcagacagaacgaggacacaagtctcagggcagatacgcgcatccgcaagtgtagacaggaaaaaccgtgaatttacttgaaaggcaaaggccgcatgagctggctgcatgagctgcagtccgtggacatggattacaagcacttgtgggtctgtggctctgctgggacaaaagccttcctccctgggctggggaagggaggaccagggccatgcctgctttcctcctgcaccatgtaccagcagatggcaccctctggcggtcccccccagcagcagccccccgtggcccagcaaccgcaggcacaggggccgccggcacagggcagcgaggcccagctcatttcattcgactgacccaggccatgctcacgtccggagtaacactacatacagttcacctgaaacgcctcgtctctaactgccgtcgtcctgcctccctgtcctctactgccggtagtgtcccttctctgcgagtgagggggggccttcaccccaagcccacctcccttgtcctcagcctactgcagtccctgagttagtctctgctttctttccccagggctgggccatggggagggaaggactttctcccaggggaagcccccagccctgtgggtcatggtctgtgagaggtggcaggaatggggaccctcaccccccaagcagcctgtgccctctggccgcactgtgagctggctgtggtgtctgggtgtggcctggggctccctctgcaggggcctctctcggcagccacagccaagggtggaggcttcaggtctccagcttctctgcttctcagctgccatctccagtgccccagaatggtacagcgataataaaatgtatttcagaaagca

SEQ ID NO: 633075 - DNA, 4331 bp, Homo sapiens
agcggaaaaaggcggaagcggaagtcggggggcgcgccagctcgtagcaggggagcgcccgcggcgtcgggtttgggctggaggtcgccatggggcgaggcagcggcaccttcgagcgtctcctagacaaggcgaccagccagctcctgttggagacagattgggagtccattttgcagatctgcgacctgatccgccaaggggacacacaagcaaaatatgctgtgaattccatcaagaagaaagtcaacgacaagaacccacacgtcgccttgtatgccctggaggtcatggaatctgtggtaaagaactgtggccagacagttcatgatgaggtggccaacaagcagaccatggaggagctgaaggacctgctgaagagacaagtggaggtaaacgtccgtaacaagatcctgtacctgatccaggcctgggcgcatgccttccggaacgagcccaagtacaaggtggtccaggacacctaccagatcatgaaggtggaggggcacgtctttccagaattcaaagagagcgatgccatgtttgctgccgagagagccccagactgggtggacgctgaggaatgccaccgctgcagggtgcagttcggggtgatgacccgtaagcaccactgccgggcgtgtgggcagatattctgtggaaagtgttcttccaagtactccaccatccccaagtttggcatcgagaaggaggtgcgcgtgtgtgagccctgctacgagcagctgaacaggaaagcggagggaaaggccacttccaccactgagctgccccccgagtacctgaccagccccctgtctcagcagtcccagctgccccccaagagggacgagacggccctgcaggaggaggaggagctgcagctggccctggcgctgtcacagtcagaggcggaggagaaggagaggctgagacagaagtccacgtacacttcgtaccccaaggcggagcccatgccctcggcctcctcagcgccccccgccagcagcctgtactcttcacctgtgaactcgtcggcgcctctggctgaggacatcgaccctgagctcgcacggtatctcaaccggaactactgggagaagaagcaggaggaggctcgcaagagccccacgccatctgcgcccgtgcccctgacggagccggctgcacagcctggggaagggcacgcagcccccaccaacgtggtggagaaccccctcccggagacagactctcagcccattcctccctctggtggcccctttagtgagccacagttccacaatggcgagtctgaggagagccacgagcagttcctgaaggcgctgcagaacgccgtcaccaccttcgtgaaccgcatgaagagtaaccacatgcggggccgcagcatcaccaatgactcggccgtgctctcactcttccagtccatcaacggcatgcacccgcagctgctggagctgctcaaccagctggacgagcgcaggctgtactatgaggggctgcaggacaagctggcacagatccgcgatgcccggggggcgctgagtgccctgcgcgaagagcaccgggagaagcttcgccgggcagccgaggaggcagagcgccagcgccagatccagctggcccagaagctggagataatgcggcagaagaagcaggagtacctggaggtgcagaggcagctggccatccagcgcctgcaggagcaggagaaggagcggcagatgcggctggagcagcagaagcagacggtccagatgcgcgcgcagatgcccgccttccccctgccctacgcccagctccaggccatgcccgcagccggaggtgtgctctaccagccctcgggaccagccagcttccccagcaccttcagccctgccggctcggtggagggctccccaatgcacggcgtgtacatgagccagccggcccctgccgctggcccctaccccagcatgcccagcactgcggctgatcccagcatggtgagtgcctacatgtacccagcaggggccactggggcgcaggcggccccccaggcccaggccggaccaccgccagccccgcttactcatcctaccagcctactcccacagcgggctaccagaacgtggcctcccaggccccacagagcctcccggccatctctcagcctccgcagtccagcaccatgggctacatggggagccagtcagtctccatgggctaccagccttacaacatgcagaatctcatgaccaccctcccaagccaggatgcgtctctgccaccccagcagccctacatcgcggggcagcagcccatgtaccagcagatggcaccctctggcggtcccccccagcagcagccccccgtggcccagcaaccgcaggcacaggggccgccggcacagggcagcgaggcccagctcatttcattcgactgacccaggccatgctcacgtccggagtaacactacatacagttcacctgaaacgcctcgtctctaactgccgtcgtcctgcctccctgtcctctactgccggtagtgtcccttctctgcgagtgagggggggccttcaccccaagcccacctcccttgtcctcagcctactgcagtccctgagttagtctctgctttctttccccagggctgggccatggggagggaaggactttctcccaggggaagcccccagccctgtgggtcatggtctgtgagaggtggcaggaatggggaccctcaccccccaagcagcctgtgccctctggccgcactgtgagctggctgtggtgtctgggtgtggcctggggctccctctgcaggggcctctctcggcagccacagccaagggtggaggcttcaggtctccagcttctctgcttctcagctgccatctccagtgccccagaatggtacagcgataataaaatgtatttcagaaagcatcagcgttttttctttaattaatttttttgagatggagtctcactctgtcacccaggctggagtggtgatctccgctcactgcaagctccgcctcctgggttcaagcgattctcgggcctcagcctcccgagtagctggactacaggtgcaccccattaccatgcctggctagtttttgtatttttagtagcgacggtgtttcaccatgttggccaggctggtcgtgaacgcctaacctcaggtgatccacctgcctcgggctcctaaagtgctgggattacaggcatgagccaccgcgcccgacctgcatcaacgtttgctcagggggcaggtggtcaggctgatggcccagctgcaggcagggtcatttccagcctgcccctccctgaggctgcgtgccagggttcatgtgtgccctccgcggctctgcactgaccccgccggtagctggggaggagtttgggcttggcgcctccttcgtgtagtggctgaagcttcccgggtgctcctcattcctgggaagggagtcgggtgatgggaacggtgggagctcagcgctccgagtctgcggccgggggccagcggggctgaaacgcgcctcctgagtgttgaaagcggcaggcgccggcctttgcacccagaggccagggcgtctcactcaccttcacatccaggcctcttaggggagcgcggctttggcttttccaggaaggaatggactccaacggacagggaaagaagaagtgtggagagacgggcaggataagcaggcactgggcccaagccgcccttggaggctctgcctgttctgatctgaaggcggaggctcagccgtgctctcccaggaagccacctgggcgtttggggctttagctaggaaagaggatgtcgcctgcggctgcgaaggcgccaaagcccagacctcgcgcctccgcccgcgacggcggcactgggggcccggagcgggcgggagacgtggattactgcgggcttcggggccctagcctcgaccgcgacgttcgctcgcatcgcgtacggacagaaacccgtgagcgctgaagaaagaacacctgaatccggagccccagcccccgtcgctcgtttgcgcgaccccaaaacctggcgggacgagggtcgcccgatgtctagctgccgccacagacgacgcttttgcgtctgcgcagcgcgccgccttgtgggtaatctcagggtgagacgaggctagcgcgaggtacggctagagcgtcatttccggctcgaatgcccggcagccgtggcggctagagcgttcctccccagctcgaatgcccggcggccgaggcggctagagcgtcgcctcctcccggggaaccgcgtgtgaccttccagcccgcggaccgatgctgccggcggccgcaagcttatc

SEQ ID NO: 633076 - DNA, 127 bp, Homo sapiens
  misc_feature (23)..(24): n is a, c, g, or t
caagacctgatggatatccttgnnccctcccctgctattatacactttcttccttttttgtgtccttcttgtactcatggcagaagcaggacacaaaaaaggaagaaagatgtataatagcaggaag

SEQ ID NO: 633077 - DNA, 3088 bp, Homo sapiens
  misc_feature (2937)..(2937): n is a, c, g, or t
  misc_feature (2948)..(2949): n is a, c, g, or t
  misc_feature (2962)..(2962): n is a, c, g, or t
agcggaaaaaggcggaagcggaagtcggggggcgcgccagctcgtagcaggggagcgcccgcggcgtcgggtttgggctggaggtcgccatggggcgaggcagcggcaccttcgagcgtctcctagacaaggcgaccagccagctcctgttggagacagattgggagtccattttgcagatctgcgacctgatccgccaaggggacacacaagcaaaatatgctgtgaattccatcaagaagaaagtcaacgacaagaacccacacgtcgccttgtatgccctggaggtcatggaatctgtggtaaagaactgtggccagacagttcatgatgaggtggccaacaagcagaccatggaggagctgaaggacctgctgaagagacaagtggaggtaaacgtccgtaacaagatcctgtacctgatccaggcctgggcgcatgccttccggaacgagcccaagtacaaggtggtccaggacacctaccagatcatgaaggtggaggggcacgtctttccagaattcaaagagagcgatgccatgtttgctgccgagagagccccagactgggtggacgctgaggaatgccaccgctgcagggtgcagttcggggtgatgacccgtaagcaccactgccgggcgtgtgggcagatattctgtggaaagtgttcttccaagtactccaccatccccaagtttggcatcgagaaggaggtgcgcgtgtgtgagccctgctacgagcagctgaacaggaaagcggagggaaaggccacttccaccactgagctgccccccgagtacctgaccagccccctgtctcagcagtcccagctgccccccaagagggacgagacggccctgcaggaggaggaggagctgcagctggccctggcgctgtcacagtcagaggcggaggagaaggagaggctgagacagaagtccacgtacacttcgtaccccaaggcggagcccatgccctcggcctcctcagcgccccccgccagcagcctgtactcttcacctgtgaactcgtcggcgcctctggctgaggacatcgaccctgagctcgcacggtatctcaaccggaactactgggagaagaagcaggaggaggctcgcaagagccccacgccatctgcgcccgtgcccctgacggagccggctgcacagcctggggaagggcacgcagcccccaccaacgtggtggagaaccccctcccggagacagactctcagcccattcctccctctggtggcccctttagtgagccacagttccacaatggcgagtctgaggagagccacgagcagttcctgaaggcgctgcagaacgccgtcaccaccttcgtgaaccgcatgaagagtaaccacatgcggggccgcagcatcaccaatgactcggccgtgctctcactcttccagtccatcaacggcatgcacccgcagctgctggagctgctcaaccagctggacgagcgcaggctgtactatgaggggctgcaggacaagctggcacagatccgcgatgcccggggggcgctgagtgccctgcgcgaagagcaccgggagaagcttcgccgggcagccgaggaggcagagcgccagcgccagatccagctggcccagaagctggagataatgcggcagaagaagcaggagtacctggaggtgcagaggcagctggccatccagcgcctgcaggagcaggagaaggagcggcagatgcggctggagcagcagaagcagacggtccagatgcgcgcgcagatgcccgccttccccctgccctacgcccagctccaggccatgcccgcagccggaggtgtgctctaccagccctcgggaccagccagcttccccagcaccttcagccctgccggctcggtggagggctccccaatgcacggcgtgtacatgagccagccggcccctgccgctggcccctaccccagcatgcccagcactgcggctgatcccagcatggtgagtgcctacatgtacccagcaggggccactggggcgcaggcggccccccaggcccaggccggaccaccgccagccccgcttactcatcctaccagcctactcccacagcgggctaccagaacgtggcctcccaggccccacagagcctcccggccatctctcagcctccgcagtccagcaccatgggctacatggggagccagtcagtctccatgggctaccagccttacaacatgcagaatctcatgaccaccctcccaagccaggatgcgtctctgccaccccagcagccctacatcgcggggcagcagcccatgtaccagcagatggcaccctctggcggtcccccccagcagcagccccccgtggcccagcaaccgcaggcacaggggccgccggcacagggcagcgaggcccagctcatttcattcgactgacccaggccatgctcacgtccggagtaacactacatacagttcacctgaaacgcctcgtctctaactgccgtcgtcctgcctccctgtcctctactgccggtagtgtcccttctctgcgagtgagggggggccttcaccccaagcccacctcccttgtcctcagcctactgcagtccctgagttagtctctgctttctttccccagggctgggccatggggagggaaggactttctcccaggggaagcccccagccctgtgggtcatggtctgtgagaggtggcaggaatggggaccctcaccccccaagcagcctgtgccctctggccgcactgtgagctggctgtggtgtctgggtgtggcctggggctccctctgcaggggcctctctcggcagccacagccaagggtggaggcttcaggtctccagcttctctgcttctcagctgccatctccagtgccccagaatggtacagcgataataaaatgtatttcagaaagcaaaaaaaaaaccnaaccacacacnnccaaccaccaccnagcacccaacccacagacagcacaagagagcaacggcacgcacacacacaaccaccgcgcacacaccagcgccagacacacaccgacgcggagagcggcggcaccccacaccgacacgcaggccgc

SEQ ID NO: 633078 - DNA, 3262 bp, Homo sapiens
agcggaaaaaggcggaagcggaagtcggggggcgcgccagctcgtagcaggggagcgcccgcggcgtcgggtttgggctggaggtcgccatggggcgaggcagcggcaccttcgagcgtctcctagacaaggcgaccagccagctcctgttggagacagattgggagtccattttgcagatctgcgacctgatccgccaaggggacacacaagcaaaatatgctgtgaattccatcaagaagaaagtcaacgacaagaacccacacgtcgccttgtatgccctggaggtcatggaatctgtggtaaagaactgtggccagacagttcatgatgaggtggccaacaagcagaccatggaggagctgaaggacctgctgaagagacaagtggaggtaaacgtccgtaacaagatcctgtacctgatccaggcctgggcgcatgccttccggaacgagcccaagtacaaggtggtccaggacacctaccagatcatgaaggtggaggggcacgtctttccagaattcaaagagagcgatgccatgtttgctgccgagagagccccagactgggtggacgctgaggaatgccaccgctgcagggtgcagttcggggtgatgacccgtaagcaccactgccgggcgtgtgggcagatattctgtggaaagtgttcttccaagtactccaccatccccaagtttggcatcgagaaggaggtgcgcgtgtgtgagccctgctacgagcagctgaacaggaaagcggagggaaaggccacttccaccactgagctgccccccgagtacctgaccagccccctgtctcagcagtcccagctgccccccaagagggacgagacggccctgcaggaggaggaggagctgcagctggccctggcgctgtcacagtcagaggcggaggagaaggagaggctgagacagaagtccacgtacacttcgtaccccaaggcggagcccatgccctcggcctcctcagcgccccccgccagcagcctgtactcttcacctgtgaactcgtcggcgcctctggctgaggacatcgaccctgagctcgcacggtatctcaaccggaactactgggagaagaagcaggaggaggctcgcaagagccccacgccatctgcgcccgtgcccctgacggagccggctgcacagcctggggaagggcacgcagcccccaccaacgtggtggagaaccccctcccggagacagactctcagcccattcctccctctggtggcccctttagtgagccacagttccacaatggcgagtctgaggagagccacgagcagttcctgaaggcgctgcagaacgccgtcaccaccttcgtgaaccgcatgaagagtaaccacatgcggggccgcagcatcaccaatgactcggccgtgctctcactcttccagtccatcaacggcatgcacccgcagctgctggagctgctcaaccagctggacgagcgcaggctgtactatgaggggctgcaggacaagctggcacagatccgcgatgcccggggggcgctgagtgccctgcgcgaagagcaccgggagaagcttcgccgggcagccgaggaggcagagcgccagcgccagatccagctggcccagaagctggagataatgcggcagaagaagcaggagtacctggaggtgcagaggcagctggccatccagcgcctgcaggagcaggagaaggagcggcagatgcggctggagcagcagaagcagacggtccagatgcgcgcgcagatgcccgccttccccctgccctacgcccagctccaggccatgcccgcagccggaggtgtgctctaccagccctcgggaccagccagcttccccagcaccttcagccctgccggctcggtggagggctccccaatgcacggcgtgtacatgagccagccggcccctgccgctggcccctaccccagcatgcccagcactgcggctgatcccagcatggtgagtgcctacatgtacccagcaggggccactggggcgcaggcggccccccaggcccaggccggaccaccgccagccccgcttactcatcctaccagcctactcccacagcgggctaccagaacgtggcctcccaggccccacagagcctcccggccatctctcagcctccgcagtccagcaccatgggctacatggggagccagtcagtctccatgggctaccagccttacaacatgcagaatctcatgaccaccctcccaagccaggatgcgtctctgccaccccagcagccctacatcgcggggcagcagcccatgtaccagcagatggcaccctctggcggtcccccccagcagcagccccccgtggcccagcaaccgcaggcacaggggccgccggcacagggcagcgaggcccagctcatttcattcgactgacccaggccatgctcacgtccggagtaacactacatacagttcacctgaaacgcctcgtctctaactgccgtcgtcctgcctccctgtcctctactgccggtagtgtcccttctctgcgagtgagggggggccttcaccccaagcccacctcccttgtcctcagcctactgcagtccctgagttagtctctgctttctttccccagggctgggccatggggagggaaggactttctcccaggggaagcccccagccctgtgggtcatggtctgtgagaggtggcaggaatggggaccctcaccccccaagcagcctgtgccctctggccgcactgtgagctggctgtggtgtctgggtgtggcctggggctccctctgcaggggcctctctcggcagccacagccaagggtggaggcttcaggtctccagcttctctgcttctcagctgccatctccagtgccccagaatggtacagcgataataaaatgtatttcagaaagcaaaaacacaaaacaacacaaacaacaaacaaacaccaaacaacacaaagagcggcggccccccccacaaacaactctcccccgaggggccccacaccctcgccgccccccgcccccccgcgccccaccgggcgggccccccatctgggcgcgcccagctccttaccccctcggcggcctcgtgcgccgccccccgtcttcaacgcgcggtctgcggcgctttggcggcaacactgtgcgtccccctctggcggcctcttgcggggcacgggcgccccctcttgtccccggcgggtgctgtcgccactccccctcgtggcacaccttcctcctctccgc

SEQ ID NO: 633079 - DNA, 466 bp, Homo sapiens
  misc_feature (352)..(352): n is a, c, g, or t
  misc_feature (397)..(397): n is a, c, g, or t
  misc_feature (419)..(419): n is a, c, g, or t
  misc_feature (432)..(432): n is a, c, g, or t
  misc_feature (463)..(463): n is a, c, g, or t
tgagacaggatctcactctgtcacccaggctggaatgcagtggtgcaatcatggctcactacaacctccacctccagagatcaagcagtcctcccacctcagtctcctgagtagctgggactaccagtgtgcgccaccatccccagctaattttttgtaatttttatagagagggttttatcctcttgcccaggctggtcttgaactcctggggctcaagctgtcagtccagctcagcttcccaaagtgctggggttataggggaagagccaccgtgcctgggccaagtgcaaagctttttaacaataggaagttttcaaggggctcagggaagggaccaggggggccattntagggttcttccatggagtttcacgctttaacatttattgttttnacgttttgttccaggttaacanttttgggtttttnccacatccaggtggcattggcctgtttaggnggg

SEQ ID NO: 633080 - DNA, 164 bp, Homo sapiens
cgtatcatcaggatgctctagaaacaagtcatctgacgagatctagaggcggggcttttcacatgaggccaagacaacaagtatacaatcaatacccatgtgacacagtccaagtgctggggaatatgagggggcagtgggccatggggaggaagatatcagcc

SEQ ID NO: 633081 - DNA, 3108 bp, Homo sapiens
agcggaaaaaggcggaagcggaagtcggggggcgcgccagctcgtagcaggggagcgcccgcggcgtcgggtttgggctggaggtcgccatggggcgaggcagcggcaccttcgagcgtctcctagacaaggcgaccagccagctcctgttggagacagattgggagtccattttgcagatctgcgacctgatccgccaaggggacacacaagcaaaatatgctgtgaattccatcaagaagaaagtcaacgacaagaacccacacgtcgccttgtatgccctggaggtcatggaatctgtggtaaagaactgtggccagacagttcatgatgaggtggccaacaagcagaccatggaggagctgaaggacctgctgaagagacaagtggaggtaaacgtccgtaacaagatcctgtacctgatccaggcctgggcgcatgccttccggaacgagcccaagtacaaggtggtccaggacacctaccagatcatgaaggtggaggggcacgtctttccagaattcaaagagagcgatgccatgtttgctgccgagagagccccagactgggtggacgctgaggaatgccaccgctgcagggtgcagttcggggtgatgacccgtaagcaccactgccgggcgtgtgggcagatattctgtggaaagtgttcttccaagtactccaccatccccaagtttggcatcgagaaggaggtgcgcgtgtgtgagccctgctacgagcagctgaacaggaaagcggagggaaaggccacttccaccactgagctgccccccgagtacctgaccagccccctgtctcagcagtcccagctgccccccaagagggacgagacggccctgcaggaggaggaggagctgcagctggccctggcgctgtcacagtcagaggcggaggagaaggagaggctgagacagaagtccacgtacacttcgtaccccaaggcggagcccatgccctcggcctcctcagcgccccccgccagcagcctgtactcttcacctgtgaactcgtcggcgcctctggctgaggacatcgaccctgagctcgcacggtatctcaaccggaactactgggagaagaagcaggaggaggctcgcaagagccccacgccatctgcgcccgtgcccctgacggagccggctgcacagcctggggaagggcacgcagcccccaccaacgtggtggagaaccccctcccggagacagactctcagcccattcctccctctggtggcccctttagtgagccacagttccacaatggcgagtctgaggagagccacgagcagttcctgaaggcgctgcagaacgccgtcaccaccttcgtgaaccgcatgaagagtaaccacatgcggggccgcagcatcaccaatgactcggccgtgctctcactcttccagtccatcaacggcatgcacccgcagctgctggagctgctcaaccagctggacgagcgcaggctgtactatgaggggctgcaggacaagctggcacagatccgcgatgcccggggggcgctgagtgccctgcgcgaagagcaccgggagaagcttcgccgggcagccgaggaggcagagcgccagcgccagatccagctggcccagaagctggagataatgcggcagaagaagcaggagtacctggaggtgcagaggcagctggccatccagcgcctgcaggagcaggagaaggagcggcagatgcggctggagcagcagaagcagacggtccagatgcgcgcgcagatgcccgccttccccctgccctacgcccagctccaggccatgcccgcagccggaggtgtgctctaccagccctcgggaccagccagcttccccagcaccttcagccctgccggctcggtggagggctccccaatgcacggcgtgtacatgagccagccggcccctgccgctggcccctaccccagcatgcccagcactgcggctgatcccagcatggtgagtgcctacatgtacccagcaggggccactggggcgcaggcggccccccaggcccaggccggaccaccgccagccccgcttactcatcctaccagcctactcccacagcgggctaccagaacgtggcctcccaggccccacagagcctcccggccatctctcagcctccgcagtccagcaccatgggctacatggggagccagtcagtctccatgggctaccagccttacaacatgcagaatctcatgaccaccctcccaagccaggatgcgtctctgccaccccagcagccctacatcgcggggcagcagcccatgtaccagcagatggcaccctctggcggtcccccccagcagcagccccccgtggcccagcaaccgcaggcacaggggccgccggcacagggcagcgaggcccagctcatttcattcgactgacccaggccatgctcacgtccggagtaacactacatacagttcacctgaaacgcctcgtctctaactgccgtcgtcctgcctccctgtcctctactgccggtagtgtcccttctctgcgagtgagggggggccttcaccccaagcccacctcccttgtcctcagcctactgcagtccctgagttagtctctgctttctttccccagggctgggccatggggagggaaggactttctcccaggggaagcccccagccctgtgggtcatggtctgtgagaggtggcaggaatggggaccctcaccccccaagcagcctgtgccctctggccgcactgtgagctggctgtggtgtctgggtgtggcctggggctccctctgcaggggcctctctcggcagccacagccaagggtggaggcttcaggtctccagcttctctgcttctcagctgccatctccagtgccccagaatggtacagcgataataaaatgtatttcagaaagcaaaaaaaaaaaaaaaaaaaaaaaaactctccggggctatctctaattccgggcgtggcgggaaaaggcggtgttttggaattgggcccttgggccataagctgtgttccctggacccaggctttcttggtcccacgggggtacattcggccgggccccccttatggggagcccgaataattccg

SEQ ID NO: 633082 - DNA, 465 bp, Homo sapiens
cagactcaagccagaggcaagaagtatacgatgggggacgctcctgactattgacagtaagccacgtggctgtaatagaaaaatacaagctgggccttggacttccccaatttgccctacttgattgatggggctcaccagatcacccagagcagcgccatcctgtgctacattgcccgcaagcacaacctgtgtggtgagacaaaagaggagcagatccgtgttggcattagggagaaccaggctatgcacgtctccactcagctggccagagtctgctacagtcctgacttggcgaaactgcagccagactacttggagaaacttcctacaatgctgcagcacttctcacagtcccggggcaagaggccatggttggtgggagacaagatcacttttgtagattacctcgcctatgatgtccttgacctgcacggaatattagagtctgtattacctgcttgg

SEQ ID NO: 633083 - DNA, 285 bp, Homo sapiens
ccttcaagacggtgtctgttcttgttgccaggctggagtgcaactggcacagtcttggctcactgcaacctccacctcctgggttcaagcgattcaagtagcttggattacaggcgtgtaccaccacacccggctaactttctgtattaatagagacgggttttcaccatgttggtcagctggtctcgaactcctgacctcaggtgatccacccacctcggcctcccaaagtgctgggattacaggcgtgagccactgtgcccggccaccagaacaccgtcgaag

SEQ ID NO: 633084 - DNA, 3103 bp, Homo sapiens
agcggggggagaggaagtgcccgtggagggcggcaggccccctcatcccgcgccaattatcctcagctcgggccgtcccccgctcccgaaggctggccttaagtcacgacctgacccgctgcgcctcggcgtgcacttagaggagcccggagctcttcgccaagcgcagaactgaccccccgcaactccacccgcgggggcggacacctaccgtgggccgtgtcgggggcggctcccccaggtcgcctttcccatcccgggagctcacctgtgcgaagcggtcaaggacccgagcagctaaaggacaaggcgaccagccagctcctgttggagacagattgggagtccattttgcagatctgcgacctgatccgccaaggggacacacaagcaaaatatgctgtgaattccatcaagaagaaagtcaacgacaagaacccacacgtcgccttgtatgccctggaggtcatggaatctgtggtaaagaactgtggccagacagttcatgatgaggtggccaacaagcagaccatggaggagctgaaggacctgctgaagagacaagtggaggtaaacgtccgtaacaagatcctgtacctgatccaggcctgggcgcatgccttccggaacgagcccaagtacaaggtggtccaggacacctaccagatcatgaaggtggaggggcacgtctttccagaattcaaagagagcgatgccatgtttgctgccgagagagccccagactgggtggacgctgaggaatgccaccgctgcagggtgcagttcggggtgatgacccgtaagcaccactgccgggcgtgtgggcagatattctgtggaaagtgttcttccaagtactccaccatccccaagtttggcatcgagaaggaggtgcgcgtgtgtgagccctgctacgagcagctgaacaggaaagcggagggaaaggccacttccaccactgagctgccccccgagtacctgaccagccccctgtctcagcagtcccagctgccccccaagagggacgagacggccctgcaggaggaggaggagctgcagctggccctggcgctgtcacagtcagaggcggaggagaaggagaggctgagacagaagtccacgtacacttcgtaccccaaggcggagcccatgccctcggcctcctcagcgccccccgccagcagcctgtactcttcacctgtgaactcgtcggcgcctctggctgaggacatcgaccctgagctcgcacggtatctcaaccggaactactgggagaagaagcaggaggaggctcgcaagagccccacgccatctgcgcccgtgcccctgacggagccggctgcacagcctggggaagggcacgcagcccccaccaacgtggtggagaaccccctcccggagacagactctcagcccattcctccctctggtggcccctttagtgagccacagttccacaatggcgagtctgaggagagccacgagcagttcctgaaggcgctgcagaacgccgtcaccaccttcgtgaaccgcatgaagagtaaccacatgcggggccgcagcatcaccaatgactcggccgtgctctcactcttccagtccatcaacggcatgcacccgcagctgctggagctgctcaaccagctggacgagcgcaggctgtactatgaggggctgcaggacaagctggcacagatccgcgatgcccggggggcgctgagtgccctgcgcgaagagcaccgggagaagcttcgccgggcagccgaggaggcagagcgccagcgccagatccagctggcccagaagctggagataatgcggcagaagaagcaggagtacctggaggtgcagaggcagctggccatccagcgcctgcaggagcaggagaaggagcggcagatgcggctggagcagcagaagcagacggtccagatgcgcgcgcagatgcccgccttccccctgccctacgcccagctccaggccatgcccgcagccggaggtgtgctctaccagccctcgggaccagccagcttccccagcaccttcagccctgccggctcggtggagggctccccaatgcacggcgtgtacatgagccagccggcccctgccgctggcccctaccccagcatgcccagcactgcggctgatcccagcatggtgagtgcctacatgtacccagcaggggccactggggcgcaggcggccccccaggcccaggccggaccaccgccagccccgcttactcatcctaccagcctactcccacagcgggctaccagaacgtggcctcccaggccccacagagcctcccggccatctctcagcctccgcagtccagcaccatgggctacatggggagccagtcagtctccatgggctaccagccttacaacatgcagaatctcatgaccaccctcccaagccaggatgcgtctctgccaccccagcagccctacatcgcggggcagcagcccatgtaccagcagatggcaccctctggcggtcccccccagcagcagccccccgtggcccagcaaccgcaggcacaggggccgccggcacagggcagcgaggcccagctcatttcattcgactgacccaggccatgctcacgtccggagtaacactacatacagttcacctgaaacgcctcgtctctaactgccgtcgtcctgcctccctgtcctctactgccggtagtgtcccttctctgcgagtgagggggggccttcaccccaagcccacctcccttgtcctcagcctactgcagtccctgagttagtctctgctttctttccccagggctgggccatggggagggaaggactttctcccaggggaagcccccagccctgtgggtcatggtctgtgagaggtggcaggaatggggaccctcaccccccaagcagcctgtgccctctggccgcactgtgagctggctgtggtgtctgggtgtggcctggggctccctctgcaggggcctctctcggcagccacagccaagggtggaggcttcaggtctccagcttctctgcttctcagctgccatctccagtgccccagaatggtacagcgataataaaatgtatttcagaaagca

SEQ ID NO: 633085 - DNA, 108 bp, Homo sapiens
tgacatgactccgttgcctacgcctttggtacacctagaggtgatttcctttttcatcgatggtactatttcttagtgtttaaattggaacatatcttggcctcatga

SEQ ID NO: 633086 - DNA, 155 bp, Homo sapiens
  misc_feature (10)..(12): n is a, c, g, or t
  misc_feature (53)..(53): n is a, c, g, or t
  misc_feature (119)..(119): n is a, c, g, or t
  misc_feature (137)..(138): n is a, c, g, or t
  misc_feature (147)..(147): n is a, c, g, or t
agtaagaagnnnaactcctctgtatccacacaacatcttgtctgtccagaatntggtcccctccttctcatgtggaggagtcccgccgtgccccagcacagtggagcccaggctacgantgtccgttagcccgctcnntggtacccntcccaggc

SEQ ID NO: 633087 - DNA, 676 bp, Homo sapiens
  misc_feature (277)..(277): n is a, c, g, or t
tgccttgtggcaatttattctctgtccatgactaaagaaatttatttacagggtgtaaaaaatcatgccatgcttctgcttaaacactgctctatgtttattcaaaatacaaatcccaaatccttctcatgcccacaaggccttcttacttacagctttcttctttcctctccctgtgccttttacccctcctcacttttcctttctcccaggaggcctccaattgcctttagtgggactttctttgttgctcgttgctgaatcttccaaaaagcancagcccacaccctccaggcctgttggcaacttacgtgtttccttccccccagatatttctttcccccagtattattcagggtgggtctctctactctcctcttccctgagaggccttctgtctccagatgttgtcacccgtatggacaatcttcttcccgaaacagtttacctggccctaacgcttattctccttaggcagttgttcatccttccagccactctgccagatgctttttatatgtacttatcatctgtgcctccaatagaatgtaagtcccctgacggcagaggcttgattttggctcactgcagaatcccctttgtctagaccagtgctggaacttttcagaggctcgttaaacttttttttttttcccacccgggggtgggggctctg

SEQ ID NO: 633088 - DNA, 108 bp, Homo sapiens
tggcatgtatagtgctatcatagattgtctgtgtgtaaaggaggtatgattatccccacgtcacagggatggaacacaggaagcgttgacaggggccatgctatctct

SEQ ID NO: 633089 - DNA, 482 bp, Homo sapiens
agggtggggtgtataggagggaggaggaatataagaggtaggggagggggagagggaggtgtggcaaggacgcacgggagtaaggggggaggagagtcgctaacgagggggaggtagacaggatgtgagtaggtggtgcagtggagtaggaaagaaaagtgggggtgagggggagggggggcgcccccagccccaatggtggggcggattttcaccccgagggggcagagggagggggagtggggggcacatccggggagaggccccgttgggggagcgggtcagggagtggtgggcgagtatgtcccgaggtccgccgggggaggggaggatggggggtcaattgtgggggggccccgggggatcgggggcttgtcatgaggttgtggggggggcccccccccccccccccccccaggggggttgggtggggttttaaccccggaagggggggggttttttttaaaaaaatttttttaaga

SEQ ID NO: 633090 - DNA, 778 bp, Homo sapiens
ggactctctaattacactccgttacagtggcttgaaaccaataaatagaacattaatgaagaatatgagatgaagcaagttccagcaccatcacaggcaaccaaaatcctcgtgtaggagtttgataggtggcagattctgaaagctgagataatgtttgtgctcgaagtatatcccaaacgactgcagaaaagtaaaatttatttaaggaaagcctaaaatactacaaattttagcagttttgagataatttgcctatgtaagctgatatgaaattaatccattattcaagtttttcagaaattaactgtgaagatgaaattttctgctataaatatggcagcaaatgaagtaatgatgacactgttgagaaaatttggttatgaaatagccacatgcttgttctgacattctacaaatattccatgaggttgttttccatattggctccctggaaagccttagaaattctcaagaagtcttggctactgattccagatatccgtgtcaaggtggagcaaagtctcttcctcttgttgactggaacacagaaaattactatcatctgcaccaccccaccctacctttatctgtaaaataattgctatatttttatgatgccattgtaatcaaccaactgtatcactttttaaaattgtatctgaggctaaatataatttactgcctaaaatttaaatatattaataaacttagtaccgtgccgaccccgcttttttttttttctatattattatatataatattatatataaatttt

SEQ ID NO: 633091 - DNA, 395 bp, Homo sapiens
acccttgaaattcggaggtgtagttgtagtgagccaagattgcccaccacactccagcctgggcaactagagcaagaccctgtctccaaaaaaaaaaaaagaagtctgaaatggggcctcaaagggttaacatcaaggtgctagcacagatgcttcccttctgaaggctctggaaaaaatctgtcccttgacctttctatcgtcaagaggccacctgccttctgtggctcgagcccaattcactcaagcctgtgctactgtcatcacatcttctccgactactcctgctccccacttgtaaaacccctgtgataaccttgacccaccgtggtaatccatagtaatctctcgaccttacaatgggaatgagcaaccttcatcccatcgtgcaacca

SEQ ID NO: 633092 - DNA, 538 bp, Homo sapiens
ggactctctaattacactccgttacagtggcttgaaaccaataaatagaacattaatgaagaatatgagatgaagcaagttccagcaccatcacaggcaaccaaaatcctcgtgtaggagtttgataggtggcagattctgaaagctgagataatgtttgtgctcgaagtatatcccaaacgactgcagaaaagtaaaatttatttaaggaaagcctaaaatactacaaattttagcagttttgagataatttgcctatagaatctctatttaaaccaacacaaatgcccaacaacgatacactggattaagaaaacatggcacatatacaccatggaatactatgcagccataaaaaatgaagagttcacgtcctttgtagggacatggatgaaactgggaaccatcattttcagcaaactatcgcaaggacaaaaacccaaacactgcatgttctcactcataagtgggaattgaacaatgagaacacatggacacaggaaggggaacatcacactctggggactgttgtgggagg

SEQ ID NO: 633093 - DNA, 787 bp, Homo sapiens
  misc_feature (22)..(23): n is a, c, g, or t
attaaaaggccgcaacataccnnccactcacccatagagttataataaattccatttcttccacccccacttcgagttgaacttacctattggctccctggaaagccttagaaattctcaagaagtcttggctactgattccagatatccgtgtcaaggtggagcaaagtgtacatctgctttatcactcaaatggctcattttataagtgaatttattatttgatttattttctattaaaacacacatacaaacatacgtatgcaaagattcataaacagattattttgtgcttttggtgattgttttatcattttaataggcaataagacatattagcaagtaacagaactatttatgaaaacaacctagcacaacattcatattatcgaaagatactgtaattgcccctgagaaccaaagtaaaatatatcttatcattctcaaaaaatatatattaataatgttagagtaggatatagataacatcagactccaaacattgattaggtgcttttatcttgtgattgcagctcttcctcttgttgactggaacacagaaaattactatcatctgcaccaccccaccctacctttatctgtaaaataattgctatatttttatgatgccattgtaatcaaccaactgtatcactttttaaaattgtatctgaggctaaatataatttactgcctaaaatttaaatatattaataaacttagtaccgtgccgaccccgcttttttttttttctatattattatatataatattatatataaatttt

SEQ ID NO: 633094 - DNA, 312 bp, Homo sapiens
  misc_feature (151)..(151): n is a, c, g, or t
  misc_feature (156)..(156): n is a, c, g, or t
caaactgaaatcttgagatcacacaggtggaaatatgtacataactgcacaaggtggttcaattctctggctctacagtgcagttttagtcagttttagtgcataggtttccatgtatttatagtctgtttatgctaaattctgggccaanacgcnatggagcatgtgtccaccactaaaatgcctctgcacttgaattctgtgctaattttgtggccagaaatgcggtgatcaaaacgctccatctttttacagtggcataggacagacgggcaaaaaaaattttttccccttaaaaaaggttgggccaat

SEQ ID NO: 633095 - DNA, 566 bp, Homo sapiens
tgggctcttgcaggaaacagttggtgggggtgggaggggaaccatttatttctactctccctatccaaagaagaggaggccaggggtgtgaagcttgcctctcgaaatgtggagagctacaccaggctggggaaccccacgcgctctgaggacctacgggattatgggccttccagagatgtgcctgcctatagtcaggatacttttaacgtacatgaggaaaacaacagccctttcctgaccatcaccagcatgcaccgagtcatggaagtctctcacgggggtcatatggctgtggcaacaaccggtggacttaccgcacacaggagctgtgctgaaggggcctttctcacgctatgcttaccagagacagccagatagggcaatatcctccatccgttctttaaagaacatccttccgggggctgcccaggatgctcatgcacgggatgagcatgggcaaggtttctaccagccacctccttatttggaatgactctgtagagatggcactccgggctcgcttccctctcttggggggggtgcagaccataacatggtgggct

SEQ ID NO: 633096 - DNA, 282 bp, Homo sapiens
catacaactcactatgagaaaacttcataccacatcagccgagcattacttatatgatatgtctccatagccatgacaatctccagcatacaccctcacacctaacaatacaagaaaattagccaggcatggtgtgtgggcacctgtagtcccggctatacgggagtttgaggcaggagactggcgtgaacccgggaggcagagcttgcagtgagccgagatcacaccactgcactccagcctgggcaacagagtgcgactctgtctcaaaaaaaacacaaa

SEQ ID NO: 633097 - DNA, 167 bp, Homo sapiens
cgcagctgtatccatttactggaactctggtgagacagccgaccgttgcgtgtaacaagagacatacatgaacgatggctacttgcacagggacttgtacactaacctcaccggatcgatgagcccttacgcaggcgttatgactgacgatgttcatgcgttgtggg

SEQ ID NO: 633098 - DNA, 118 bp, Homo sapiens
actgcgccggccacattcagttcttatctaagagatacccagacttaagtcttgaatgactacgattatgcccaattattaagtctgggttatttcttctgataagaactgaactttg

SEQ ID NO: 633099 - DNA, 109 bp, Homo sapiens
ctggggagcctggcgaggggcgacgccgacggccgagtttccccctttctagggtgaggatgggtcctacacaggcacccggagttacctaaggttgaaaaggtacgcc

SEQ ID NO: 633100 - DNA, 174 bp, Homo sapiens
gcaccactgtgcgctctggtggagcggaccatcccctcacttcacaggccatggcctcactttgtaacaaactcctaccacacgaccaataaaaacaacggtgggttttttttttttttttttttttttttttttttttttttttttttttttttttttttttttttttttttt

SEQ ID NO: 633101 - DNA, 88 bp, Homo sapiens
gattttcaccccacccttcccctccttttccctttttatatcccatttttatatcgatttcttattttacaataaaactttgctgcca

SEQ ID NO: 633102 - DNA, 419 bp, Homo sapiens
gtaacgtatctattgagttctagacgtgacgtgacagtcaatagacggtctgccctagtgtagtgtcctggtaatctgtactagaagcaattaccagactctggtcaggggaagccaagtagtgcttaaaggtctcccgtgagttaaggagacaaaacttggaattgggggaggttaatttttacataactaaattggtggggcagagtcattggaagaaggacgtgacatagacaaagaacactaaatatatgtcaccagcattttctttaaatggaaactatttcttgaaacaaatgatcaatggaaacacaatataccataacctgtgagcatactagcaaaaatataagggaaattttagctgtaagtacctacatcagaaaaagaagaaaaactccaaataaacatctaacatt

SEQ ID NO: 633103 - DNA, 554 bp, Homo sapiens
aagagcgacgacaggaagacgatgtggagctcggtacccatgctgttagtaaggagggtgagatcaaacagctggggagggagatccgcctgcagctgaaggccatagagccccagaaggaggaagctgatgagaactataactccgtcaacacaagaatgagaaaaacccagcatggggtcctgtcccagcaattcgtggagctcatcaacaagtgcaattcaatgcagtccgaataccgggagaagaacgtggagcggattcggaggcagctgaagatcaccaatgctgggatggtgtctgatgaggagttggagcagatgttggacagtgggcaagcgaggtgttctgtccatatcctgacggccaggcggggactcgaaaagctaatgaaatcggccgcaaggaaaccgcgttgaacccgatcggagctgacactttcactttctgctccaaggaagcggggaagaccaccatgaaacaccgctcgggagggagggggagtcaagcgcaccaagaggaaaatttcctctgttcgcccgaaggcgggaccg

SEQ ID NO: 633104 - DNA, 186 bp, Homo sapiens
ttacgaatcgagccggtaccgtcccttgtttgggccagtttctcccatttcaaatgggtgtatttacccaatgcctgtacccccactgtatccaggatgtaactaactggctttttattttacaggctcataggcagaaggaacttgatgtttcagatgagacttgggacctggactttggattta

SEQ ID NO: 633105 - DNA, 1190 bp, Homo sapiens
gtggtcggcgcgcccctccccacctcgcgggggccgtgtgggcgtcgctcggtcgttggggtgccggggacgtcgtgatgagaacggcgtcccagagacgacggcgacagagccgggacacgtgacagtcacagggtcacattctgcggtccacgagtttgggaccgggctggtcacgtgacgcggtgggggcaccatggggtgatgtgagatgcgtgtctcggattacgtacaaatgacgtattcctaccccttttggcaaccagatttccgttggaagatgcaacggttccggtgacggtagcaagttctcgcgtccaggcatctccgcttccgctcggggcgcaacaacttccgactccaccttcccagcctcgggcaaggaagagacgcgaccatggggatgacagctcggacgaagaggacaaggagcgggtcgcgctggtggtgcacccgggcacggcacggctggggagcccggacgaggagttcttccacaaggtccggacaattcggcagactattgtcaaactggggaataaagtccaggagttggagaaacagcaggtcaccatcctggccacgccccttcccgaggagagcatgaagcaggagctgcagaacctgcgcgatgagatcaaacagctggggagggagatccgcctgcagctgaaggccatagagccccagaaggaggaagctgatgagaactataactccgtcaacacaagaatgagaaaaacccaggtggaattcaagaagtcaggaagaggaacttccttggggcacactgaagaggaactcccctgcatggggtcctgtcccagcaattcgtggagctcatcaacaagtgcaattcaatgcagtccgaataccgggagaagaacgtggagcggattcggaggcagctgaagatcaccaatgctgggatggtgtctgatgaggagttggagcagatgttggacagtgggcaagcgaggtgttctgtccatatcctgacggccaggcggggactcgaaaagctaatgaaatcggccgcaaggaaaccgcgttgaacccgatcggagctgacactttcactttctgctccaaggaagcggggaagaccaccatgaaacaccgctcgggagggagggggagtcaagcgcaccaagaggaaaatttcctctgttcgcccgaaggcgggaccg

SEQ ID NO: 633106 - DNA, 1441 bp, Homo sapiens
  misc_feature (428)..(428): n is a, c, g, or t
gtggtcggcgcgcccctccccacctcgcgggggccgtgtgggcgtcgctcggtcgttggggtgccggggacgtcgtgatgagaacggcgtcccagagacgacggcgacagagccgggacacgtgacagtcacagggtcacattctgcggtccacgagtttgggaccgggctggtcacgtgacgcggtgggggcaccatggggtgatgtgagatgcgtgtctcggattacgtacaaatgacgtattcctaccccttttggcaaccagatttccgttggaagatgcaacggttccggtgacggtagcaagttctcgcgtccaggcatctccgcttccgctcggggcgcaacaacttccgactccaccttcccagcctcgggcaaggaagagacgcgaccatgtgcgcatgccccgaatttatcacggagnggcggggctgaggctgcgggagctggagcggggaagaaaagggaattccaacctgtggaaccttggggggtccccggggtcggcgccttcccattgactgtgggcggtgcaagggacggagcctctggcggctcgtgggggtgttggggtccgcagggggagggaggggagtgtcagagtgtgagcggggtacgggaattccaaatttgagggcctcccggctctggcgccggggagggagagctcaggccgccatgcgggacaggacccacgagctgagacagggggatgacagctcggacgaagaggacaaggagcgggtcgcgctggtggtgcacccgggcacggcacggctggggagcccggacgaggagttcttccacaaggtccggacaattcggcagactattgtcaaactggggaataaagtccaggagttggagaaacagcaggtcaccatcctggccacgccccttcccgaggagagcatgaagcaggagctgcagaacctgcgcgatgagatcaaacagctggggagggagatccgcctgcagctgaaggccatagagccccagaaggaggaagctgatgagaactataactccgtcaacacaagaatgagaaaaacccagcatggggtcctgtcccagcaattcgtggagctcatcaacaagtgcaattcaatgcagtccgaataccgggagaagaacgtggagcggattcggaggcagctgaagatcaccaatgctgggatggtgtctgatgaggagttggagcagatgttggacagtgggcaagcgaggtgttctgtccatatcctgacggccaggcggggactcgaaaagctaatgaaatcggccgcaaggaaaccgcgttgaacccgatcggagctgacactttcactttctgctccaaggaagcggggaagaccaccatgaaacaccgctcgggagggagggggagtcaagcgcaccaagaggaaaatttcctctgttcgcccgaaggcgggaccg

SEQ ID NO: 633107 - DNA, 1013 bp, Homo sapiens
ggcaaggtaggagaatggaggtggaggccgtctgtggtggcgcgtggtgatagtggacgcccatgacgtctgagccctgcccttggcttacagatatgggccccgtggaccggcagtggcacatacgaagctgcacgtgggttgaagacaatataggcctacgtaaatggtgaaatgaaatctgtggggtaagtgaaggacacgcgatgaagcatggtctaggaggtcgtatttggtgaggagtagtggagaattgtgctcgcaagcagtgcggatcattgacggggccactcgcaggagaccgtgcaagatcataagctattctagtagctttgtggcccggggcccttggctaggtggcgccgagccactcgaagatgattgccatgtataggaactctaattgcgttcaagattgatccagtgggcattgaactgtttgttggaggaatcaacaattatagatgttatgctgcaacaaaaagtcacgtcttccgcaaaggcctgacataagatcatcatttctggatgaagcagacagcatgacctgacggaaggcccaagcaagcctttgaggagaaccatggcaaatctactctaagaaccactcgcattcgccctttgcttgtaatgcttcggataagatcatcgagcccattcagtcccgatgtgcagcctccggtacacaaagctgaccgaagaccaaatcctcaccaggccttgatcactgtcatcgaacaaggagagggtaccctacacttgatgacgcgctagaaggccatcatcttcacggaccagggcagacttgcggcaggcgctgaacaactgcggtccaccttctcaaggattgggcttcatttaacagtgaagaacgttgttcaaggacttgtgaagagagcccgagcacgagtgatggtaaagggagatgatccaagactgtgtgaatgccaacattggaggagagctacaggattcttggtcacttgttgaatactggggtatcacaggaagaa

SEQ ID NO: 633108 - DNA, 262 bp, Homo sapiens
gaaccttcaaggatactctcagaaggagccaatggacactgagtgtagacatgtgaatgccaaaacctgagagtgctcctaataaaaagtaatcaatcttacagtgtatgagactattctatcatatatgggacaggttgtcagtatatcttaatgtttgggttgtctttgttttgttatggtagctacagcttggaaatgcaaactctgtatactctgtacacagggtatatatctgctacactggaggccgctggaggcc

SEQ ID NO: 633109 - DNA, 1577 bp, Homo sapiens
  misc_feature (428)..(428): n is a, c, g, or t
gtggtcggcgcgcccctccccacctcgcgggggccgtgtgggcgtcgctcggtcgttggggtgccggggacgtcgtgatgagaacggcgtcccagagacgacggcgacagagccgggacacgtgacagtcacagggtcacattctgcggtccacgagtttgggaccgggctggtcacgtgacgcggtgggggcaccatggggtgatgtgagatgcgtgtctcggattacgtacaaatgacgtattcctaccccttttggcaaccagatttccgttggaagatgcaacggttccggtgacggtagcaagttctcgcgtccaggcatctccgcttccgctcggggcgcaacaacttccgactccaccttcccagcctcgggcaaggaagagacgcgaccatgtgcgcatgccccgaatttatcacggagnggcggggctgaggctgcgggagctggagcggggaagaaaagggaattccaacctgtggaaccttggggggtccccggggtcggcgccttcccattgactgtgggcggtgcaagggacggagcctctggcggctcgtgggggtgttggggtccgcagggggagggaggggagtgtcagagtgtgagcggggtacgggaattccaaatttgagggcctcccggctctggcgccggggagggagagctcaggccgccatgcgggacaggacccacgagctgagacagggggatgacagctcggacgaagaggacaaggagcgggtcgcgctggtggtgcacccgggcacggcacggctggggagcccggacgaggagttcttccacaaggtccggacaattcggcagactattgtcaaactggggaataaagtccaggagttggagaaacagcaggtcaccatcctggccacgccccttcccgaggagagtgagtgaaaccccggctgcagggcgcatgctccgccccagggattgtgggggttgtagttccacgcaggtggtggccagagtggtttgttgaggtgggggctgctgtttgggagtcttggccttctcttattcaggcatgaagcaggagctgcagaacctgcgcgatgagatcaaacagctggggagggagatccgcctgcagctgaaggccatagagccccagaaggaggaagctgatgagaactataactccgtcaacacaagaatgagaaaaacccagcatggggtcctgtcccagcaattcgtggagctcatcaacaagtgcaattcaatgcagtccgaataccgggagaagaacgtggagcggattcggaggcagctgaagatcaccaatgctgggatggtgtctgatgaggagttggagcagatgttggacagtgggcaagcgaggtgttctgtccatatcctgacggccaggcggggactcgaaaagctaatgaaatcggccgcaaggaaaccgcgttgaacccgatcggagctgacactttcactttctgctccaaggaagcggggaagaccaccatgaaacaccgctcgggagggagggggagtcaagcgcaccaagaggaaaatttcctctgttcgcccgaaggcgggaccg

SEQ ID NO: 633110 - DNA, 594 bp, Homo sapiens
acgctcccgtgcacgtgctgactagcactgataggatgcacgcagtgagtgtgtacatggatccatccgaccaaaattctgccagacattgtagctctattccttgctgcataaactcggcactgcactcatcaggacttatggactcaatataacccgccagacataccgatagtacgcgaaggacatccaatcaattaaattgaactaaaggctcttattctcatagacactattggcaccatgtactcaccgtataaccaggatactgctttggatatagaataaacattagacctaacccttgatgactttaaggggaaatatttggagcttttcttctatcctttggatttcacctttgtgtgtcctacggaggccgctgcttccagtgacaaagctaacgaatttcacgatgagaactgcgacggtatcgcaggctcattggaccaccactctatacatcgggcctgaataaatacaccaggacagaatgttcacatgtgccacatgaacatcccactcttgtcacacttaaataagcttattaccagagcctactttgtgctgttagaagattctggaatagcctat

SEQ ID NO: 633111 - DNA, 123 bp, Homo sapiens
tgagtccagagtcgagacagcaggtacataaataaaattactgagtgtgccacacttgctgctatcggaggctaggtggaggatctgagcagtgagtatgatgtatcactgcacttcagccta

SEQ ID NO: 633112 - DNA, 215 bp, Homo sapiens
aactaacacatagtgtctgcgacgagacatactcacagcaactccactgctgttcagtgtgctacttcattgtatgtcttataagatgtatgaagattttcagatctatgggaatataataatgaatgaggccagccatgtttccgaatcgtgaatttgccatcatttttagccatctactgtccaactatcatgctaccgtgcacggttgaggt

SEQ ID NO: 633113 - DNA, 1345 bp, Homo sapiens
  misc_feature (428)..(428): n is a, c, g, or t
gtggtcggcgcgcccctccccacctcgcgggggccgtgtgggcgtcgctcggtcgttggggtgccggggacgtcgtgatgagaacggcgtcccagagacgacggcgacagagccgggacacgtgacagtcacagggtcacattctgcggtccacgagtttgggaccgggctggtcacgtgacgcggtgggggcaccatggggtgatgtgagatgcgtgtctcggattacgtacaaatgacgtattcctaccccttttggcaaccagatttccgttggaagatgcaacggttccggtgacggtagcaagttctcgcgtccaggcatctccgcttccgctcggggcgcaacaacttccgactccaccttcccagcctcgggcaaggaagagacgcgaccatgtgcgcatgccccgaatttatcacggagnggcggggctgaggctgcgggagctggagcggggaagaaaagggaattccaacctgtggaaccttggggggtccccggggtcggcgccttcccattgactgtgggcggtgcaagggacggagcctctggcggctcgtgggggtgttggggtccgcagggggagggaggggagtgtcagagtgtgagcggggtacgggaattccaaatttgagggcctcccggctctggcgccggggagggagagctcaggccgccatgcgggacaggacccacgagctgagacagggggatgacagctcggacgaagaggacaaggagcgggtcgcgctggtggtgcacccgggcacggcacggctggggagcccggacgaggagttcttccacaaggtccggacaattcggcagactattgtcaaactggggaataaagtccaggagttggagaaacagcaggtcaccatcctggccacgccccttcccgaggagagcatgaagcaggagctgcagaacctgcgcgatgagatcaaacagctggggagggagatccgcctgcagctgaagggtgagctcctgggacctcagacagatccttccctctgatcctgccctgttgttggtatatctggggagtgtgtggcccagagaagccagtgatatatccaggtcacacagcaggcctgggtctagcatctgtctcctggcctccaggccattgtactctccacagcacaagtccgcctctcaggttcttttatttacaatgaaaccatttacttacacagttatcgctgcccactgggcattctttgggcagggagatggagttttgttaggtggcctctgcatacctatgggaactcagtgatgtaatgcaaagaaaaataaacttactttctcctcttaaaagaaaaaaaaaaa

SEQ ID NO: 633114 - DNA, 440 bp, Homo sapiens
ggtcctctccagaaatgaaatctgctccaaagaaatctaaggccgatggtcagttagaggaagctgactagcccctggattcttctccagacccccctgcttcaggaacacccgtcctagggacccaccccgttccgcaaccaccgttgcgccagtcgatttcgcaccgttcaggccgtcgctgattccggtgtttcatctgctctctaccgcctttctcgtttctctcatgtatttatatagagataagtctacaagaaagcacattttacccaataagatgtttgcggacggataggcatgaaggctaggattagggaaaggaaaagaagagtagggagatgcagacttctcgtattcattccccattgaatgagaggaccattccatggggggaagaaggaattattggtgatgaggaggaaggaggtgttttgaag

SEQ ID NO: 633115 - DNA, 783 bp, Homo sapiens
  misc_feature (22)..(22): n is a, c, g, or t
  misc_feature (60)..(60): n is a, c, g, or t
  misc_feature (99)..(99): n is a, c, g, or t
  misc_feature (108)..(108): n is a, c, g, or t
  misc_feature (127)..(127): n is a, c, g, or t
  misc_feature (129)..(129): n is a, c, g, or t
  misc_feature (136)..(136): n is a, c, g, or t
  misc_feature (168)..(168): n is a, c, g, or t
  misc_feature (173)..(174): n is a, c, g, or t
  misc_feature (183)..(183): n is a, c, g, or t
  misc_feature (189)..(189): n is a, c, g, or t
  misc_feature (191)..(191): n is a, c, g, or t
  misc_feature (193)..(193): n is a, c, g, or t
  misc_feature (201)..(201): n is a, c, g, or t
  misc_feature (210)..(210): n is a, c, g, or t
  misc_feature (224)..(224): n is a, c, g, or t
  misc_feature (227)..(227): n is a, c, g, or t
  misc_feature (254)..(254): n is a, c, g, or t
  misc_feature (331)..(331): n is a, c, g, or t
  misc_feature (464)..(464): n is a, c, g, or t
  misc_feature (490)..(490): n is a, c, g, or t
  misc_feature (775)..(775): n is a, c, g, or t
cctgagggaaaaggtggcagangtccctgggttccggtgttcgcggaggagtcgaagcanggagaatcttcgtggtaggtgacggaaagaatggtggcncgccaggcnggcggggtccattggattngnggtgagngccgtccgcggcctcagctttcgcctcctccnagccnngtcggcgantgtccncngntgtgtatntcgagtagnagaatagtaggaangtnataggatgtgatgatagaatttgtganttccaagcaacaacttttcctaattcggcatgttaaaaaataagggtcactcatctaagaaatataacttgtcattnaatgcagttgctttacaagatcacattttacatgatcttcaacttcgaaatctttcagttgcagatcattctaagacacaagtacaaaagaaagagaacaaatctctaaaaagagatacaaaggcaataatanatactggacttaaaaaaactacacantgcccaaactagaagactcagaaaaagaatatgttcttgactcccaaaccgccgccgttgactttggcacagaagttgggcctcattgggcctccaccacctccactgtcatcagatgaatgggagaaggtgaacagcgctctctcctgcaaggggactccgtgcaaccatgccccatctgtaaagaagaattcgagcttcgtcctcaggtgtttagcatacgagggtgagctagagagctcctgggctgtttcctagggacgaggcccagagctggagcctaanattccaag

SEQ ID NO: 633116 - DNA, 1503 bp, Homo sapiens
  misc_feature (428)..(428): n is a, c, g, or t
gtggtcggcgcgcccctccccacctcgcgggggccgtgtgggcgtcgctcggtcgttggggtgccggggacgtcgtgatgagaacggcgtcccagagacgacggcgacagagccgggacacgtgacagtcacagggtcacattctgcggtccacgagtttgggaccgggctggtcacgtgacgcggtgggggcaccatggggtgatgtgagatgcgtgtctcggattacgtacaaatgacgtattcctaccccttttggcaaccagatttccgttggaagatgcaacggttccggtgacggtagcaagttctcgcgtccaggcatctccgcttccgctcggggcgcaacaacttccgactccaccttcccagcctcgggcaaggaagagacgcgaccatgtgcgcatgccccgaatttatcacggagnggcggggctgaggctgcgggagctggagcggggaagaaaagggaattccaacctgtggaaccttggggggtccccggggtcggcgccttcccattgactgtgggcggtgcaagggacggagcctctggcggctcgtgggggtgttggggtccgcagggggagggaggggagtgtcagagtgtgagcggggtacgggaattccaaatttgagggcctcccggctctggcgccggggagggagagctcaggccgccatgcgggacaggacccacgagctgagacagggggatgacagctcggacgaagaggacaaggagcgggtcgcgctggtggtgcacccgggcacggcacggctggggagcccggacgaggagttcttccacaagccctctcggtcaccctccccaggtccggacaattcggcagactattgtcaaactggggaataaagtccaggagttggagaaacagcaggtcaccatcctggccacgccccttcccgaggagagtgagtgaaaccccggctgcagggcgcatgctccgccccagggattgtgggggttgtagttccacgcaggtggtggccagagtggtttgttgaggtgggggctgctgtttgggagtcttggccttctcttattcaggcatgaagcaggagctgcagaacctgcgcgatgagatcaaacagctggggagggagatccgcctgcagctgaagggtgagctcctgggacctcagacagatccttccctctgatcctgccctgttgttggtatatctggggagtgtgtggcccagagaagccagtgatatatccaggtcacacagcaggcctgggtctagcatctgtctcctggcctccaggccattgtactctccacagcacaagtccgcctctcaggttcttttatttacaatgaaaccatttacttacacagttatcgctgcccactgggcattctttgggcagggagatggagttttgttaggtggcctctgcatacctatgggaactcagtgatgtaatgcaaagaaaaataaacttactttctcctcttaaaagaaaaaaaaaaa

SEQ ID NO: 633117 - DNA, 1367 bp, Homo sapiens
  misc_feature (428)..(428): n is a, c, g, or t
gtggtcggcgcgcccctccccacctcgcgggggccgtgtgggcgtcgctcggtcgttggggtgccggggacgtcgtgatgagaacggcgtcccagagacgacggcgacagagccgggacacgtgacagtcacagggtcacattctgcggtccacgagtttgggaccgggctggtcacgtgacgcggtgggggcaccatggggtgatgtgagatgcgtgtctcggattacgtacaaatgacgtattcctaccccttttggcaaccagatttccgttggaagatgcaacggttccggtgacggtagcaagttctcgcgtccaggcatctccgcttccgctcggggcgcaacaacttccgactccaccttcccagcctcgggcaaggaagagacgcgaccatgtgcgcatgccccgaatttatcacggagnggcggggctgaggctgcgggagctggagcggggaagaaaagggaattccaacctgtggaaccttggggggtccccggggtcggcgccttcccattgactgtgggcggtgcaagggacggagcctctggcggctcgtgggggtgttggggtccgcagggggagggaggggagtgtcagagtgtgagcggggtacgggaattccaaatttgagggcctcccggctctggcgccggggagggagagctcaggccgccatgcgggacaggacccacgagctgagacagggggatgacagctcggacgaagaggacaaggagcgggtcgcgctggtggtgcacccgggcacggcacggctggggagcccggacgaggagttcttccacaagccctctcggtcaccctccccaggtccggacaattcggcagactattgtcaaactggggaataaagtccaggagttggagaaacagcaggtcaccatcctggccacgccccttcccgaggagagcatgaagcaggagctgcagaacctgcgcgatgagatcaaacagctggggagggagatccgcctgcagctgaagggtgagctcctgggacctcagacagatccttccctctgatcctgccctgttgttggtatatctggggagtgtgtggcccagagaagccagtgatatatccaggtcacacagcaggcctgggtctagcatctgtctcctggcctccaggccattgtactctccacagcacaagtccgcctctcaggttcttttatttacaatgaaaccatttacttacacagttatcgctgcccactgggcattctttgggcagggagatggagttttgttaggtggcctctgcatacctatgggaactcagtgatgtaatgcaaagaaaaataaacttactttctcctcttaaaagaaaaaaaaaaa

SEQ ID NO: 633118 - DNA, 824 bp, Homo sapiens
agggcgcatgtccaccgtctaggagccttccggttactgcgcgagtgcgcgactcgtcccgaagcctggggatacaccctctcgagagcccgctgtctgccctccgttaaggtcgaatccctcacagattgctgtgagtgcaactccagtcccaatattccctacgctctgtgttctcgccccagatgggcaaactcggccccagggcttcccactgtatttctggatgaggtgtcccctatgctccccactaagaatgtcacagtaacctacggagggtcttcctgcaacccgcagaggacaaattcaggcaatcgccttctgcgttggcatgcaatgtaccaagtagtacagacgatatggctcgtgatggaagaaacatcttgtgcaagctacttgcaattcctaatgtcttctggcacaatctttataccactagtccaagtcgtctcagccatagtcttgaatgcttcgacaagggaagtccaggaaagaccccggttcaacgtacagtatcccaagcactcaaagatttacacatgcatcttccacgaaaggtgctctccacgtggccgacttggcccgcagtgtatgacaaggtcccatgcctaccatcgtttcagatcctactttatctctgcacaagacagcagctaaggactcacctcgagcacaaccgggtagagttcacggtcctgctggggacctgggaacactttgtcatcacgtgccaggttactaggggttgacgacatcaatggtgtgcacacttgctgcgactccccaacgccgaacaattgctgagcgcccctcgagagcaagcg

SEQ ID NO: 633119 - DNA, 1393 bp, Homo sapiens
  misc_feature (428)..(428): n is a, c, g, or t
gtggtcggcgcgcccctccccacctcgcgggggccgtgtgggcgtcgctcggtcgttggggtgccggggacgtcgtgatgagaacggcgtcccagagacgacggcgacagagccgggacacgtgacagtcacagggtcacattctgcggtccacgagtttgggaccgggctggtcacgtgacgcggtgggggcaccatggggtgatgtgagatgcgtgtctcggattacgtacaaatgacgtattcctaccccttttggcaaccagatttccgttggaagatgcaacggttccggtgacggtagcaagttctcgcgtccaggcatctccgcttccgctcggggcgcaacaacttccgactccaccttcccagcctcgggcaaggaagagacgcgaccatgtgcgcatgccccgaatttatcacggagnggcggggctgaggctgcgggagctggagcggggaagaaaagggaattccaacctgtggaaccttggggggtccccggggtcggcgccttcccattgactgtgggcggtgcaagggacggagcctctggcggctcgtgggggtgttggggtccgcagggggagggaggggagtgtcagagtgtgagcggggtacgggaattccaaatttgagggcctcccggctctggcgccggggagggagagctcaggccgccatgcgggacaggacccacgagctgagacagggggatgacagctcggacgaagaggacaaggagcgggtcgcgctggtggtgcacccgggcacggcacggctggggagcccggacgaggagttcttccacaaggtccggacaattcggcagactattgtcaaactggggaataaagtccaggagttggagaaacagcaggtcaccatcctggccacgccccttcccgaggagagcatgaagcaggagctgcagaacctgcgcgatgagatcaaacagctggggagggagatccgcctgcagctgaaggccatagagccccagaaggaggaagctgatgagaactataactccgtcaacacaagaatgagaaaaacccattcaatgcagtccgaataccgggagaagaacgtggagcggattcggaggcagctgaagatcaccaatgctgggatggtgtctgatgaggagttggagcagatgttggacagtgggcaagcgaggtgttctgtccatatcctgacggccaggcggggactcgaaaagctaatgaaatcggccgcaaggaaaccgcgttgaacccgatcggagctgacactttcactttctgctccaaggaagcggggaagaccaccatgaaacaccgctcgggagggagggggagtcaagcgcaccaagaggaaaatttcctctgttcgcccgaaggcgggaccg

SEQ ID NO: 633120 - DNA, 238 bp, Homo sapiens
cagtttacacaaggcttctggaacagaggcatgcagcttgtatatctatctatccatctatctatctatctatctatctatctatctatctatctatctaaactccataggagtacctagaggagtgcctaataaatttaaagcacgaaaccaaatacctgctagatttgagtcagcacttttctggtggtcaactattaacaagaatactaattagattagtttgtgtaaactgatt

SEQ ID NO: 633121 - DNA, 356 bp, Homo sapiens
gagatagtaaatcttttataaactaagattgtaccttttaatatgtagtaaacactcatttatttggggttcactcattggatctcatgcatccattgtgttctctttaatgctgcctgacttttagaggcattcactgccctagacaaatgccaccagagatagtgagggaaatgccagatgaaaccaactcttgctctcactagttgtcagcttctctggataagtgaccacagaagcaggagtcctcctgcttgggcatcattgaggccagttccttctctttaaatcagatttgtaatggctcccaaattccatcacatcacatttaaattgcagacagtgttatgcacatc

SEQ ID NO: 633122 - DNA, 277 bp, Homo sapiens
  misc_feature (127)..(127): n is a, c, g, or t
aactgggggcccccaagtgggaaaaaggtaggtttttccctgccagttatcccccggggagactgtcaagttgggaagggggaatcaaaaactgggttttgttttaaaaattaaattaacccctganaagaggggcttttttttttttgggggttggcccttgcccccaagtttgagcccctcccccttttgggggccctgtttcccccccgggccggttccttcccatgcctaacgggggaggggcttaaaagggaaaaaattgctttttcccata

SEQ ID NO: 633123 - DNA, 148 bp, Homo sapiens
gcactggtcattctgtgtcaatcggcatcattccactcagctccgcacagctgtgggcctgagcagaccatctcagcctagcaccgtggaagggatctccttctggcctcctaatcctgggagcagacatcaccatcagcacccaccg

SEQ ID NO: 633124 - DNA, 783 bp, Homo sapiens
  misc_feature (330)..(330): n is a, c, g, or t
  misc_feature (620)..(620): n is a, c, g, or t
aagcagtggtatcaacgcagagtggccattatggcggggggggttaccaataaaaaaaaaaaaaaaaaaaaaaaaaaaaatttttgggcggctggccttgaaaaaagttttaaaaccttcgttggggcgcggggccccatgaggacatgggcataacgtggtcccaaggaagaaccttgggcacatgagctaaggtgcggtgggagtcttctcaccccaaataaaaaacaacggccgggcgggcaaccacagaggagctgtctctcgacaaacacaaccacaacagtggagctgtcgcggcagcaggcaccaagatactgagaggatgtntcacacagcaaggagagtcgccaacagcgggaccgactccagtaatattcaaaaaataataccgccccccggcgtcgtgagtaacagatcagcgtcagctaggcaagagactagagacaaaagagaacagacgatacgagaacaacatgacgaagaacagataggagcgagaagcagaaccagagaggaagatacagatagcagagaatagaagcagagacacgtagtgagacagaagacaaacatacagagaacaaagagacacgacaatatgacagagaaccacaganacgacgcaagacacaaggagagacacgaagaatagtgcacagacagacacacatagacgatagataagatcgacacgcaggcaagtcgacagcagaatcattgacgcagatatagacgcgaagcaagagagcgacaacatcaagagactcagataaacaacga

SEQ ID NO: 633125 - DNA, 669 bp, Homo sapiens
caacaaggaaatctggtcatctctgtgacacacagtttaacagaacagttataattattactcataacatatactgagacgtatcagaattcataggagtcttacacaattttgtaacacatactaataacatagttatacgactataaacccaacagaaagttaaacacttttttatatttgacagtgcttcctacataattttaatacaccaaataagccaaatatgcctctttggactttaggggactttatttttctaaactgagaattggatctggggaagtctgtaaatatcaacaggtttgaaccagtagatatccacaaagtagaatcccaggtcaccataagtcattcatttagccacactgatacactcaaacatttggtcacacggcaaaaactttactctgcattagagcagcacgactccggcgtttctacaacaacgaaaaacccgcaggtgcagagcatcggcattgagggccccaccgtgaaaatctagtcctataagatttgtgtcgtgcaactcagttataactccgacaaggccgcagtgaacaacatctgtcgagtggtgctcctctcgtggtgaagatcttacccttgacccataatgccttcaaaagcagacaacccaaattttaattcatcgactttagtgccata

SEQ ID NO: 633126 - DNA, 622 bp, Homo sapiens
  misc_feature (9)..(9): n is a, c, g, or t
  misc_feature (141)..(141): n is a, c, g, or t
  misc_feature (150)..(150): n is a, c, g, or t
  misc_feature (213)..(213): n is a, c, g, or t
  misc_feature (226)..(227): n is a, c, g, or t
  misc_feature (242)..(242): n is a, c, g, or t
  misc_feature (244)..(244): n is a, c, g, or t
  misc_feature (263)..(263): n is a, c, g, or t
  misc_feature (268)..(268): n is a, c, g, or t
  misc_feature (279)..(279): n is a, c, g, or t
  misc_feature (282)..(282): n is a, c, g, or t
  misc_feature (286)..(288): n is a, c, g, or t
  misc_feature (317)..(317): n is a, c, g, or t
  misc_feature (329)..(329): n is a, c, g, or t
  misc_feature (358)..(358): n is a, c, g, or t
  misc_feature (371)..(371): n is a, c, g, or t
  misc_feature (380)..(380): n is a, c, g, or t
  misc_feature (393)..(393): n is a, c, g, or t
  misc_feature (416)..(416): n is a, c, g, or t
  misc_feature (433)..(433): n is a, c, g, or t
  misc_feature (450)..(450): n is a, c, g, or t
  misc_feature (454)..(454): n is a, c, g, or t
  misc_feature (458)..(460): n is a, c, g, or t
  misc_feature (464)..(464): n is a, c, g, or t
  misc_feature (469)..(469): n is a, c, g, or t
  misc_feature (473)..(473): n is a, c, g, or t
  misc_feature (483)..(483): n is a, c, g, or t
  misc_feature (501)..(501): n is a, c, g, or t
  misc_feature (503)..(503): n is a, c, g, or t
  misc_feature (524)..(525): n is a, c, g, or t
  misc_feature (527)..(527): n is a, c, g, or t
  misc_feature (533)..(533): n is a, c, g, or t
  misc_feature (541)..(541): n is a, c, g, or t
  misc_feature (590)..(590): n is a, c, g, or t
gttgtagtnatgatggagcaggttaggggaccaaaatacacaaccgtcataaagatgaagctctgacccagggcactggtcagcccaaagagcaggatgttatagatgatggcagggtacctttcagcaaagctcaagaantcccagagntccccagtgaacaggattcccattcccagcagcaatgtcgaccaaaggttgatgttcagcatnatgtggttggagnntgtttggtaatgagntnggatgtggtgttgggaaanattantgagtccatcncgngtgnnnccttcctggtatgagtagttgtttatagntgattgtgtgtncttctatcccaacaactttcttgggtttntacatcacaaccnccactccanccacaattaacancacacacaggtacttggccaacnggtacttcttcttcaanagggtcaccccaaccancatnactnnnattngcttncagnatttacaagnacctgagttgggtagttnanaactgtagtgctgaattgctnnanaccatngcacccanataggagatagaacaggcagcatagagccagctccgggtacgatacacnctggcagtgtcaaaaaactggatcaagatctt

SEQ ID NO: 633127 - DNA, 110 bp, Homo sapiens
agtggctgaaaacaagactagtttattttctgacagtcctggaagtcagcaatctgaaatggctcattgacaaggggttggcaagaccgcatcccttctgtcgtcttctc

SEQ ID NO: 633128 - DNA, 396 bp, Homo sapiens
agttacaacagcttccagttacaacagcttccagttacaacagctccagttacaacagctacttcttacctaccagttcctcagtggaaggcttacctctttgtcagttgtggtggtcatggcttttccccctggagtccttacagtaacaacccccagaaggcagaatcctgctctggtgttatacgtcttttctcttccccaccacaccacccccagcatagggcattttcctgtaaagggtcttgagtctttctgggaagtagctggggaatgagagtataaaataatgctgagggtcatgttcaggcagcatggcttagagattagattacagacattgaaaccacatatcctagacttaaattccgggtgctatttgctaacaatgaatcc

SEQ ID NO: 633129 - DNA, 180 bp, Homo sapiens
tggtgtgtgtgtgtgtgtgttggggggttgcgtctgtgtgtgtgtctgtgtgtgtgcgcgcgcagtgcgtgtctgtgtgccgacttctgtctctctctcaggtctctctctgtctctctctctctctctctcaactctcacacttctcgcatgtaacctgacagccctctctgtctgtct

SEQ ID NO: 633130 - DNA, 164 bp, Homo sapiens
ctgctctgagctaaggcataaggaatgtacacaacaggagaactaaggacaaaatgagccagtctcatgaagacagtttgacaagtagtggcttggaatccagataggaagcgctttgagactggaggtcagcgtaggcagtatctatcagagtgagttaaata

SEQ ID NO: 633131 - DNA, 204 bp, Homo sapiens
aaccttttaaaaggttaaaaaaatttattagaccaacggaataggttaaggatataaagaaaatgatttttgtacagatgtataatttgtattttaagctaagtattattacaagtcaaaaagtttttaaaaatgtaaaagtttataaagcaaaaaagttacagtaagtaaatatattgttgaagaaataaaaaatttaaaaat

SEQ ID NO: 633132 - DNA, 311 bp, Homo sapiens
  misc_feature (46)..(46): n is a, c, g, or t
  misc_feature (59)..(59): n is a, c, g, or t
  misc_feature (62)..(62): n is a, c, g, or t
  misc_feature (76)..(76): n is a, c, g, or t
  misc_feature (94)..(94): n is a, c, g, or t
  misc_feature (109)..(109): n is a, c, g, or t
  misc_feature (154)..(154): n is a, c, g, or t
  misc_feature (164)..(164): n is a, c, g, or t
  misc_feature (167)..(167): n is a, c, g, or t
  misc_feature (171)..(171): n is a, c, g, or t
  misc_feature (196)..(196): n is a, c, g, or t
  misc_feature (234)..(234): n is a, c, g, or t
  misc_feature (251)..(251): n is a, c, g, or t
  misc_feature (267)..(267): n is a, c, g, or t
  misc_feature (277)..(277): n is a, c, g, or t
  misc_feature (285)..(285): n is a, c, g, or t
  misc_feature (290)..(290): n is a, c, g, or t
  misc_feature (293)..(293): n is a, c, g, or t
gtttttccctccccccccccccataggaacaggatttggccttagnttttgggcctatnggntgccttccctttanttcctacccccttttttnccttcctttgagctntgttgggcttggggattttagtttttttttgtttatttcccagcncatttttttnttntggncagtttttttaagggggggggttgnggttttttgtttttgttttgcttttgaaaaagcatttnccttttttcctttcccnacataacaattgtggnaacaaaatgngactgctnatttnccnatgtttttaatgtaagta

SEQ ID NO: 633133 - DNA, 400 bp, Homo sapiens
  misc_feature (88)..(88): n is a, c, g, or t
  misc_feature (382)..(382): n is a, c, g, or t
gtggtggatgcgtcgggctccggcgaagccgcccggcttgaggatgacgcgcgtggtgtggaggcactcgcggggggggtaattcggngtctgttcttctgcttgccgcacagctttccccgatgctccactgtgtgacctaggcacagctgtccatttcctgtgaccatctcattgacaaggacatcgtctccaagtctgccccactctatgtcctaatcacaggatgtgggagggggcagctggtctgagcttggccggtctgaacgggtgtggaactgctcaagccctgagttctccaagactctacagcttgagtaccgctgtgaaacagacagaagctacgctgtggtatctttaacataaacaacaagacgccagnggtgagggatgattattt

SEQ ID NO: 633134 - DNA, 759 bp, Homo sapiens
  misc_feature (27)..(27): n is a, c, g, or t
  misc_feature (42)..(42): n is a, c, g, or t
  misc_feature (333)..(333): n is a, c, g, or t
  misc_feature (339)..(339): n is a, c, g, or t
  misc_feature (350)..(350): n is a, c, g, or t
  misc_feature (357)..(358): n is a, c, g, or t
  misc_feature (376)..(376): n is a, c, g, or t
  misc_feature (412)..(412): n is a, c, g, or t
  misc_feature (424)..(425): n is a, c, g, or t
  misc_feature (428)..(429): n is a, c, g, or t
  misc_feature (431)..(431): n is a, c, g, or t
  misc_feature (585)..(585): n is a, c, g, or t
  misc_feature (700)..(700): n is a, c, g, or t
catcagcacctgtccaaggagtcaatngcaggaaacaagccngccaatgcagtcctgcacaaagttctgaaacagctggaagaactgctgagtgacatgaaagctgatgtgactcgactcccagctaccattgcccgaattcccccagttgctgtgaggttacagatgtcagagcgtaacattctcagccgcctggcaaaccgggcacccgaacctaccccacagcaggtagcccagcagcagtgaagatgcagactgataccacctccaccgctgagcagtgaccttcctcactttctcttgtccccgcctctcccctggggccctgagacncccccncctcccttctncccatcnnccatgttgtaaaggaacncccccagtgcactgggggaggggagggagtgagggncagtggtgcccnnccnncngaagagacatgcagcagtagcgctggccccatctgcaggagctggcgggctggccttctggaccctggcttctccccactgtaacgcctgttacacacaaactgttgtgggttcctgccaggcttgaagaaaatgatctgaattttttcctccntttggttttattttgttggtttattttgtgttttcttttctcccttttggggggtattcagagtgggctgggcccctgggcgagacacagctacctctgttggcatctttttaanaccaggaacccagcggctctagccactgagcggctaaatgaaataaagtggaaaaaaaa

SEQ ID NO: 633135 - DNA, 179 bp, Homo sapiens
  misc_feature (34)..(34): n is a, c, g, or t
ggctttagagcctcccatcccattcaagcatcancagatatttgttaatagcccattttgtggccgggtgtggtggctcacacctgtaatcccagctactcagcagggtgaggtgagaggatcacttgaggccaagagtttcagaccagcctgggcaacatagccagacctcgtctcta

SEQ ID NO: 633136 - DNA, 2296 bp, Homo sapiens
aaaaaaaaaaaaaaaattaacccagagtgggtcaggacagacaattcctcagtgacccaggagctgacacactatggcgcacgtccgaggcttgcagctgcctggctgcctggccctggctgccctgtgtagccttgtgcacagccagcatgtgttcctggctcctcagcaagcacggtcgctgctccagcgggtccggcgagccaacaccttcttggaggaggtgcgcaagggcaacctggagcgagagtgcgtggaggagacgtgcagctacgaggaggccttcgaggctctggagtcctccacggctacggatgtgttctgggccaagtacacagcttgtgagacagcgaggacgcctcgagataagcttgctgcatgtctggaaggtaactgtgctgagggtctgggtacgaactaccgagggcatgtgaacatcacccggtcaggcattgagtgccagctatggaggagtcgctacccacataagcctgaaatcaactccactacccatcctggggccgacctacaggagaatttctgccgcaaccccgacagcagcaccacgggaccctggtgctacactacagaccccaccgtgaggaggcaggaatgcagcatccctgtctgtggccaggatcaagtcactgtagcgatgactccacgctccgaaggctccagtgtgaatctgtcacctccattggagcagtgtgtccctgatcgggggcagcagtaccaggggcgcctggcggtgaccacacatgggctcccctgcctggcctgggccagcgcacaggccaaggccctgagcaagcaccaggacttcaactcagctgtgcagctggtggagaacttctgccgcaacccagacggggatgaggagggcgtgtggtgctatgtggccgggaagcctggcgactttgggtactgcgacctcaactattgtgaggaggccgtggaggaggagacaggagatgggctggatgaggactcagacagggccatcgaagggcgtaccgccaccagtgagtaccagactttcttcaatccgaggacctttggctcgggagaggcagactgtgggctgcgacctctgttcgagaagaagtcgctggaggacaaaaccgaaagagagctcctggaatcctacatcgacgggcgcattgtggagggctcggatgcagagatcggcatgtcaccttggcaggtgatgcttttccggaagagtccccaggagctgctgtgtggggccagcctcatcagtgaccgctgggtcctcaccgccgcccactgcctcctgtacccgccctgggacaagaacttcaccgagaatgaccttctggtgcgcattggcaagcactcccgcaccaggtacgagcgaaacattgaaaagatatccatgttggaaaagatctacatccaccccaggtacaactggcgggagaacctggaccgggacattgccctgatgaagctgaagaagcctgttgccttcagtgactacattcaccctgtgtgtctgcccgacagggagacggcagccagcttgctccaggctggatacaaggggcgggtgacaggctggggcaacctgaaggagacgtggacagccaacgttggtaaggggcagcccagtgtcctgcaggtggtgaacctgcccattgtggagcggccggtctgcaaggactccacccggatccgcatcactgacaacatgttctgtgctggttacaagcctgatgaagggaaacgaggggatgcctgtgaaggtgacagtgggggaccctttgtcatgaagagcccctttaacaaccgctggtatcaaatgggcatcgtctcatggggtgaaggctgtgaccgggatgggaaatatggcttctacacacatgtgttccgcctgaagaagtggatacagaaggtcattgatcagtttggagagtagggggccactcatattctgggctcctggaaccaatcccgtgaaagaattatttttgtgtttctaaaactatggttcccaataaaagtgactctcagcgaaaacaagaaaaaaacgcacagcaaaagcgcctagggggcactcaaactagaacagggttccagcggagacacacgacggcgcaccgaacgattgcggacacagtgggacaataggcgtgagtaacacagagaccaccacgtattcgctcggcaccaaagcgggggacaagacatcgcgccgggtacccccgaaaaataggagagcccacattaacagttcacgcgacagaagcccagtattaagccgggattaatg

SEQ ID NO: 633137 - DNA, 657 bp, Homo sapiens
  misc_feature (46)..(46): n is a, c, g, or t
ggtgcaatcttggctcactgcagcctcccacttcccctggttcaantgattctcctgcctcagcctcccgagtagctggttcccacaggttacaagcctgatgaagggaaacgaggggatgcctgtgaaggtgacagtgggggaccctttgtcatgaagagcccctttaacaaccgctggtatcaaatgggcatcgtctcatggggtgaaggctgtgaccgggatgggaaatatggcttctacacacatgtgttccgcctgaagaagtggatacagaaggtcattgatcagtttggagagtagggggccactcatattctgggctcctggaaccaatcccgtgaaagaattatttttgtgtttctaaaactatggttcccaataaaagtgactctcagcgaaaacaagaaaaaaacgcacagcaaaagcgcctagggggcactcaaactagaacagggttccagcggagacacacgacggcgcaccgaacgattgcggacacagtgggacaataggcgtgagtaacacagagaccaccacgtattcgctcggcaccaaagcgggggacaagacatcgcgccgggtacccccgaaaaataggagagcccacattaacagttcacgcgacagaagcccagtattaagccgggattaatg

SEQ ID NO: 633138 - DNA, 431 bp, Homo sapiens
aaaaaaaaaaaaaaaattaacccagagtgggtcaggacagacaattcctcagtgacccaggagctgacacactatggcgcacgtccgaggcttgcagctgcctggctgcctggccctggctgccctgtgtagccttgtgcacagccagcatgtgttcctggctcctcagcaagcacggtcgctgctccagcgggtccggcgagccaacaccttcttggaggaggtgcgcaagggcaacctggagcgagagtgcgtggaggagacgtgcagctacgaggaggccttcgaggctctggagtcctccacggctacggtgagcctgggctgctcggacggtaccggggcctcagaccgggcccaactctagacacttccacagagaagcaagcgaggaacgccacagccccttcgctgctcacagccgtcgatcc

SEQ ID NO: 633139 - DNA, 604 bp, Homo sapiens
actgataaattaatagcttactaatataagtagaaataggtctattattactatgctaccgtactaaggagatcgataaggagagaatatattatccaagaaactcacccatttcatacaggtttacttttgagtatgtatacgggataagtggtatgcagctagcattcacggtttacaaagatacttgcatagagttggtagagtaacaatgataatatattttctctaattctaggtttgtttcttccttgtcatttcttatcttgtaaggttaatccttgtatgaattttctatagcagtggcttattcttagtagcttaaccaatacgcatttattatctcacatttccttaggtcagaagtctaaccaggtgttcgcaggatatagtcacagcgttggcggggctgtgtacctttctggaggctctaggacagtatctatccttgccttttctagtttctaaaggccgtctgtgtaccctggcttatggccttctgttttacatcttcaagccagccatgtcaagtcagatcctcacatcaaatctctctaaactcagccaggaaagatcccgtaatttcagggctcacgtgattaga

SEQ ID NO: 633140 - DNA, 2193 bp, Homo sapiens
aaaaaaaaaaaaaaaattaacccagagtgggtcaggacagacaattcctcagtgacccaggagctgacacactatggcgcacgtccgaggcttgcagctgcctggctgcctggccctggctgccctgtgtagccttgtgcacagccagcatgtgttcctggctcctcagcaagcacggtcgctgctccagcgggtccggcgagccaacaccttcttggaggaggtgcgcaagggcaacctggagcgagagtgcgtggaggagacgtgcagctacgaggaggccttcgaggctctggagtcctccacggctacggatgtgttctgggccaagtacacagcttgtgagacagcgaggacgcctcgagataagcttgctgcatgtctggaaggtaactgtgctgagggtctgggtacgaactaccgagggcatgtgaacatcacccggtcaggcattgagtgccagctatggaggagtcgctacccacataagcctgaaatcaactccactacccatcctggggccgacctacaggagaatttctgccgcaaccccgacagcagcaccacgggaccctggtgctacactacagaccccaccgtgaggaggcaggaatgcagcatccctgtctgtggccaggatcaagtcactgtagcgatgactccacgctccgaaggctccagtgtgaatctgtcacctccattggagcagtgtgtccctgatcgggggcagcagtaccaggggcgcctggcggtgaccacacatgggctcccctgcctggcctgggccagcgcacaggccaaggccctgagcaagcaccaggacttcaactcagctgtgcagctggtggagaacttctgccgcaacccagacggggatgaggagggcgtgtggtgctatgtggccgggaagcctggcgactttgggtactgcgacctcaactattgtgaggaggccgtggaggaggagacaggagatgggctggatgaggactcagacagggccatcgaagggcgtaccgccaccagtgagtaccagactttcttcaatccgaggacctttggctcgggagaggcagactgtgggctgcgacctctgttcgagaagaagtcgctggaggacaaaaccgaaagagagctcctggaatcctacatcgacgggcgcattgtggagggctcggatgcagagatcggcatgtcaccttggcaggtgatgcttttccggaagagtccccaggagctgctgtgtggggccagcctcatcagtgaccgctgggtcctcaccgccgcccactgcctcctgtacccgccctgggacaagaacttcaccgagaatgaccttctggtgcgcattggcaagcactcccgcaccaggtacgagcgaaacattgaaaagatatccatgttggaaaagatctacatccaccccaggtacaactggcgggagaacctggaccgggacattgccctgatgaagctggctggggcaacctgaaggagacgtggacagccaacgttggtaaggggcagcccagtgtcctgcaggtggtgaacctgcccattgtggagcggccggtctgcaaggactccacccggatccgcatcactgacaacatgttctgtgctggttacaagcctgatgaagggaaacgaggggatgcctgtgaaggtgacagtgggggaccctttgtcatgaagagcccctttaacaaccgctggtatcaaatgggcatcgtctcatggggtgaaggctgtgaccgggatgggaaatatggcttctacacacatgtgttccgcctgaagaagtggatacagaaggtcattgatcagtttggagagtagggggccactcatattctgggctcctggaaccaatcccgtgaaagaattatttttgtgtttctaaaactatggttcccaataaaagtgactctcagcgaaaacaagaaaaaaacgcacagcaaaagcgcctagggggcactcaaactagaacagggttccagcggagacacacgacggcgcaccgaacgattgcggacacagtgggacaataggcgtgagtaacacagagaccaccacgtattcgctcggcaccaaagcgggggacaagacatcgcgccgggtacccccgaaaaataggagagcccacattaacagttcacgcgacagaagcccagtattaagccgggattaatg

SEQ ID NO: 633141 - DNA, 2114 bp, Homo sapiens
aaaaaaaaaaaaaaaattaacccagagtgggtcaggacagacaattcctcagtgacccaggagctgacacactatggcgcacgtccgaggcttgcagctgcctggctgcctggccctggctgccctgtgtagccttgtgcacagccagcatgtgttcctggctcctcagcaagcacggtcgctgctccagcgggtccggcgagccaacaccttcttggaggaggtgcgcaagggcaacctggagcgagagtgcgtggaggagacgtgcagctacgaggaggccttcgaggctctggagtcctccacggctacggatgtgttctgggccaagtacacagcttgtgagacagcgaggacgcctcgagataagcttgctgcatgtctggaaggtaactgtgctgagggtctgggtacgaactaccgagggcatgtgaacatcacccggtcaggcattgagtgccagctatggaggagtcgctacccacataagcctgaaatcaactccactacccatcctggggccgacctacaggagaatttctgccgcaaccccgacagcagcaccacgggaccctggtgctacactacagaccccaccgtgaggaggcaggaatgcagcatccctgtctgtggccaggatcaagtcactgtagcgatgactccacgctccgaaggctccagtgtgaatctgtcacctccattggagcagtgtgtccctgatcgggggcagcagtaccaggggcgcctggcggtgaccacacatgggctcccctgcctggcctgggccagcgcacaggccaaggccctgagcaagcaccaggacttcaactcagctgtgcagctggtggagaacttctgccgcaacccagacggggatgaggagggcgtgtggtgctatgtggccgggaagcctggcgactttgggtactgcgacctcaactattgtgaggaggccgtggaggaggagacaggagatgggctggatgaggactcagacagggccatcgaagggcgtaccgccaccagtgagtaccagactttcttcaatccgaggacctttggctcgggagaggcagactgtgggctgcgacctctgttcgagaagaagtcgctggaggacaaaaccgaaagagagctcctggaatcctacatcgacgggcgcattgtggagggctcggatgcagagatcggcatgtcaccttggcaggtgatgcttttccggaagagtccccaggagctgctgtgtggggccagcctcatcagtgaccgctgggtcctcaccgccgcccactgcctcctgtacccgccctgggacaagaacttcaccgagaatgaccttctggtgcgcattggcaagcactcccgcaccaggtacgagcgaaacattgaaaagatatccatgttggaaaagatctacatccaccccaggtacaactggcgggagaacctggaccgggacattgccctgatgaagctgaagaagcctgttgccttcagtgactacattcaccctgtgtgtctgcccgacagggagacggcagccaggttacaagcctgatgaagggaaacgaggggatgcctgtgaaggtgacagtgggggaccctttgtcatgaagagcccctttaacaaccgctggtatcaaatgggcatcgtctcatggggtgaaggctgtgaccgggatgggaaatatggcttctacacacatgtgttccgcctgaagaagtggatacagaaggtcattgatcagtttggagagtagggggccactcatattctgggctcctggaaccaatcccgtgaaagaattatttttgtgtttctaaaactatggttcccaataaaagtgactctcagcgaaaacaagaaaaaaacgcacagcaaaagcgcctagggggcactcaaactagaacagggttccagcggagacacacgacggcgcaccgaacgattgcggacacagtgggacaataggcgtgagtaacacagagaccaccacgtattcgctcggcaccaaagcgggggacaagacatcgcgccgggtacccccgaaaaataggagagcccacattaacagttcacgcgacagaagcccagtattaagccgggattaatg

SEQ ID NO: 633142 - DNA, 950 bp, Homo sapiens
  misc_feature (1)..(1): n is a, c, g, or t
nagccctcgtttttccctgataaaaaaaagaacctgtctccctttgtcctttcccttatttacaagccccccccccttcttccccctcggtgacaaaacaccccgccacctgttaaccccttttaggcaaaaactttcgcatagcctctcttcttaaattaaaagacccgacgaacaacttcctttgtctcaccccctgtatcttagacgagcatcggtatggttcctctcccaccaccgcaccttactcctggtttaaaggggatggactatatccccccacaaagagtaaaatcctttgctagggttcctcacacgctcgctcccgcgaccaccctcgtgaatatctctgcaccacagaggagaatcttttttatatttccgcataaccccgtttattgttcacccccacgcgacaacacggttctccctcttaacattcagctgggggacgcgacgttttatgtctgtttcaggttttatatgatagagcgctggagttcagaccaaatactgttgtggctcgatgagagacaactcattgtgggtaaaaggtgataccaccccccttggtcttgaaggcgccccccccggggaggtcctccgccccctgttccatagaaaagttgaaatcctcgcgggttcttcttttaaaaaagattttgtaattaccccccctatagacatgatacatggtgtaatccattcctaccgctcaaaacaataatcacttgcataattgagaaaacgcgagtaatacattttggtcataaacaactcttcgtgattccccttttataaggcgcgacacaaaaatgccacttggttcttatagagctccctcgcataaagagttcaataaggtagccccttcttaaaaattctattaaaatctaaaaccgcctctcaaaacaaaggttttttataagttcgcccccacaaagacacag

SEQ ID NO: 633143 - DNA, 100 bp, Homo sapiens
  misc_feature (100)..(100): n is a, c, g, or t
ccctagttagaagttcaatagcacacagactaagaggacccaggtagtaaaggagcaggctgccatcctatggggatcttccaccgtggggactccccan

SEQ ID NO: 633144 - DNA, 1466 bp, Homo sapiens
gtgattgaccactgtgtgcctgagctgaacctctgtcagccatgaggccaagtgcatccccctggacaaaggattcagctgcgagtgtgtccctggctacagcgcggaagctctgtgcagacagacaatgatgactgtgtggcccacaagctgcccgccacgcgggacccatgtgcgtggcacacaactcaactgcgcctacacatgcaccctgcccccacagggccatccagctgcgaccgccttcctgatgcacacaccccccgaatcccactggctccctacctgacagcacccacgccccactgccgcacccagcctaccgacgcatgcccagccacaccggggacccacaagcctgccactccgcctgcgctgccacaccccaggcaagctaccccacacacactgcccaggcccctgacagccccaccccagtgcactcacggccccccgcccaacccccacccactgcaccgcacaaccagcccctccacctcgcacactcggatccaaaacacacacaccccactgcgacgccaacaaccgcaacaatcaccaatcaccggatggcgaacaaacataggcagcacaattccacggacccgaccacgcggactcccccagacaaccacccacctaacgggcaagcaaaacaccaacatacgtcacccaccctaaggaacacagcaggtccgcgccacccgcaacacagggacacgccaacacacggcaaccccacacccccgcggcccctcaccttcccccacctaacaccctaccatcaacccccctaccgcagccggaacggcacccgcgaacctgggcaaacacacaccacgcaccatgcagaggcaccaaacccccatgcccgcccaagcccgccttgggccctacagacgcccccatgcagcaggaccccacgcggcaacaaccacacttgggcccgagaagtccccttggagggcaaaccagtattaagatctcgacaaaacccctaggacccacccacgctgtggcccaacgccactcatccccccgccaccacaactactgccccaaaaaacaccccccagaaccccggccaacaggcgcgcaccaccaaacaccaggcgaccaggcgatccccgggcgcacaaggcaaaaacccaaacggcgccctaggcgaaaacccttgcgagacaccactcggcctgcagacacaccacagggcgatcagtacacatcccacaccgatacgcagccacacggggccatacggcgccccacaagcgcccccccatacgggggacatttgaggacacgcggcccacaccatttgccaacacgaaatgccccccgcgacaaggcaacaagcgcgagccacgatgttgggccaacacaaacgctccgaccactaaaacgagccaactatatacacccgcactcgggggaggcagaccaccgcaccaccatcaccaagctgg

SEQ ID NO: 633145 - DNA, 1713 bp, Homo sapiens
gcccaggtagaggggtcctgcgctggcggcggcggcggcgctgttccccgcgcggtccgcgagagcggggggatccggtgcttgcgcagacgatggggcggcggcggcacttgctggacccacggcacaagcccagaccccaggtgatccgcacatacactcgaacagaaaaaacaagaaaagaaagaaaaaaaaagagaaaaaaaaggctacccacgggagcaggagcgcaagcggagaaggcaagagaggagagtagcgggaggcacgagaacggaaagaaggagggaggacgagaaagaccggagacggaggaaacagacgagcgaagcagacgagacggacgacgaagacaggggagcagggacagcaaggagacggagggagacagagagcacgacggcgacagcgcgagcgcagcgcacgaggcgcaggagtcgagagagaggacggagagggaaccgagaggagagagaagcagagaaagaaaggaaggggaggcgaagaagaagagccagagaggcggcagcgacaggcacagagaacggcgggcagagcgagaaggggagaagagaggagacggagagggaaggcacgagagagagcgagaacagaggagaggaggggaggcgaggcggaggcagagaaggcgagaggaaaaagggagaaaaggagagcgcgagggcagaggggaagggagcggagacggcggggagcacgagaggacgacggagggcgggggcgagaagggcgggaagggcgggaggagcgggagaggagggaaggggaagcggggaccagggacgacgagcggaagacgcaggggggggcgaagagggaaggaggggagcgaggagagaccaggagaaacacagacgcgaagggaaggggagggagccgagagcagggcgcaggagggaacaaaaggagagagaaggcagaagaacgaagcgggaaggaggcgaggcagagagaagggaaacgaagagcacacgagcgcaaagagcgagggacagagcgagacagcaaaggagggagggggaagcagaaggagggacagaggacgacgggggagaaagaaaagagaagcgaaaggggaagagaaacccgggcgcgcgcagcgaagagcgacgagggagagaagagaaagcggagggaagaaggacaaggaggaggaagagaggagagagagagaagaggggacgcgacaggcgggagagggagagggagcgagaaggggggagagggagaaagcggcgcgagagagagaaggagcagacgaggaagcgcgcgagagagacgaggggatggggcgacgaaggggaagcgcaggggagcaagggcccgagcgaagagagcgcgagagaagggaggcagaggggaggagggacgcgaggaagaggaaggcgacggaagcgggccccggcagacgccaagagcgaggagaagaagacacggcggacgacagcgagcccccgccacacgagcatgacgaggaggaagcaaggcagagcgagcgaagagtgcacagagcgaggcgatcaggcgagacaacagaaggagacgagaagagaagcagagtgaggcagcgggaagcggaggaagtcgccagaacagctacagaggaagacgaacagcaggcagaacgcgagggcagacgacgagacgggaggcggacgaggcggtcttgagaccaggagtggacggagggaa

SEQ ID NO: 633146 - DNA, 373 bp, Homo sapiens
attaatcatgtatttattttagttcagttaaaacaaacatacattggttcattgaaaccggtgtagcatttactctctgccaacaggccacagaggcatgttggcctctaacagtacagctgggacatttacactatatacatacaaggagtcctctttcattgagatcacacttgacatgttaccagatagccatgtggtagctactgcattttgaaaatttagacctcatttaaagctttagattatctgaacttaagttgatgtccaaccaggttattgcaaatacaatttaaacaagttattttcaattttaggattattcacaaggccaattttcttaaaattgaattctctgtacaaggaaattgga

SEQ ID NO: 633147 - DNA, 276 bp, Homo sapiens
  misc_feature (26)..(26): n is a, c, g, or t
  misc_feature (90)..(90): n is a, c, g, or t
  misc_feature (104)..(107): n is a, c, g, or t
  misc_feature (110)..(110): n is a, c, g, or t
  misc_feature (113)..(113): n is a, c, g, or t
  misc_feature (158)..(158): n is a, c, g, or t
  misc_feature (169)..(169): n is a, c, g, or t
  misc_feature (181)..(181): n is a, c, g, or t
  misc_feature (184)..(184): n is a, c, g, or t
  misc_feature (186)..(186): n is a, c, g, or t
agtacaaaacccgagcgcgacaaaanagacacaaacgttgggttctgttgttctttcacggtgttgcccaacgtcgcattattcgtactnttattatccgcccnnnnttnttngcacggtatgccataattatccagtaggtcaccacgtcatgcatncgtttgtacanacccgtgcgganaananaaaaacccaaaactgaacagggggttggccttggcatgcagggaaaagaccagggagggcggaagtacaaaaggattaaagaattaaaaa

SEQ ID NO: 633148 - DNA, 237 bp, Homo sapiens
aattcttccacctcagaatcccaagtagctgggactacagacgtaagccaccacacccggctaattaagtacttttttagagacaggtattgccatgttgtctacactggtctcaacctcctgaactcatgcgatctccctgtctcagcctcccaaagtgctgcgataacaggcgtgagccaccgcacctgccttacacattgttcttgagtgagccatatgccgtactactgcagt

SEQ ID NO: 633149 - DNA, 393 bp, Homo sapiens
ttaaaactcatagctcattgttattcacaggatgcctctggttgtaaggaaatgctcttaagtcatgcgagtatcaccagtatgtactagccagcagtgtgaaccccaagcagagtactgagaccttccctaaggcagtcctgggccatcacatttaacagctgtgtgtgcttacgtctctgagaactgtacgcacatttaaccctaccgtgtcgcatgtgcacagtagtgccctggcatttcacaggacagcgctcaaattctcagaaccgtgttaccgcataacagaaatgagaacccagtttaacaataaagagaaaccaatcagcagtaaagtaagacaccaattccaagaactgtgatcccaaatacaagaaaactcgaactagtttc

SEQ ID NO: 633150 - DNA, 101 bp, Homo sapiens
cactgtctacacttatactattagcaggtacagaattaaaaagcttattacccccagctagtgatcaagatgtattaacaagaatatgaaagagcatctgg

SEQ ID NO: 633151 - DNA, 509 bp, Homo sapiens
agagtgctatcaacgcagagtgcccattacggccgggcgcggtggctcacgcctgtaatcccagctctcagggaggctaagaggcgggaggatagcttgagcccaggagttcgagacctgcctgggcaatatagcgagaccccgttctccagaaaaaaaaaaaaaaaaaaaaaaaaaaaaaaagggggggggggcccggaaaagcgtttaaaaccaatcgcgttggggcggcgggggccccaggtggggaacagtgtgagaccatgtgggccaaaagcgcggtggaccaaagggagaacccggggccaaggaaaaggggcgggggagttcctccacaattaaaaaagcgccagggggacaaacgaggagtgggtttttggaaacaaattctccaagagagggagagtttgcgagaagggcaaaataaggggggatatttatttaaaacgagggagttcacaaggcgaaggcgagaaattattaaattttagcccggacggtgggggggt

SEQ ID NO: 633152 - DNA, 104 bp, Homo sapiens
  misc_feature (90)..(90): n is a, c, g, or t
aaatgcaaaactcaccgtgcacactcctagatccctgccacaaagaaatctttgaaaaatgaagtcttcctttcggacaatataccattngagtttctctattt

SEQ ID NO: 633153 - DNA, 381 bp, Homo sapiens
ctttgcaattttaggaaaaagaaaaacaaaaaaaaaaaaaaaggaaaaatataaaaaaaaaaaaaaaaaaaacaaaaaaacaaccaaaaaaaaaaaaaaagaaaaaaaacaaaaaaaaaaaaaccttgtggcccccttggccccactggtttttggactggggcaggtttagccttgcggcccaatttggggttacttgggcaatttgcccttatggggggcggctttccatttaacgggccgtggtttaacacgtgtggatcgggggttggcgaattggcaaagggccccgaccgggtggcctttccaactggttgcccagccggaaggcctatgggaattggcaggccttattatttgtgtaaattcggcgtccaattt

SEQ ID NO: 633154 - DNA, 935 bp, Homo sapiens
agcggggggtgctaagagaccctagcggtgtcaggcgttcggagagcgcggggtgcgctgatatgttagcgctcctggctctcccggggcggggcgccagatgggacgccgcattcccggtgatgtagattggtgtaggtgcaaggcggaagcagagcggcggtcggggttcccgctcttggcgagcggatggtcactcccccggaggggagggcgatgcgaccagatatacctggggccgaggaaaccgtggggctcgggtgcagggactcacctgttgcacccacactcattcggggtttggacatttgccggcgtctagcgacgacgggactgtcgacttatgggggccatgaccatgatataatatggatgagttacaatcgattgcctcatataatattgactgctttgacagtccttgggatttgacgagactaaacatgcctggtgtcatgcctagtgagacagtcatggattttcaggaggtagcctgtcaaagaaaaacggaactttccttagaggttggttcagatgagagggaagcttagagagagcttggatttcacagatgctcaagaaaatgaagaaaaagcttctgagtatagagcatctgacattgctcaagttggtccctgcaggacagtcttgatcctattaaactgtgacgaagagagaaagctgggttcccccttgtggggactgactgtatctcgggacacttgctatcttaaaagcgtacctccggcatacacatttggcccgcgtaaagctggggacagagcatttaatattccgaaaaagagtctaaggggatgcccccgagcaggggtggcacaatcttgggataatagtgggcttccgtaatttctggtaagccagcggatcttaaaaaatatatcccccgccggaccggacacataatatcacacaaa

SEQ ID NO: 633155 - DNA, 204 bp, Homo sapiens
gtcagcagacctctcacctcagctcccaagtagctgagatcacagatgcttgccaccacacctggccatttttttcttttttgtatttgtggtagagatggggtttcactatgttgcccaagctggtcttgaactcctgagctcaggtgatccacttgccttagcctcccaaagtgctgggattacaggcttgagccaccgcat

SEQ ID NO: 633156 - DNA, 308 bp, Homo sapiens
aagagggctcgagtagcagatgcctctgagattgtatcttatagttgcataacatctggtggaaggtcacaactgaggtacaacgacttgtgtgactggtactgtagcaatgagggctttcccaggccacaacatctgggatcaaggcaacacatttggactaaataacactatcacagaaagtctgtaacaggcatgtcatgcaaatatcaacctcattttaaaacatgaggaaaactcattacccacattcagggctcaatttagctgtcaggaatagaccatacagttgaaaaaaacacagtctc

SEQ ID NO: 633157 - DNA, 124 bp, Homo sapiens
acgagaacaatgaattttgtgtttagacttgggtctactccaagatacctcattatatatatacaaaatcccaaatccaaaacatttgaaacactctggtccacacattttggatagggatatt

SEQ ID NO: 633158 - DNA, 351 bp, Homo sapiens
  misc_feature (222)..(222): n is a, c, g, or t
  misc_feature (273)..(273): n is a, c, g, or t
ctatatttactatgtctttttctatacatacatacttaggataaagtttaatttataaattaaatgttaatgaggctaacagtagttaataataacatagaacaattataacaatataccagcattactactcttgcacttttacattgttaagtaaaataggagttactggaacacaagcgctgtgatactgcaacaatctgataacccagacagtactgngtgactaactggtgggcgatatatacagcctggctgtgctggacaaagggntgcttcaagggtgagatagagtggatggcacgtgatttcatcatgctgctcagaacaatgtgcaatttaaaatttatg

SEQ ID NO: 633159 - DNA, 1131 bp, Homo sapiens
  misc_feature (638)..(638): n is a, c, g, or t
cggacgcgtgggtcccagtctatgcttcccacgaaaaacgaagcatagccataggtgattagaaaaataatgaatggccccctgaaagaatcgtacaatactatagacccgccacttaggcacaagatggctcatgaggatatcgaacccccatctgcatgctcaaccgaatcacacggttgcaagctgttttagaaattattactaataaaaccagtcaagccttgactgttcttgcctggcaagagactctgatgagaaatgcgatctatcaaaatagactagctcttgactacttgctagcagctgaaggaggaatttgtagaaaatttaaccttattggctgggcgcggtggctcacgcctgtaatcccagcactttgggaggccgaggtgggcagatcacgaggtcaggagatcgggaccatcctggctaacacagtgaaaccccgtctcttaaaaaaaaacaaaaaaaaggaaaatttaacctttactcaatggtggtctacccattagatgatccaggggcaagtagttgaggacatagttcacagaccttaaccagacctggcccatgttacccgtgacaatgttgttccacggatgtccaagccatgtaagcccatgttttcaccaagngtgcgtcccccagcacctaaggaagacatttaaaaaccctttataacataggagcgtcactatagccatcaaaaaacctgggctcaagggcacccctggtttggcaaccgtgtacttctttacagtgtatacaaaacgcttcctgcggctcccttagtgttccaccaaaagctgctttcgcccccaggggtacctatgtcaaccacgacctcaactgtgtgcccaccaaagaaccttctctttgcccactaggaggtcgtcccccccaaaataaacgtacgacaccccacagggaggaacacggacgcacgaaacaaccccccaaatgcagcaagggcggacacacaccgcgtctacaaaacaaggagccaaatacccacaggcacatgcagcccaagtcaaggacacaaacacaaagacgagcagaaacacgacagaagcagaaacacagctgcaacgcacgaacaacgcaccgcaatcaaccagcagcaaa

SEQ ID NO: 633160 - DNA, 207 bp, Homo sapiens
ccccagggggggggggaaggttttttcccttgtcccccaggggtcacccaacccctccagtgggtccccccttggggggggcccgcccaagggggcagggaaaacccttcctttggggggggcccttggggggcggtcagttttgcccaaaaggttccttttggaacttccagagcccttaaaaaaaagttttttcccatgtgaata

SEQ ID NO: 633161 - DNA, 105 bp, Homo sapiens
tactatactctgtgtgagtcccctatgccttctctctggtagctctctccgatctttggtgaacctcttgtctaattgtctgtaagctccatgaggatatgccac

SEQ ID NO: 633162 - DNA, 443 bp, Homo sapiens
ggagtcggtaccagtgctacctccacaaacagagagaaagggtcaagagcttctcaaaggcataatggctgaaagcttcccaaatctaaggaaagatatgaacatctaaattcaagaagttcagtgagctctaaatatggtaaacctaaagaggtctacactgagacacattacaatcaaattgtccaaagtcaaagacagaggtagaatcttgaaagcagcaagaaaaaattagcttatcacacacaagggagcttacgtatgattatcagcagatttcttagcagaaaccttataggctagaaaagagtgagatgatatatttaaagtactgagaaaaagggaaaaaaatgtcaaccaaaaatactatatactgaaaaactgtcctcaaaactgaaggggtaataaagacttgcccagattaacaaaagctgagagagttt

SEQ ID NO: 633163 - DNA, 174 bp, Homo sapiens
gggggggggggaaaaaaccccctattttttttttttaaaagggcctttttttccccctttttttttgtgggggggaaaactttcccccataaaattttttccctttttttttccagggacccggggttttttcaaaccccctttggcccgattttttttttttttttcccttta

SEQ ID NO: 633164 - DNA, 321 bp, Homo sapiens
tcgacaagagagagaagtgggcctgaagttcagaaatcaaagttgggaattggggcctggcacagtagctgatgcctgtgatcccagcactttgggaggctggggcaggtggatcacctgagcccaaaagtttgagaccagcctgggcaacatgacgaaacctgtccctacaaaaaacacaaaaattagctgggtgtggcggtgcacacctgtagtcccaactacaagggaggctgaggtgggaagatcgtttgagcctgggatgtggaggctgcagtgagccatgatcatgccattgcactgtagtctgggcaaaagagt

SEQ ID NO: 633165 - DNA, 552 bp, Homo sapiens
tcaacaccaaacacaccccaaacatatacacaccaacacacgacacacaccgacacacacagacactgcaaatacacacaccacacacacactacataaaagtgaaaaatcagccgagcgcggggctcactcctgtaatcccagcactttgggaggccgagtcaggcagatcacctgaggtcgggagttctagaccagcctgaccaacacagagaaaccccatctccactaaaaatacaaaattagccgggcacggctgtaatcccagctactcaggaggctgaggcaggagaatctcttgatcctgggaggcagaagttgtggtgagctgagatctcaacactgcactccagcctgggcaacaagagcgaaactccgtctccaaagaaaaaaggaaaagaaaagaaattttagaaggtgtgagagaattttaacaggtagaacaggtgatcgcgggtggatagagtctatctggcagtatatttatttcatgtatcagaccccaaagttgtggccttgtcattcttataatgtctcacattttggagaata

SEQ ID NO: 633166 - DNA, 205 bp, Homo sapiens
  misc_feature (50)..(50): n is a, c, g, or t
  misc_feature (173)..(173): n is a, c, g, or t
  misc_feature (183)..(183): n is a, c, g, or t
ggtaatgcaaaaagtttactacagcccagagaatgtttcacacatgtagncggtatgattaacgcttgctggtattttactatgtacaaatggtatgtgatggcactctaggaagagtttcaagtatttattctacacataacttatgtaatagaatgactcattgaatgaanaaatacatcntgagggcttgctttggagaact

SEQ ID NO: 633167 - DNA, 751 bp, Homo sapiens
ggtccgtttctggtttggctctagtgtggggtttcttcgcgggtgctcaagatgaacctgactcttcgggaaagcgaaacccgagggctcctgcggcccaggctggactggactggctttgggcccgggtgggaacaatgtagaagcagaatcctattggcacaaaggaagaattccctccgatgggggattcgctagcacgctatgttgggaatgtcatacggggcttccgggattcaaaggcaaagtattgaccgacggaggggggtccgtggcaaacaggccaatcttatttgggtccaacggccagaaaagggccttgtggcaggaggtttcttaacagggcaacacacgcagcgaattgtaacttgacgccaggcaagcgggggggaaccacatctttgtgccccaaaaagcgagggttcatttcaaacctatttgggaaaacagaggcccaaattttattaccccatttcccgaaggttcttttttcgacagcgggaacaatcccaaagagggaaccccacctgggttgtggacatgtgggctaatttgggacaactttggggacagtgttaacagtgggcaaatctttgaccggcactgggccattacacaaaaggcccaagggtttgaaaacgatttcggacccaaagtattttgggcacggcggttttctaacacagggaaccgcaagggcttcgagcaggggcaatcattcgatgggggacatcatgtgcccaatatttga

SEQ ID NO: 633168 - DNA, 508 bp, Homo sapiens
  misc_feature (67)..(68): n is a, c, g, or t
  misc_feature (436)..(436): n is a, c, g, or t
ccgtgcctattgtgcgtctggctgcacggcggagtatgaggacggcttctctcttccctacggctgnncgcccggggtcaagcgcaacggcttcccggtggctctggctcgcgcggtctccaacgagatcgtgcgcttccccactgatcagctgactccggaccaggagcgctcactcatgttcatgcaatgggccagctgttggaccacgacctcgacttcacccctgagccggccgcccgggcctccttcgtcactggcggccggaccaggagcgctcactcatgttcatgcaatggggccagctgttggaccacgacctcgacttcacccctgagccggccgcccgggcctccttcgtcactggcgtcaactgcgagaccagctgcgttcagcagccgccctgcttcccgctcaagatcccgcccaatgaccnccgcatcaagaaccaagccgactgcatcccgttcttccgctcctgcccggcgtgccccgggagcaacatcac

SEQ ID NO: 633169 - DNA, 453 bp, Homo sapiens
cgccgactctcaagcacacggaagcatggcactgatgtagtcactggaggctggatagtttcctttaaatacatgtacacttcatagaaaaagtgatttttatcctagaatagtataacttttctacctgagtagtcttacaaggaattagtgtacagtagattcttactattgaagtagttatgttctgtaaattcatcatgagtactggattagtgaatactaaaacattgctcctaggagaaatacaggattaggttcctataagctctggtctcattttcatcaactgatcaatacataaccttatttaacatgtgtaactatttaaagacacctttttaaatatatattgatggctcatgaatattgaactcacagccaaggactataactcagccctgaatagaagcttatttaatgcctgaattttctccataaggcacatcacag

SEQ ID NO: 633170 - DNA, 213 bp, Homo sapiens
taaaagaggaaccagcataactattacagcataaactattacagcataaactattacagcataaactattacagcataaactattctgcatcacagggattatgaataacttaataacaaaataatcctaatttctccttccagtctcttgtaacattgctagcatttatctctcttacacagaagcgtgtgtgcacatatgcagtatgtaca

SEQ ID NO: 633171 - DNA, 447 bp, Homo sapiens
taagcaaggttgattacgctcataacttataaatacaattactgttgcttaaaaacaagaatatgtcctgagaaaaggcacagtgaggtgattgcatcattgtgcaaacagcacatagagcacacttacgcaaaccaagatggtatagctggctgcacacccaggctagctgctgtattctctggctgctaggccacagacctgaacgacatgttactgtaccgatagctggcaggcaacttgtgacacaggcaggtcgacgcgggccgcgaaattttaagtaagtaggatattcgaccccggggaatatccggggtccgggatatcttgcaaagcggtaatcagtgtttgcccgtaattaagtgtggacgtgtatttagaagccttgggcggtaaatcaatggagtcataagcagggtttcccgagtggtaagtaatggttattcc

SEQ ID NO: 633172 - DNA, 281 bp, Homo sapiens
gggccttccatcgtccaccgcaaatgcttctagacacactccacctccagcacgcgacttctcaggacgacgaatcttctcaatgggggggcggctgagctccagccaccccgcagtcactttctttgtaacaacttccgatggtgcatcgtaaactgaacagtgtttattacgggttcatacattaacttattaacccaatttggtatttttcggaacaaaggccggccggagcaaattggaaacttggaggaggattaaaggcaatcctgtaaggttga

SEQ ID NO: 633173 - DNA, 589 bp, Homo sapiens
  misc_feature (1)..(1): n is a, c, g, or t
  misc_feature (3)..(3): n is a, c, g, or t
  misc_feature (7)..(7): n is a, c, g, or t
  misc_feature (26)..(26): n is a, c, g, or t
  misc_feature (39)..(39): n is a, c, g, or t
  misc_feature (42)..(42): n is a, c, g, or t
  misc_feature (45)..(45): n is a, c, g, or t
  misc_feature (48)..(48): n is a, c, g, or t
  misc_feature (66)..(66): n is a, c, g, or t
  misc_feature (92)..(92): n is a, c, g, or t
  misc_feature (94)..(94): n is a, c, g, or t
  misc_feature (113)..(113): n is a, c, g, or t
  misc_feature (128)..(128): n is a, c, g, or t
  misc_feature (138)..(138): n is a, c, g, or t
  misc_feature (149)..(149): n is a, c, g, or t
  misc_feature (153)..(153): n is a, c, g, or t
  misc_feature (155)..(155): n is a, c, g, or t
  misc_feature (171)..(171): n is a, c, g, or t
  misc_feature (183)..(183): n is a, c, g, or t
  misc_feature (206)..(206): n is a, c, g, or t
  misc_feature (215)..(215): n is a, c, g, or t
  misc_feature (217)..(217): n is a, c, g, or t
  misc_feature (221)..(221): n is a, c, g, or t
  misc_feature (231)..(231): n is a, c, g, or t
  misc_feature (257)..(257): n is a, c, g, or t
  misc_feature (277)..(277): n is a, c, g, or t
  misc_feature (282)..(283): n is a, c, g, or t
  misc_feature (289)..(289): n is a, c, g, or t
  misc_feature (309)..(309): n is a, c, g, or t
  misc_feature (313)..(313): n is a, c, g, or t
  misc_feature (316)..(316): n is a, c, g, or t
  misc_feature (318)..(318): n is a, c, g, or t
  misc_feature (320)..(320): n is a, c, g, or t
  misc_feature (327)..(327): n is a, c, g, or t
  misc_feature (334)..(334): n is a, c, g, or t
  misc_feature (338)..(339): n is a, c, g, or t
  misc_feature (341)..(341): n is a, c, g, or t
  misc_feature (353)..(353): n is a, c, g, or t
  misc_feature (368)..(368): n is a, c, g, or t
  misc_feature (380)..(380): n is a, c, g, or t
  misc_feature (393)..(393): n is a, c, g, or t
  misc_feature (404)..(404): n is a, c, g, or t
  misc_feature (407)..(407): n is a, c, g, or t
  misc_feature (410)..(410): n is a, c, g, or t
  misc_feature (412)..(412): n is a, c, g, or t
  misc_feature (423)..(423): n is a, c, g, or t
  misc_feature (442)..(442): n is a, c, g, or t
  misc_feature (453)..(453): n is a, c, g, or t
  misc_feature (468)..(468): n is a, c, g, or t
  misc_feature (471)..(471): n is a, c, g, or t
  misc_feature (565)..(565): n is a, c, g, or t
nanatanaggtaggctctatagcaanaggcctggaggtnctncanttntgggggaaaatggaaggnggagggtggagttttttctgcaggananctgagtggagggtgggganaggtgcaaactgganaggcctaaanagctaaaaaancaantnagggccagggccaaantcggcttcaatngaaaaaaaacccaattccctaangcccctaantntttntggctttttntttaccccaaaccagggttgggagtnctctgggcatccattttttntaaannaaattnaaaaaataaaaaaaagaaangaanctntnanccttttnccatttngttnnangggcctccaatncaccattcctccttnttccctttattnggtggggccaaanaatgggcaacnaanctntnggctttcccantaaaacaggctgcaaaaanaaccatttttnaattaggcgtttatnttnttcccttgtttcccaacctaccaattccactttaaaacccagagtgagttctacaagcgttgctggcctaatggatgggctgggggaagggggngggacaggggctggaggaggggct

SEQ ID NO: 633174 - DNA, 1262 bp, Homo sapiens
gtgacaaatttctttattttaaattcaacaaacctcattctttccttcaagccccaggaccagtggtaggcagccctccctctccatcccctcaccccacccctttagccacagtgtgaagggaagtggaaaattgagaagccacgaagggccccttgaccagggaaaggcttgccccgagattggtgtggtgagcacagtcagtgtgcagcttgttggcgtggggcacgcagcttgccacaggcttccttcccttattaaattataagttccgtgcagccacagcttgatggagaagaagcataccttgataaaacgcaaggccagatccagcattcaagaaggcaaaggcagacattcaggtgacctcccagccaatggaattgaacgggagagacacagagcctcaaagacaaaaacaggccagggggaaagaaggaagaagacagacatataggccagggcattggcggtgaagggcactgaggccctataaatatcgggctcccaggggaacgcgcaaaaggccagagcggaacacagtattcgagagagatatgagggcaagcggaccgtgctataacgaaacccatggcgggcacaaggactcgccaagaaagggccaccatccaaaggtgaaccaggcacacaagagctagacaccccacaacaccctgaacccacacacgagaacactgacaaagcacaggggagagccacacagaaacaatgctcactggacaacacacaatcataatcacaataatcacataacacccaaactatgcggagggtcacagagaccacaagaagactgacgaatcggagaacacacagcgaaacgaggcaagcgcacacaaccgagtaaacaaaaccaaacacagcctgaacaccgcccgcggaaagagacccaacagaaaaccaaatacaccacgacgccacaaggaagaaagaaacacgaacaagaatccaacacacaagagaaactacaaaaggaaaaaaaaaagagaaacaccagaaaaaaaaacacaaaaacggaagcagaaggaacccgaacccgaacagaaacagaaacacagacacagaaacaacacaacacaacgaagaacaaagagccaaaaaaaacacgaagatacaaacaccaggaagaaacaaaccgaagagacaaagaagaaacaacacaccaacgaacaataaaaacccaacgacagaaaccactgagacaccaataaacgacgataccgagggtcccacccaacaac

SEQ ID NO: 633175 - DNA, 383 bp, Homo sapiens
  misc_feature (23)..(23): n is a, c, g, or t
  misc_feature (43)..(43): n is a, c, g, or t
  misc_feature (328)..(328): n is a, c, g, or t
  misc_feature (359)..(359): n is a, c, g, or t
gccagtggccacacacacacacncacacacacacacacacacnacacacacacagagccatcagttaccaatagctcttcagctgggtgcagtcttaggagcctctcctccatccaagctagaatatgggtctgcagatcaccacagctgctgtgagcttgtgagtgtggtgtccatgccatgtccagaaggcagcattatatatacatggccctattccccaggcttcaggccttcattctttccaccacttcttcagtgctccctgagccttagacaagtctactgatagaaatggtctgttcagagctgaatagtaaacagtcanttagtctctacactttgatcagccttgtgtntgtaagctggatgctctctactga

SEQ ID NO: 633176 - DNA, 948 bp, Homo sapiens
tagccgagaagccgggcctgcagcgcttcagaaccgtccgggaaccccacccgcttcccaggcgtgacctgtcaacagcaattcgcggtgtggtgaactctctgaggaaaaaccatttggatatactctcagacgtgcgtggcaacaaatgtgatttgagaccctagaaatccaagcgttgcacggtcctgaggcagcctaagtcggcttcaaaaatggacacgaaggcggtttgtggggttccattcagagccgatacatcagccatgagtgtgtgaacaaagcccacgggaggacttgtgggaggcttggccaggggcaggatgctttggttgaacgggatggaaggccccttggccattgtgccggcccgtgggaaggctcggcttggccccaaggagaagctcttccccgcaactctttccagtgggcaaggcccttttgacggcggaagacacaccagcaagaccccttgaaggggcactggggtgcaggcctttgggcactttccaacctggcctccctcttggcattgctcgcttcaaggggacacaccattcttcacccttggggaccctttacaacagggttgtgcttcgactggacttgattgtggctcctttgcccagagaggcttcggccccaggaaggtccgacaacttacaacggtggctggaattcactggaagaaagttctaagttaggagaattactggactggagtggtgtggaaaagggcaggtttgtactaatttccagagccagaagaagttaggttatgaaaataacgaaagtaaatggttggaccagagctagagccttaattcataggtggcgtaacggtctaggagggctgtatatggttcaacattaaaatgtgaagaatgtatactgtgtaaaggaaattatccagataaagatgaatgctctataagagatatgacaagg

SEQ ID NO: 633177 - DNA, 256 bp, Homo sapiens
  misc_feature (58)..(58): n is a, c, g, or t
  misc_feature (67)..(67): n is a, c, g, or t
  misc_feature (136)..(136): n is a, c, g, or t
  misc_feature (159)..(159): n is a, c, g, or t
  misc_feature (170)..(170): n is a, c, g, or t
  misc_feature (218)..(218): n is a, c, g, or t
acagcgccaagtgaagcctcgcttcctcccgcggcgaccagggcccgagcgagagtancagttgtanctaccgcccagaaactagacacaatgtgcgacgaagacgagaccaccgccctcgtgtgcgacaatggcncggcctggtgaaagcggcttcgngggaatgacgncccctagggccgtgttccgtcatcgtgggcgccccgacacagggcgtnatggtcggtatgggtcagaaagattctacgtggcgacg

SEQ ID NO: 633178 - DNA, 1786 bp, Homo sapiens
  misc_feature (854)..(854): n is a, c, g, or t
tggcgggcggagcgcgtggggggtggtgttgcatcaacggcgccgcgtgtttgttggtgggcggcaaccacgcgttgtggcggcgccacgaggttcctagggtcgggttgtgttgtgtcggggggagggtgtgacacatggtttgtgtcgcgcgccagggtggggcgcccctccctggtggtagagctcttgtttgggagcgcgtgatgagtcgtcgtcttgcttgcacctctcgggggggggagccacgcatgtgggctggggggggccgtgttccacaagtggtgtcacggcgcggagaggagtgggtgggtgtcgtgggctgccccaaggggagacatgtgtttttgtcgcgtgctcgcggtgggggagatgaccgcgcgcttgtgtgatccatcgggggtgtgagctccacgtgcccgagcaattcaggtgggggggccgccgccgccccgccccggtttggggggagagcggtccacaggctgtggtgggggttggtgctacgacgtgggggttgccaacgggggttggagcgtgttagtgtcggccgttgggggaacccctacgtggcggcgccagggccgccgccacatatttgtggtgggtcgcgcgccgtggtggccattatgttggccggccccgcctcgtgtgagtatgtctgggagtgttttggccgccacagcacgccgagaggcgttgctatcgaccgcgtgggaggacacaaggggcaccagggtgtgtgggtcctcggagagcctcggagaagggggggagagagggaggtgttgagtgtctcccccgctgttgtctgtgcgtgtgaagagagaagagcctctgcgagaagagattangggccgccctgcggcagagtagtggtctggtgcgaagaagagttgtcctgcgggtggtgaagtagttggcgcggctggtcgacgccagctggtgtgctgttgagaggtatctgctgcggtggttctcctctgcggccacacagccccccacacgactgttgtgtgtcgccgtttggtaggcgagagcgcgctttcctgttcaccgaggcgggtatattcgcgacccgcgctatgtgtgggagttctcggcggctttgttgtctgctgtgtgttctgcggtgaggagtagagaaggggaggagcacccagcacacccagcagtgtgcgctccgcggtgggcgggtcgtctcatatccacagagcagcacacgagtggggcacccacagagaagagccgctgccgccgttgcgagagacctgctgggcccacacagaggtctcacaccagcagagtctgctggcccccccagagatatagagccgctctcagagagaggagcgctcatagagatgtagatatatgtagtcaccccctgatagttaccctggcgccacacgccacacactctcttatgagatcccagagtggggtggatagaacaccgggtctctccagagaactctgtgtttgtgtgtgtccacaattgtgcccacattgtatagagtttatgagtatgtataaaagagcctggttaaatgaattcacccaatgcctctcgttaaacccttccagagaggagaaagaggaaatgttttgtggaccccctttggttttctcttttttgccgtgtggccacgttttaaagttatattatgttttttaaatccgtgacttttttatgggaaccaccgtgaccccaaaattgtccccacgaattgttgagaccccctttaaaaagtttacatgagaaataacaaaaataaaaaaaaaa

SEQ ID NO: 633179 - DNA, 195 bp, Homo sapiens
gcgtcgacctccagccatgagccactgtaaatgtctcggaatgccaacttgaagcccagctggtcagaagttctagaggcccagacttgcaactggtgtctgaagggatggcagtcttggggactgagccctcaacctgagggatctgatgctatttccaggcagatagtgtcagaattaaattggaggatacgc

SEQ ID NO: 633180 - DNA, 149 bp, Homo sapiens
agtgagcgcatacagggatcaggatgagccgtggcgttgcccagccaccgatcccctcgacccgtatacgttgatccaggaacacctgacggcggacatcattgtgacgggaggtcatcttggtgtagctggtttgccatggatgggag

SEQ ID NO: 633181 - DNA, 743 bp, Homo sapiens
gttatagtgattgcttacgtaattggcagacgacacacgtgatgctggatatcagactctgtaacactaatcaatacgtgatctctgttacaaaagaaaaaagcaagtacaagttccaacatgcaatactggtcaacttcaaggtatatccagttgcagtccagctctttcagaatgggtggtatgggggatttcaaacttcaacacacaaaaactatcaactacgaaattagttgcctgactcttgcgtttttccaaccaaggcaatttaacaactgttatttttacagcacaaagatgtgcaaaatcactggattcataagttctcattttcactgtcttgccattcagtcatttcagtgttcttccatcttctcagcacaattccagactcaacacaatacaccgtttcagaaaaacacgaattttcgcaaacaagagcattttctctttaccctgcaggtagctaagagattaggaacaagcatgttctaccgtcaggattcagtacttgctacctttaagctacttatctgtgtgtgtgctgtgtgtagtgtcgtagtgtgtgtgtgtagagaacttgctgtagagccacagctaacacagacaaactaccacaggcactcgctggcatatagagacaccagagaagaagaataaaagaacatcgactgagaaacaggagccaggtctcaccacaccctcatacacaacaaaacgcacaccaacaggctgagaaaaca

SEQ ID NO: 633182 - DNA, 249 bp, Homo sapiens
agatcgagacagctgggcaacaccagtgagaccttgtctctactaaaaatacaaaaatgaggtgggtgtgacggcgcttgcagtcccacctactcaggaggctgaggcacaagaatcgcttgaatccaggaagcaagcggaggttgcagtgagttgagatcgcactccagcctgggtgacagagtgagattctgtctcaaaagcaaactaacaaagaacaacaatacttcctggggtttcggtgtgcag

SEQ ID NO: 633183 - DNA, 253 bp, Homo sapiens
cgcagtttctgcccattgtgcccactttctcacctgcgggaaagcttggagcttctggggctagtgatggggcacaggtgttgcagggacaaggtctaggtgatctgagttcagggcagccatgtgcctggggcctggtgcaggtgctcaggtgaggtgcgccgggggccggccttcagtaggttggtggccgggccccagacctttgggggagggggctgaagagggccctggagcacacagaccccattca

SEQ ID NO: 633184 - DNA, 100 bp, Homo sapiens
tcagtcactgaggcccttcctgtttacgagccttggcgctgcttccccgtgctgctgtctctactgagccacaatccaagaacctagatactgggcactg

SEQ ID NO: 633185 - DNA, 389 bp, Homo sapiens
tagcaggttacgtgcacattcaggtgatcgggtactagaaaacccgggcttgaggcacgtgcaagcgttaggtggacaggctttgtgattagttcaaagttgatgaagctcacttggtccagatcacacgataagtcttcttccctgtagcggcatcgtgatagggattttcggccgggacctcttgcgtgcgcacgcacgggggtccctcgcagtccataatgggagcgtcaccaccctggcgtttcaacgcttctatgttttggtcaagcaccggttactctcgttggcgttgggcaaactcatcggggctggggaccgcgaagaaaaacaggaacggccagaggaataccacacctagatgattagcgaagatgctgagccccgaa

SEQ ID NO: 633186 - DNA, 472 bp, Homo sapiens
caatgggaaacaataagacacgggagattccgaaaggggggatagtggggaaggaagcaagggtaagaaaaccgtctatggggtagtatgtccactatttaagtgacgggatcaacagaagaccaaacctcagcatcatgcaatatactcatgtaacaaacctgcagatgtcgccccgaaactaaaattggaaaaacaggcggggagaggtggcttatgtctgtaatcccagcacttggggaggccagggtgggtggacggcttgagtccaggagttggagcctagccggggcaacacagcaagaccctgtctctacaaaaaattaaattagccaggcatggtagcacaccccaatagtctcagctactcatgaggctgagtagggaggactgcttcaaccggggaagtcaaggttgcagtaagccgtgatcatgccactttattctagttggagtgacacagggagacccc

SEQ ID NO: 633187 - DNA, 389 bp, Homo sapiens
gtgtgctccttgcagagccatgattacctgcaacaaagtgcagattagggcccacgggccttgccaggtagaacatgctatcgttctttaattttattatatatacgtactttgcttctgtattttgcttaaagaactaaccccgatcaagagtatttgctttagactagcttaaaaagaaaacatatattttatgtaaaaacacatacatggccaaatgcaatactgaagagacaatcatcctgtatcttttatggtttttcctgcttctgagtgtcgttctacaatgcccgttgacttattccattgcgtctctgctttagggtatggtttggtcgctttggttgtcatgagaaagagacattctccttgcagctacctccatgtga

SEQ ID NO: 633188 - DNA, 171 bp, Homo sapiens
tatgcagcaataccgagggaggacatcagtgaaaactagcgtggcttgaggaatcggggcagattgagtgatcttggggacatgtgaactggtgaagcttggcaaattggataacagggtcactggggtaatgattgtctatgtctcctgtgaaggaggataatgcaatgg

SEQ ID NO: 633189 - DNA, 176 bp, Homo sapiens
aaaaagggggttttcccattttggggggggggttttcccacttcttcttttaaattattttccccgggccctcccaaaggtgtgggatttttagggggtgacccccttcccctgcccccaattttttttttttttttttggccccccaaaccaaaattaaattggtttttttttta

SEQ ID NO: 633190 - DNA, 175 bp, Homo sapiens
gcagcaggatctaagtcatatagattctacttcgaaaacagacttatccccacctggctatcatcacccgatgaggcaaccagcgagaacgcctgaacgcaggcacatacttcctggattctacaccctagataggctccctttccccgtactcactcgcacgtaagtttagcac

SEQ ID NO: 633191 - DNA, 188 bp, Homo sapiens
ggaagaaggaggaaaattacccggtatcgttagagctacaccaaaattgcattttagccaaactttgccaccaagagcccaaccaatcaccatgtatgcttgagcacgggaagggcagggaagggggttcttggtgaaggtcaagggggccctacccctggtcctcgttcaagcccatgaaggtaatg

SEQ ID NO: 633192 - DNA, 452 bp, Homo sapiens
  misc_feature (209)..(209): n is a, c, g, or t
ctcttcaccacaagcagtgtttatgacccatcagcatggagacgctgtcaaacatgtttgagctggatttgcccactgtgcactccatcatcagcaaaatgatcattaatgaggagttgatggcctccctggaccagccaacacaaacagtggttatgccccgcattgagccccctgcccaacagaacctggtttttcagctggccganaaactgggcagcctggtggagaacaacaaacgggtgttttcccacaaacagggcacctacgggggttacttccaagaccaaaagggcggctcccccaaaaacaagggttacatgccccccggtggctacccccaacaacagtttcaaacggcctattgagctctcccctttgtttcccgcctgggccatccaaccttgaagtcctaaacccccccccagtccctaaaggtttgtttaaagtta

SEQ ID NO: 633193 - DNA, 141 bp, Homo sapiens
ctcgggaccgctgagggtctgatttcagcgaggccaattttagtgcagaaagaagaaagggctccataataactgccccagcatgggaacgaaatgccttgggggtcctgatttcagtgaggccaattttagcgcagaagg

SEQ ID NO: 633194 - DNA, 109 bp, Homo sapiens
ctccttagctacaaacctgtatagcatgttactgtaggaggagggaggactggactggatgatgtccaggagcctagcactgctgttgaaataacattattctcgcagg

SEQ ID NO: 633195 - DNA, 165 bp, Homo sapiens
aggctccccgatacacacctcatctgcctttcgatccgtgatggcacgcgggagtgtctgcacacctaggctgctctctctctctctctctctctctctctcatctgcaacgcccacgggagcggtgccaagctgtccccttctccccgtcccccaatactccca

SEQ ID NO: 633196 - DNA, 223 bp, Homo sapiens
ccggggggccccccccccctttttttttcccccatatagaaaccccgggggggcttcccccccccgctctttttcttgggggggggggggggatttatttttcccccgggcccccccctcccccctgggccctttttggggcccctttaaaaccggttttttgaaaaaaacgggggggggccgggccgggttttccgggggttttttccccccccggccccca

SEQ ID NO: 633197 - DNA, 108 bp, Homo sapiens
tccacaccaagtaatcatatcctagtgtgccatcaagtcactaagtcgcatcacagagattcagcagtgtggaggccttccatgcgagagtgggctagctcatgcggt

SEQ ID NO: 633198 - DNA, 366 bp, Homo sapiens
accactgcatgggcgatcacatcatcgtgttcaccgtgtggccgatcagcgcccaggaaaccatggtgaccaccaagtggctggtacacaaggatgcggtcgaaggcgtggactatgacgtgacgcgcatgcgtgaagtctgggatgcgaccaacgaccaggaccgtcgcctggccgaggaaaaccagcgcggtatcaactccacggcctaccagccagggccgtactcgaagacctatgagtttggcgtggtcaactttgtggattggtacagcgagcggctgttgagcaacctgggggccgagcctgcgccgtacctcaagggtgtgccggtgcacggctaacagcaaaagcttcggtcgacgc

SEQ ID NO: 633199 - DNA, 334 bp, Homo sapiens
tacggcagttctgacacatgaggaggctgttaaaagagcaggggcgatgggtgcatctgccttgggtcgcagtaaaccccaggcacacaaagacagaggcttgtggctggcttgcggttgctgtgatcacgatggaatcagacaacggctgccctggcaggcagcacccaggcacctctcaggtgggaaaagactgagccaggtgaatgtcccagagctccagccggctcaggctcctatgggtgataactgcactagacacctctccgaagaagccaacagaaactgcatgcagcggcaacatgagcaaagataagtgttgggacccgttctt

SEQ ID NO: 633200 - DNA, 1005 bp, Homo sapiens
attggcgtggttttatattagtctttccaaatatgacatggattgtcccttggaacgtccactatgtgcattctcttaaaatgcccacaccctacttgctcatctcagagcgcgcacatcggcctagatcctctcgcagggtacaaacaggggaagctgatagcgtcgcttccatgtatagtgtttgtaatgcaataatgttccagtgaattcctatcgtccattaaatactcttgggtacttggtggtactgcagttattggaactgactgagcctttcgatgctgcctccgctttccctcctggggtagttccacgatactggagatgttatgaaggcatttcgggtgctctcctggtcagtgagtgtggacgagtcagctcataggtcttcatctgataccattgaacgttcgagagccatcttgtacatacatcatgtgctcaggctgtcaagaagaggattaaacaaggcaaataaccgcttgtctgagcaaaagtgggaactacgagtggttgaaggacctcaaaagtagtggcattttgggatgaaccacagcctgccagttagtcacatgttgactctgagcaatgaagcgcgaaccgtggaaaaccgctcctgtacgtcgagatgttgcgagcttgaacgcgctccatgaggccaaacgatgcgaaatctggcgtgtgacgggttccatctgacgaccgtgtgtaactgctgaggcaggcgttggtctgtacagtgaccatgaggagcccctctcttccttaagtaggaatctgtgaagctaaatgttttgctgtcggagacaactcaggactgtctgtccttgggaacagcattagccagatgaaggattgcctggggcacaggttgctgcgcgagcggtatataggagacacggtccgaaagggttggtggaaacacaatatcaccttacgagaaaaatacctgatgggaaaaaaagggggtttaaaccggccttccttaaccctcaaactagc

SEQ ID NO: 633201 - DNA, 343 bp, Homo sapiens
aaaaaaaaaaaaaaacccaaaaccaaaaaccaaaaaaattagctgggcgtggtggcaggcgcctgtaatcccggctacttgggaggctgaggcaggagaatcacttgaaccagggaggcggatgttgcagtgagccaagatcgcgccactgcactccaccctggacaataagagggaaaccccatctcaaaaaaaaaaaaaaaaaatttcttgtgaggatatgtttagaaaccgctaaaaacattagtgttttaggccgggtgtggtggctcatgctgtaatcccagctgaggtcaggagttcaagaccagcctggccaatatggtgaaaccccatctcaact

SEQ ID NO: 633202 - DNA, 317 bp, Homo sapiens
agcggccgcctactactactactaaatttgcggcccgtcgacgatcggcattttgaagactcgggtgggctggccagcacgggcggatcaggaggtcaggagatcgagaccatcttggctaacacagtgaaaccacgtctctactaaaaatacaaaaaattagccgggtgtggtggcgggcgcctgtagtcccagctgagggactgaggctgaggcaggacaatggcgtgaacctgggaggcggaggttgcagtgagccgagattgcgccactgcagtccgcagtccggcctgggcgacagagcgagactccgtctc

SEQ ID NO: 633203 - DNA, 1019 bp, Homo sapiens
tacgtgtacaggtggacctggagtcgcggagaaggtgctcttggacggcgagcgcgtgtacgtcaaatgatcagcctactgttgcgcgcatctgcaaaggcagaggagagtggccctatgtgggaccggaactcgcgtattctgtgcgagctggcgagttgctgaccgcgcctgtaggtggtccatggtagaccgtatgcacacggccgcagcagggtggactgggtagcgtgactagggtggtgtctgttgcgtagagagaattgcgtgagttggtcgagtccaccaattcgcctggggcgatagattgccgtgactggtggtctaccgagtaggatcgatcggagcggacagaaggtgacgatatcctcgcagcttgctcgtgtcaggccagaagccgatgctggcattgcactgtagcagatggctggttgacgcgcgggaatgcacagacgcgggagtgcctcggctgatctactggcacgaggaaagtgacaccagaggatggtgaaaaggaataccacagcgcttctgacagggagcttcgtgcgcgccttgagaaggcccgcgtggtctgcgcctcgggtggcttgtggactctcgggccgttcaggtagtcgccagcgcgtgcttccgggacggcgactcgaggcgttcacgacaatgttgccgtgggagtctctgtcagcctgggtcaggccgctcgacgtcttcgtctctcctgccagcggtcgccatggcagcgtgctcgctgttcatccgctcgtctggatgcgggagcgagcctgtccttgggacttatcgttgtgtcgtttggcccggggcgcgtggttatgctccacgtctctctgagaggtgagggctgctccctgcacggagagcctgatgcctgttgtagcggggcggcagtggtgagttggggcgcctggggggttgactgtgtcaccctggaaggctgggactaaacattccaagcggcgggtcgtgttttccacctcctgggccgggggttgggccca

SEQ ID NO: 633204 - DNA, 111 bp, Homo sapiens
gaatattttagagaagattctaagagaaaaagctaaggtgatttttttttttcagggcgttttttggttctcagacagtgtctcactctgtcgcccaggccagagtgccgt

SEQ ID NO: 633205 - DNA, 203 bp, Homo sapiens
  misc_feature (164)..(164): n is a, c, g, or t
  misc_feature (174)..(174): n is a, c, g, or t
gggatggggtcgtacctgggttggttcactgaagtaggaacctcagaataaaccatacagaattctccaatcttctgcagatcacccccacggcagtatatagtgtcagacaacctttgaaaactgaagcgtacccttgtggtgagccggataatgtccccagngctggatcangatggccaacattcgtcccagcacagaga

SEQ ID NO: 633206 - DNA, 139 bp, Homo sapiens
ccgatttgactacgcggctgcaggcgaaatggggttatagggtggggttatttacagttaatgttagtaagggtagggaagcgaggttgacctgttagtggtgagaagaattattcgagtgctatagccgcgtagtcag

SEQ ID NO: 633207 - DNA, 198 bp, Homo sapiens
tctgaaagcatgactggagacgccttaggaatcatagcggaagctgaaggtcatcagtcacttcttacatgcctgcagaagggggaagagagagcagatggaggtcccacacacttttaaacaagaagatcacatgagagctcactatcatgagaacagcaagggggaaatctgcccccatgatccaatcacctccct

SEQ ID NO: 633208 - DNA, 360 bp, Homo sapiens
aaaatgaaatatggcattggtttgtggctgacagctaccggtttgtccagacacttaaaaacttgggatacaatatgaaacgaaaaagacgaagatccatggaggcagttgcgatcatgactaaatttcactatcccatgcttagcttacacgtcaaatacctgctgattggaccctttaacctcctggagagcagttcgactattacctggacaaccttaaagaacttccagattggctaaatcatggctctaccttattaatctgtactcacattgtaatttggacaattgtcaacatatccaagatacccaaatcgttaggcacttttactaggatctcaatgttgttatcgggttt

SEQ ID NO: 633209 - DNA, 679 bp, Homo sapiens
attccaggcagagaaaataggcaacacaaagaactaaaggcagaagcatactgggcgtataggatgaagggcagagttccactaactaactgtgtatataaataggaagagaaatgagtactttacctggatgcgtgtggccttttctccgtgaactattttagatatatgtaaaatgcacttatttagaataaaattcacttatttcgcattcttatgggagaatatggaattaatacagtatgctactacaatcgaaaatctctattctcttgagtttaacatatccgtttctcaagtgcacgttacgacccaacaatacaacaaatgctcgggctattaatcagtaacatacctgtacttcctagtatccttccagtaattttcattattagccatacaggtacaataatctaatatcctttctttacatggcaatgtccaagcgcatcgtggattcagctattgaaacgccaattcttccacccttaagttgttaaccctagacaggaatgtgacactcaaacaccagagtactcacccaaggctttgttaatcaacagatgtgggctgtccgtgtggcatttttgcaccaccagacaaggactattttacaccgctgcagataacataaagctgatgcggtagaccaagtccccttcagcactgtacgtatgcg

SEQ ID NO: 633210 - DNA, 459 bp, Homo sapiens
cccaggctggagtgcaatggcgccatctcggttcactataacccttgccttcccagttcaagcgattcttctgcctcagccctccgagtagcaggaattacaggcatgcaccaccatgcctggctaattttttttgtatttttaggagagatggagttttaccatgttgtccaggctggtctcaaactgttgatcagcccacctcggcctcccaagtgctgggattacaaatgtgagccgggagccactgtgcccgggccaatttttttttttttttatagacagggaaaaacatcttaagatgggagagatcaaatacctggcctattttaagaagagcttttttcttgagagtccaggacccgatgaaaaggaagctcctcggctaaaatccgcttataaaaacccgtacattattagagtatggcctattggagggatctaaagttcctatgattc

SEQ ID NO: 633211 - DNA, 361 bp, Homo sapiens
tcttgggatatatatattctttactcttagcaatgaacatttcggagtttcatggaaagtccaatgcatttattaagcatctttaagttgacaagattttagctcaaaactctatctccctggcattagcaactgctgaaacctctggttagttatttagccatccagatgctgctttatgatacatatttttttacgctgcacatctgcaatttaggattcagccaaaggtatgagatgaatctgcagtcatatttgggacttatccatccatgtttgaattctttttggcagttttccccctgagttttaagccagtgtggaagttctggtttcaaataagtagctcctcagcctggcc

SEQ ID NO: 633212 - DNA, 1252 bp, Homo sapiens
  misc_feature (30)..(30): n is a, c, g, or t
  misc_feature (56)..(56): n is a, c, g, or t
  misc_feature (63)..(63): n is a, c, g, or t
  misc_feature (72)..(73): n is a, c, g, or t
  misc_feature (363)..(363): n is a, c, g, or t
  misc_feature (385)..(385): n is a, c, g, or t
  misc_feature (1252)..(1252): n is a, c, g, or t
cctcctcaggctgccaaagtgctgggattncaggcatgggccactgcacccagccnacatganacacttctnnaagataagtggaaattcaagccattgatttttctgacacaactgacttactacacacacacacacacacacaccacgatttagctgtaattggagttaaaattcagtaaaaaactgttattagtcatgttttccaatttgtgagttatacaatattggattagatgctaatttcttaactgttgctatgggctgcatacattatgtcaaactaactacctttgggagtgtctatataaacacttgaaacttttcaaatatatgaagaggtaggttctagtgtatacattntattggaaagccattaatcatngaagaacttaagcaggtggggcatttaatttcttccaaataccttattttgtggatctgctcaagtggttagggcgagtgcaccattattcccgaatccctgcaatgtggttcccattttgtctgcacaaattttcttgctcagtcgagccaatgacttttattggtttttgataatcaaggaatcgcggccgggggtatcccattatatatatctaccctatgagtgtagacgggtgcctggaaaactacccatcctcatgacctcagatctacataatcctaagtcataaggtaaacaaatactgatgcaaactagtgatcattgaagggcacaaccagcaataatgggggacacaaaacatagagacaacctcataaagactcggcaccacagcacgtccagatcaccaagagcaaaggagacacagcacacccgtgcacgtgccatcaggacaaaaaaacgtggcacacagatagtatcaccagggcaatgacagggccaagaaccgccatgaaaacagcctagtagaaacccccgggcgggatgaacaaatagggggaatccccagacgagagtatccacacaagagatgcgaacccaattataacagcgacaatagtcggatagtggacaagcgacacagagacccgctgacaaaaaaacagggggagacacccaagtggtgaaccaagaagtaaactctagaaaggaccaacgggcgaacagtatcacccggatcatcggaaaccacagatccatcactagcggaaaccaatggtacgacacaccgacgcgataggcacacaactctcaagggagcaacagcagacagcaacaatagtttgtcgtccatcctccaacggn

SEQ ID NO: 633213 - DNA, 920 bp, Homo sapiens
gacattgtgcaaaccattctctcctgtcaatcagaggccagcctcccaactacgagatgctcaaggaggagcaggaagtggctactgctgaggggtgccccacaaccctggtcgcccgatgtccaccgtgatccacagtcctgcgtagcgatgacctcgcgtgcctgaccatgtggtctggtccctgttcaagcaccctcttcatgaacacctgctgcctgggcttcatagcattcgcgtactccgtgaagtctagggacaggaagatggttgtgcgacgtgcaccggggaccaggctctatgtcactaccatcgccagagtgcctgaaacatcctggagcccgtgatctggggctatcttgcatcgcaccgattcgtgctcaatcatcatcccagatgtaggtcgtcccaggtcccagcgataagatcaggcaggcagtcattgcaggcccaggagctctgaccacgtgaacctgtatcccaggtaacatctatcatttccattcctcgagcctgacctcaagaaggccaaggagcctctgcaccattgaacgctggtatatccacgttaagtccagccttgcattacttcgcaccgggtgcccaaagcccgagtcctggcattcaaccctttaatcctcacgcagcattggctacaccaaaatggggaccttgcaaattacaacgggcgcgtactaattggttgtgccttggacccagacagaaacaccacgatacacaccgagatagccgacacagaacgcacgtttggtggcgcagacgctcaagccaccccgcacgagacagccccactccacgagcacaactagcgtccatggaccgccgccgccgcccccattaagaacgcgcggacaaggcgcgacatcggcggcgccaaacggcaagctcggcgaaggaca

SEQ ID NO: 633214 - DNA, 117 bp, Homo sapiens
caacgaggaatctgtgaaggagggggaggagaaggcaagatatggacaaattgaaaactacctgcagaccagcagcctcttagccagtgaccaccacctcactgaagaggagcgcaa

SEQ ID NO: 633215 - DNA, 475 bp, Homo sapiens
  misc_feature (246)..(246): n is a, c, g, or t
  misc_feature (462)..(462): n is a, c, g, or t
  misc_feature (465)..(465): n is a, c, g, or t
gcagttttgtccaacgatcaaacatcatgataataattttcctctgggacaagcatcagagaggtttacttccaatctattaagaaagattcaggtttcctgagcctgaggttcttcagctttaccacaaaccactgcattcacaggattaacctgaaatgctcctcacaggacttaggaggcaaggagaaccaacgtaaatatgaagataattgatgcttgctatgttatgagtaataaagtctntaatccctgaggcaggagtctcatatcttttgtcatcagtacaggttgagcaccccaaatccaaaactctgaaatcctaaatgctcttaaatctgacatttttaattaaaacatttttattactagagacagcatgttgcttgcccagactggagtgtggtgacatgatcatatcttacagtgaactcctgctcaacaaagtgagaccatgtctanacnaaaaattaaa

SEQ ID NO: 633216 - DNA, 375 bp, Homo sapiens
cgactctaaggatccccttctgctccctcttcactgtgctgtgaggcacactgctctccttcaaaggctcgtgctggccaggcacagaggctgacacctgtaatctcagcatttatgggaggcgagcgagtggatcatctacgtcaggagtcagatccgcctgagcaccatggagaaacccgtctctaccaaaaatacaaaattaagcaggcttggtggcgcatgcctgtaatcccagctactttgtggaggctgaggcaggagaatcgcttgaacctgggaggcagaggttgcggtgagccgagaacagcgccactgcactccagcccggtcaacaagagtgaaaatccatcttcaaaacaaaaaaaacacaaa

SEQ ID NO: 633217 - DNA, 657 bp, Homo sapiens
gcgtggcccgccctgtgggtctgtgcgagagcgtggcctgcaggtgctcaggtctccctggggaccatgggatgtgcacgctcacacacagacacgcatgggggtcatacaggcacacattcacaagcacatgtgtgcccacacagacccaggcatacgcaggcacacactcacaggcaggtgtgtgaacacaggcacatacagacaagcgggtatttgcacacatggacacacatggatgcactcaggcatgtacacacgtgtgcactcatacatgacatgcactctcacacatgcgggtgcacaccttccccgggttctctccccaccccacgtctcaccgagcaagggcttgtctctcccttgtggcttttgctgtgtggctccccgcacctgaggctgcgctggtcaggacaggttgggccatgctgcggaaacagccaggcctgaacccccaacgactcagaacagcacgggcgtttcttgcccctgttgcgtgtctgttggtgggggccctacccggaggcgtggctgaaggctgcgccttccccagtgtgccggctgctgggcgaggaaaacgagcacggtggagccacacggggcacctgcagctttgctggcagagactcctcgcgctatgctgctccacttccttgg

SEQ ID NO: 633218 - DNA, 1324 bp, Homo sapiens
  misc_feature (849)..(849): n is a, c, g, or t
cagacggtgtccgttcgtgtggggtagggcggaggggtggagggccgtctcttgtggttgcgtattgttttctcttcttccctccacgactgtctgctcgcgatctatagtgctgtttggttgtgtggaggggaggggtgtgtgttctgccctacttgaggtgagtttggggggatgatagtgaacccagtgtagtttgtgttgcttttgtattgtgcccgtcccaatcctacggggggaggtgggttgttttgtttgttgtgtagggtgtgtggttggtttgtttgctcggcgccgcgccggtgtcggccagtcggttggtgtgttccttgccctccatcagagtgagtgttggttctgcggtcagtgcatcaagcgtggtgtgggttgtgtgttagtgagctaccctccccctgccggctgtgtggttttgttgcttgcgtgcggcgatcatgcattgatggttcgttcttcctctgtagggaggcaggggtcggcctccatcagcagatgtattataggcctacgacgtcgttgtgttggtaccgcctctatagtggttgaggcggggcgccaccacgcgatgatgttgtgttgctccacattctcgtggtggtggtgtcgccggcacggcgcgcgaacggtcgttgctgctcccatcgacggcgcggtgtgctccctcacactctctcacacaccgcgcgtgtgtgttttttgtgtgcgcgtgtgtgtgtgtgtgtgacgccccacacgccgtctctctctctggtccatctctctcacgcggcgagtgtgtgtgtagcgcgccacactcgtgctctctatgaggagagagcacacacgcgggtntatagagagaatatctctctctggagacacacactcttcgtcccagcgcgcgccctcgtgtagagagagagtgagataagcagcacgcaccagcgcgcgccccgcgagtgtgtattgtgtggcggcccgccacctctagctctcccacctctctgctgtgtgtgtctcctctcggaccacctctcttccacctctccacgaccccctgcgcgctgtgtgtgaggagaggacgacccacactggataaaccaccctctgtgtgtctctatagtaaacccctgtcttcttctgcggtgtgttgtgtttggtgagagtgaatggtgtgggacacactccctctataaagagagtctataaaacaccacaaggagaaaaccacctgtctttggattgttaaatatatttgctcacacttattttgtatttttcccgagggagagacttctttattaaaattcttaaagggacaaaaata

SEQ ID NO: 633219 - DNA, 545 bp, Homo sapiens
attgaagccttccggaatgggacaagatacagaggtggaggctagtgatattgatgatcttgacactgtgtaggcctaacctaatatgtgtgtttgtgtcatagttttaaataaaaaaggttaacacataaagaaaaaagaaatttttaaataggaaaaagcttatagaataaggatatgaagaaagaaaatatttttgtacagccatacagtgcatcattttaagctgagtcaaaaagttaaaagtttataaagtaaaaaagttacagtagatagattgcctaagtatatagtgtttataaagtctacagtagtgtattgtaatgccctaggccttcacattcaattaaccgctcattgactcaaccagagcagcttccattcctgcaagctccatttatgttaagtgtcctatgcagctgtccattttttaatcatttatacaatattttaatggtatcttttctgtgttgagatatatttagatacacaaatactaaacattttgttacaactacccatagtatccaggtacagtaacatgc

SEQ ID NO: 633220 - DNA, 795 bp, Homo sapiens
agcaatgtgatggtggcatctcactggtgaaatgtcgaatgtgtgtgtgcggtgcctgccgccgaggcgggttccgaagagacctcagcatgggcatggccagggcctacgcgaacgcccacccttaagagcgcggggacatgggaacatggagctgttcctcccatgccccctgacgtctgctggtgcccatgtgtcccctgtccatgtgctggtttggtgctgcactgctgctgtgccccaactctgccctccactgctgtgcgtccccctgctttgtccctgccccctgtgcctgggaagttcctggctgggcggatgcttgtggcctgtggccctgagcggatctgctgtggctcggggctgcgtgtggctccgtgcgtgcgtgtgctgctggtgcctgctgaaggcgctggagctttggggagcggatgcccatggcccgtgcccggcgctggcggccattggaatggggcccatggacggagacgttgggggctggcagcacagggaatagaggcgctaggcaggcgtaaacgcccccggagataagagccccgatgcggcgcaagagagctcaagggatgcacaggggcaaaatcaggtcatggttccggtggcgccgccgaaaagtaccccggggaaggacagggcgggcatgcatacagagctcaggagcgaattcacccgggaaccccgcttgggtggccgtgtattaacacccaagcggggccttgtagctcacctgaagatgcaagagcaaaagaaggactggaagagattgccgggcgcctg

SEQ ID NO: 633221 - DNA, 198 bp, Homo sapiens
gaccgatgagcagtatgacacgagcctacaagatcatcagcactgcctcctgcaccatcaactgctaagcacccctggccgcggtcatccatgacacctttggtctcgtggcacaggctcatgcacacagtccatgccatcactgcccaccagaagcactgtggctggcccctcctgggaaactagttggctgttgat

SEQ ID NO: 633222 - DNA, 140 bp, Homo sapiens
ctacgactgactggtgctgtacacgctgaagcgtgtgcgccatcactgtgcccgggctgcccgggtcatgcacgatgtcttccagcacattctgttcgcgcagcagtcacatgctatgtaccgctatctgagagtgaggc

SEQ ID NO: 633223 - DNA, 406 bp, Homo sapiens
  misc_feature (65)..(65): n is a, c, g, or t
ataaatattatacatttaatataatgtattaaattatatctcttcctcaagaaaccacaaatagngctcccatgtgatccagagttcccactactgggcatctatccacacgaaaggatatcagtacattgaagagacatctgcacccaccatgtttattgcaggactgttcacactagcaaagagatggaatcagtggtgttcagcaacagataagtggataaggaaaaggtgccatatatacacaatggaatactattcagccataaaaaaacatggaatcttgtcattggtggcagcatggatggaactgcaggacattatattaagtgaaataagccaggcacagaaagttcactgcgtgttctcactcatatgtggaagctaccgggttctccatatgagt

SEQ ID NO: 633224 - DNA, 460 bp, Homo sapiens
tcagattatcccgaaaaactggagtccgatgtttgaaggcaggaagcatccagcacaggagatagatgaagtccagaagactcagccagtctgtccttccacgttcttctgcctgttttattccagctgcactggcagctgattagattgtgaccactggattgaggatgggtctgacttgttaatctcctttggcaacatcctcacagacatacatatggaggaacaatactttgcatccttcaatccaatcaaattgacacttgatattaaccatcacaatagctcactgcagccttgactgcctgggactcaagtgatcctcccacctcagcctcccgagtagctgggaccacaagtgtgtgccacgcccagctaatttattattattgtttattttattttttttagaaatggggtatcactatgcttcctaggctggttttgagtgtgattctgg

SEQ ID NO: 633225 - DNA, 714 bp, Homo sapiens
  misc_feature (40)..(40): n is a, c, g, or t
  misc_feature (74)..(74): n is a, c, g, or t
  misc_feature (91)..(91): n is a, c, g, or t
  misc_feature (98)..(98): n is a, c, g, or t
  misc_feature (105)..(105): n is a, c, g, or t
  misc_feature (109)..(109): n is a, c, g, or t
  misc_feature (119)..(119): n is a, c, g, or t
  misc_feature (126)..(126): n is a, c, g, or t
  misc_feature (128)..(128): n is a, c, g, or t
  misc_feature (132)..(132): n is a, c, g, or t
  misc_feature (146)..(146): n is a, c, g, or t
  misc_feature (162)..(163): n is a, c, g, or t
  misc_feature (170)..(170): n is a, c, g, or t
  misc_feature (179)..(179): n is a, c, g, or t
  misc_feature (187)..(188): n is a, c, g, or t
  misc_feature (193)..(193): n is a, c, g, or t
  misc_feature (196)..(196): n is a, c, g, or t
  misc_feature (207)..(207): n is a, c, g, or t
  misc_feature (223)..(223): n is a, c, g, or t
  misc_feature (238)..(238): n is a, c, g, or t
  misc_feature (250)..(250): n is a, c, g, or t
  misc_feature (260)..(260): n is a, c, g, or t
  misc_feature (297)..(297): n is a, c, g, or t
  misc_feature (301)..(303): n is a, c, g, or t
  misc_feature (339)..(339): n is a, c, g, or t
  misc_feature (347)..(348): n is a, c, g, or t
  misc_feature (366)..(366): n is a, c, g, or t
  misc_feature (714)..(714): n is a, c, g, or t
gactgtcggatcagaagtccaatggagctgtgggccaggnagtccttgcgaccgatgttgctgacctgcttggnctgcatagcctcgggtntgggggngttagtnattngttgatccangttcccncngatngtacagctgcgttnttttccaatgttcagnntggtttnatccccgcnatgtagcnnctgcngcntgggtggtatnttttgtttggtttttngcagcagcgctttgnggtccattagcnctgattcatnacacgctttgttgatgaaggtagtggcgatgtctgtntttnnngagcgctcggtgtggccaatccggtgtacatagttnttaatctnntctggtatgttataattnatgatgtgctggatggtagggtagttcaggtccttggtggtaacgtctgttgctactaggacatctttcttgctctctcggaatgtttcgatggtcttagtccgttcttcctggtctttgttcccatggatggctacggcctcaacccccttgagcagcaggtactcgtggatggcgtccacgtctgccttcttctctgcaaagatgagtacaggcgggggtgtcttctgcaggcactcgagcaggtacaccatcttggcctcctccttcacatattctacctcctggatgacatccaggctggcagccccagcgcgccccacattgatggtcacaggctttacaagn

SEQ ID NO: 633226 - DNA, 270 bp, Homo sapiens
cattcaaaattaaatatccatctaataacttttcgctgctctaaaatgtacctgaaatgtaaaagagggtcttcacaaggtaggtattatcctgaacttgacaaagaaggcaatccaacttataaaaacaggaaaccaagcacacagggcagtgcacagaccataatctcactctcttggagtctagtgcgcccttcccctcttttgtctgtctcccagtcagcagaaacacagctagctgtagccctgggccaggtccctcgtcgacgc

SEQ ID NO: 633227 - DNA, 506 bp, Homo sapiens
ggagcggccgtcatttttttttttaatttattattttatttatttattattatactccatctcactctgtcacccaggctggtctcaaactcctggactcaagtgattttcccaccttgaccccccaaattactagggatcatagacatgagccaccacacttggccactccatagctttttaaggtcttgtttataatggagtggtctggcaagctctgttgtatacatacaaatctagttctcctgaaaagtctcacagactgatacttttgactcttaagagaaaatgacaatgaactagaaatcatttttttttccaagagctccatcttccgtagtatagaaaaaaataattgattacattagcttcatcagtgtaccttttgaattgaactatatctcctaacacaaaactcagagactgatgaaatgccaaaagaatttgaaggtgacgccatgttatctccggatactaaaagatagagagaggaaataattatggca

SEQ ID NO: 633228 - DNA, 269 bp, Homo sapiens
ctagaggttcccgagctgatacacccgaaggagattattgtcttcccctctttccaagagctgagacagaagtaccacgtgcgatccattccatccgaaaggatgatgaagttccaggttgtacgtggacactataaaggtccgcaaattgggcaagtagtcccggtttaccggaagacatatgttatctaccttgaacgggtgccgcgggaaaaggctaatggcacaactgtccacgtaggcattcaccccaaccaaggtggtataag

SEQ ID NO: 633229 - DNA, 187 bp, Homo sapiens
  misc_feature (69)..(69): n is a, c, g, or t
acgtgtgtttgcagcatgtgcgagtgtgtacgtgtgtaaatgtttgggtgggtcttggtgtgttagccnccttctcatcggaagagtgagttctggatgtggaggaaccagtaggagacctggttgtttggttcccacaatagtttcaattttagttgcccatattaaaaaatctagacatatttca

SEQ ID NO: 633230 - DNA, 139 bp, Homo sapiens
aggggaaaacaacggccaggaaatccccaatcttgggcttggcggtttccggggggaaaaccaccttcaagaaaacccggagcttgggggcggggggttccgggggggaaaacaaccttggggaaaacttggaatttgg

SEQ ID NO: 633231 - DNA, 412 bp, Homo sapiens
cctatgtggacgccagtttctgtcctgacattcactagcagcttgaacttcattctgtggtttacttctgtgtcctccaattttcttatccataaggcaggacagaaacagatagtccacctcttagagttattgtgagaccacatgagtgaaggcctctcaatggctgtaagtaatcatctgtagtcgctgttactatttgtataacttgcacaaagttatatatttctaaacatttataattgtgtggaaatatataggaaacagttaaaaatatggtaaactgaaaaacagtgccttctagaaaagggacaggggttggggacatggagggcaagatataggaagctacttttttccatctttttttaatgtattgtggtttaggaccattatctatgatgttgctctt

SEQ ID NO: 633232 - DNA, 299 bp, Homo sapiens
ggtcaatgtcacagtccaggcccttggtggagatgtgctccatgaccatgtcgaggacaatgatggtgcctgtgcggccgatgccggcgctgcagtgcacgatgatgggccctgcgtaggcaaactttcctgccgctggttgatctggtccaggaagctggggacaccccaaggctcagtggggacccaatggtcgggccagctaaggtactgggaatgccaaatctcccgagtcaggtctccattgcccagcggggaaacctgtaaggtccggagcctagtttcggttgtgtcatgct

SEQ ID NO: 633233 - DNA, 201 bp, Homo sapiens
gtttcaaaattttctttttgattgatttttgaaaagaaacacgcatggcaaagagttatttgcatttacatgttctctgcagcattatgcacaatagccaagatatataatcaacctatgtgtgtatcaatggataaatggatttttaaaatgtggtatataaatgcaatgaaatgctattcagccttagaaaaaaaaaaa

SEQ ID NO: 633234 - DNA, 136 bp, Homo sapiens
gctcatagaaagcagacagcaatgttagtgtaccagctttaaataacttacaaagtcaatgtcatgcaatgtaagtgctatctgaaagccatcacttcagtgtttgctagcagcccccaagctggtgataaaaaca

SEQ ID NO: 633235 - DNA, 153 bp, Homo sapiens
tctgattctatagtctttgtcatgatgctagaaacaaactgctggctgtcttgggatgcgcccagctttgagaggccactaccaccatgaacttctgccattcactggacatgaagctgaggacactgggcttcaacactgaggggtaccgag

SEQ ID NO: 633236 - DNA, 453 bp, Homo sapiens
aagtttttatttgcataaaaaagaaagaagccggctcatggccacgtttactttcacagaaaacaaaatgcccatggttaaaaacagattttaatcgctggaaggatgaggatgactcagaacctgatatggatggaaataacttctcaaatatgctgtctcagatgtccaattttggtgactatggaggtgatgatggtatagacggtcatctagattctgacgatgaagacctccctgatttggaaatgccaaatgcagatgctaacaaatctgaagaaaatggaaccgaagaagaagccgaaaaaaagacacctgaaaaggaagcttcatcagctaattgagaaatgacctatcattcactcggtggttgtttgtctgtgagccgcctgtatatgcgcattttacactttcaccattgactatgttcttattacagccttttacgaggta

SEQ ID NO: 633237 - DNA, 323 bp, Homo sapiens
tgcatgattgtggggctccccagtcacgtggaactgtagtccagtaaacctctttctttcgtaaattgcccagtctatgggtacgtctttatcagcagcatgaaaatggactaatacaccgtctctacaaaaaaaattaaaaaattaacccggcatggtggcacgtgcttgaaatcccagctattcgcgaagctgaggcatgagaatcgcttgaacccgggaggcggacgggtgccgtgagtcaagattgtgccactgcactccagcctgggtgacagacgtgacgacctcccgtctccacacaaccacacccggggctcccc

SEQ ID NO: 633238 - DNA, 135 bp, Homo sapiens
cagtatgacatgagcaccgcggccggctgcagctgtcttttctaatgtcactagtacttttaatgatcagcattccaccgtgcttttctttttttctttagccccagttttaatttattccctcatgtcatacat

SEQ ID NO: 633239 - DNA, 788 bp, Homo sapiens
tggaaaccagccggggcgatttagtgaggccccatctcaaaaaaaaaaaaagggggggggggggaattgggctctgtttgggatgggcccggcccccaaaaaaaggggacttgggcccggacaggtggctttccacaaggcttggctttggcgtcaaaattgaagaagatggggggggtcttgtcataccctgtttcttcatacaagactccctatttggatgtgtaaaaaggtagctaattacctcacattgtcctcaaattcccagggtacgccatgtgataagacgtgggggtaacaagttgagcatgtttgccccaggattccaaatggtgcgtgtcctgcgacatgtgggaaagagacttaaggggcacccagtgagaagggcactgattcctgggctttaataagcgccacagggtcttcctagaacattttcaggggctttggctttgcagggacagtagaactccccaaaaaaagaacacaatttgggccttcttaaaaacattcagagacatctctcaaccggtgtgttttttaaaaatttaaactctcttccttttctttataaacaaaataaacaaaacataaagcaacacaacgctcgggggcgactctctagtgtggggggccggcgagacagaaagggggttataggaaagggggccctgtgggctactacgtggtgttctgttgaccccagttttttttgttgtcccaggggggcaatctggcgggggccccaataaggagaggcataattcgaaaacagcggtacccggtga

SEQ ID NO: 633240 - DNA, 111 bp, Homo sapiens
agcactgtactagcactattattattataattattattattatttgagatgagtctctgctctgtgccccacccgctaattttgatatttattttatctatctattatttt

SEQ ID NO: 633241 - DNA, 165 bp, Homo sapiens
gggagttagtgagagccacatttcagttcagggctgtgaggtgctgtcagaaagccgcagagagcaggtcggcgtgggtggtaacacatccagaggtcaggcacagcaagacctccctctttgtctccacagactccaacttaaagaccacagccacacagtcgg

SEQ ID NO: 633242 - DNA, 239 bp, Homo sapiens
agtcatggatgtcgaaaagtaggtcgtgtcatggatgtgttacttcatcctatctatcattaacatccatggcacaaagttatgccacacgaatccagcagcggttgaactcagaggagaaaactaaatcagtagagaaagtataaaactgcagaaataggaggtggatgggttctgccttaaatagggaggactccaagccgggaaggaacatacccttttccaacctgtatcaattt

SEQ ID NO: 633243 - DNA, 255 bp, Homo sapiens
gaaacaataatcaacgaatgaaaccccaaaattccaggtcgacctgtccttagtcgaggagatgttcctggcgtttagagaaagggtgaatgcctctcaagaagtggagccagtagaacctgaaaactgccaccttatcgaggaacttgaaagtggctctgaagatatcgatatactccccagtgaactgtctttcatctccagtgaattaaaatacccaggcatgccaaacttcgcgccagatgaaccagggaa

SEQ ID NO: 633244 - DNA, 933 bp, Homo sapiens
  misc_feature (346)..(346): n is a, c, g, or t
  misc_feature (356)..(356): n is a, c, g, or t
ttaggtacaccttgacaatatactgtgggtagagaataacagtggaatttaccaaagtatttagatcacaacatgctatggaaagaaatgttagaatatggagatgcaacatgacagacccgtacattgtggttgttaacggactaccattatcagcacgaactgtactttatattgaagagaaacagaggattatcctatttatgcacacatgacgaaatactgaaaaaggtttaccgcatcatgccagccctactcaatctaatctctttctgatggaatatacatccatgataagataccagcaggacagatgctggcattggccacagaaattcataatatngtactcatcncacttagtaatagtatgactaatgaacacccattctaggtcaattatgacctttttttattacacacaacttggtcatttccttattaggcttattaaaatcgatatatatttcatagaaagttattataaaagaatttctaaacttgcttatccttggcctaccccattaagagggaagctccatacaaggtgattattcaggattcaaggatcatcgccactgattggcatttagggcacagacactactattaaaaaatgagaggctcactctattgtgtaactggcgtgaaccagcactcactagggaagactactagagaactttcaaacgtttttgcatttcatagaggaggctacacagatgtatttcctatcccaccaacctgcgtgacagtaaagggggggaactgcttgacgcaaccccgccgacttttagaccgcaattcagcacatgttatgacacggaccgagtctgatggttccgaaacaaccatatttcaagactgtcgacagtgtctcagcaaagaagatctggctccctccctatggagatacatcggcccacgtcattg

SEQ ID NO: 633245 - DNA, 1346 bp, Homo sapiens
  misc_feature (1146)..(1146): n is a, c, g, or t
  misc_feature (1157)..(1157): n is a, c, g, or t
gcgactgcgcgcgcagggcctgagcgggcgccggagggaaggggaagcggcggggtagtaacagattatgggcaacagtccttttaattaatctaccgtcatcatggctaatgaggactgtcccaaggctgctgatagtcctttttcatcagataaacatgcccaactcatcttggcccaaatcaataagatgagaaatggacagcatttctgtgatgtgcagctgcaagttggacaggaaagttttaaagctcatcggctggttttggctgccagcagtccttactttgcagctttgttcactggaggaatgaaagagtcctcaaaagatgtgtaccgattctaggaattgaagcaggaatctttcagatacttctagatttcatttacacaggtatagtgaacataggtgtgaataatgtccaggagttgattattgcagcagacatgctacagttgactgaagttgttcatctttgctgtgaatttctgaaaggacaaattgatccactgaactgcattggaatttttcagttctctgagcaaattgcctgccatgatctcttggaattctcagaaaactacattcatgtccatttcttggaggttcatagtggagaagagttcctggcacttacgaaagatcagctgatcaaaattttgcgaagtgaagagcttagcattgaggatgaataccaggtcttcttagctgcaatgcaatggattctgaaagatttgggaaaaagaagaaaacatgtggtggaagtgctagacccaattcgattccctttattacctcctcagagacttttaaagtatatagaaggagtatccgattttaatcttcgtgttgcattgcaaacacttctgaaagagtactgtgaagtatgcagatctcccaaagagaacaagttttgtagttttctgcagacatctaaggttcgacctcggaagaaagcaagaaagtacctgtatgcagtaggtggatatactcggttgcaggggggtcgctggagtgatagcagagccctcagctgtgtagaacgttttgacacctttagccagtactggaccactgtgtcttcacttcatcaggctcgaagtgggctgggagtaacagttctgggagggatggtctacgctatnggaggtgaaanggattcaatgatttttgatgtactgaatgctatgatccagttactaaacagtggacaactgtagcttcgatgaatcatccccgctgcggcttaggagtgtgtgtgtgttatggggccatctatgctttgggtggatgggttggagctgagatagggaacaccattgaacgatttgatcctgatgaaaat

SEQ ID NO: 633246 - DNA, 212 bp, Homo sapiens
gtcagttcctgcacttctgtacacatagcctggaggtaatctatacaatattttcagtaatattgtgcgggaaacaaggttttcaccgcactgactgtgacctgtcacaagaggtcaggaatggaattttcttccactgctatcatgtcggcgctcaaaaagttgaatttgggagcatttaggatttgggattttcgggccaggaaacaaga

SEQ ID NO: 633247 - DNA, 1022 bp, Homo sapiens
  misc_feature (822)..(822): n is a, c, g, or t
  misc_feature (833)..(833): n is a, c, g, or t
ttttttttttttatggtaagccaatgtttgtttttattttattggccattttgtcttcctacttctctaggtatagtgaacataggtgtgaataatgtccaggagttgattattgcagcagacatgctacagttgactgaagttgttcatctttgctgtgaatttctgaaaggacaaattgatccactgaactgcattggaatttttcagttctctgagcaaattgcctgccatgatctcttggaattctcagaaaactacattcatgtccatttcttggaggttcatagtggagaagagttcctggcacttacgaaagatcagctgatcaaaattttgcgaagtgaagagcttagcattgaggatgaataccaggtcttcttagctgcaatgcaatggattctgaaagatttgggaaaaagaagaaaacatgtggtggaagtgctagacccaattcgattccctttattacctcctcagagacttttaaagtatatagaaggagtatccgattttaatcttcgtgttgcattgcaaacacttctgaaagagtactgtgaagtatgcagatctcccaaagagaacaagttttgtagttttctgcagacatctaaggttcgacctcggaagaaagcaagaaagtacctgtatgcagtaggtggatatactcggttgcaggggggtcgctggagtgatagcagagccctcagctgtgtagaacgttttgacacctttagccagtactggaccactgtgtcttcacttcatcaggctcgaagtgggctgggagtaacagttctgggagggatggtctacgctatnggaggtgaaanggattcaatgatttttgatgtactgaatgctatgatccagttactaaacagtggacaactgtagcttcgatgaatcatccccgctgcggcttaggagtgtgtgtgtgttatggggccatctatgctttgggtggatgggttggagctgagatagggaacaccattgaacgatttgatcctgatgaaaat

SEQ ID NO: 633248 - DNA, 191 bp, Homo sapiens
cggggccagagactggagagaggagaagcgggagtcccagctgagttcagcatttggacccgggaagcaggcgctggaggcctctccatcgctgttgagggccccagtaaggccgagattacattcgatgaccataaaaatgggtcgtgcggtgtatcttatattgccccagactctgggccccggggtac

SEQ ID NO: 633249 - DNA, 238 bp, Homo sapiens
tttaaaaaaaaaattggggatttttaaagttgaatttattggcttttttgatccagttttgtttggcccaaaaaccagtattggccaaagtattaagcatatttttttatttttactaaaatgggctggggggcctttggataataaggaaaagtttaattttaaacccatgttttttccagtataattaacatgttaaaccatgggataaatgcccccaataaaaatttttgcctta

SEQ ID NO: 633250 - DNA, 460 bp, Homo sapiens
catagcaccacgttctaagaactcacaaggttatgttaccctcaaaaaaatcctaggaacaattataattcccatatttcaaaatagaaaaccccagtgcacagcagcaatgcagtctgcccaaggtcatactacataaacgaagaggtgtcaaccaactccaactggggctcttaaccactcaccaaactgtttctctttctgtgccatgttacagaagaatctacaacacactgaatgaagaagaaatgctgtgggatagcatgtgtgtttgaattgaacattaccatttctatttgagaaaaatattttttctttgtgtgtgtgtgtgtgtgtgtgtgtgtgtgtgtgtgtgtatatatatattttatgcacccaccatttattgggtgcctgtgtgccctgcatctcgggtgtgaagccagtccaccggggctctgttctcgcaagctgttgtgtg

SEQ ID NO: 633251 - DNA, 190 bp, Homo sapiens
ggagggcccgagtaaacgtcttcatgtaccaggctcctgaaaactacggccatggaagcttggagctgctggcggatgtccagtttgccttggggcttcccttctacccaggctatgaggggcagttctcttctggaggagaagagcctgtcggtgaaaatcgtgcagtacttttcccagctggctcaga

SEQ ID NO: 633252 - DNA, 432 bp, Homo sapiens
tgctgtgactatattgtgagttacaggccttgcaaatttggcatctcactggtacaatacaacaaccaagatatataataactgtacagtgcctagacttccagtaagaaccattatatctttaactgtagagtgattaagtacatatactacaaggggcagtaaggtaagtaattctatagggtatgtcccgacataatatacaagatgtacaataccacaaacaacttcgttaaggccatgtcttatttgctgataaatggacaaaaggcaatgtaatgtatttccaagtactgccttgacagtctgtgctcataacaatcatgacaagtaggaaagactgtcaagtcactgcactttcaaatatatcttagacaatcgtggtctggacaagactacaagtcaagtataatcttaaagcaatcagtggca

SEQ ID NO: 633253 - DNA, 108 bp, Homo sapiens
gaagtgggcagcacagcccttctgaagtgcggcctctcccagtcccaaggcaatctcagccatgtctgactggttttacttgtccacaagtgagaagcggactgctca

SEQ ID NO: 633254 - DNA, 90 bp, Homo sapiens
actgaggacactgccgtttattactgtgcgagagataagttgtattgtggtgtgcctcctgtcatcctgggggactactggggccaggga

SEQ ID NO: 633255 - DNA, 107 bp, Homo sapiens
atcttgatgctgcgtgtgtcccatgagatatccaagtagactatccagctggccagtatctgtattcgtctacttggatatctcatgggaacacattatggagggga

SEQ ID NO: 633256 - DNA, 1384 bp, Homo sapiens
aaaaatggagattctccagggacccttccgtatctgcctaggcattttgctgtctcctcctaatacgctgttgctgtactggacacttgctcccatctactctcttctctggaatccacggggattcctaaggatgtcaccacagtgttggccagatgcacaggtcacaggggactgaacctcatcaccccacaaacataccattcaggttttgccaagaatgacactgtaaatgtaacaaagcttctgtgcttgttagtgaacaccaactcagctcctctcctgtattcagaaatcaggatgagatgaaaacaacaagcaggccaggcacggtggctcatgcctgtaatcccagcactttgggaggccgaggcgggcggatcacctgaggtcgggagctcgagaccaccctgatcaaaacagagaaaccccatctctactgaaaatacaaaattagccaggcgtggtggcaaatgcctgtaataccagctactcaggagctgaggcaggagaattgcttgaacccgggaggtggaggctgcagtgagccaggatcacaccactgcgctctagcctgggcaacaagagcgaaactctgtctcaaaagaaaaaaattaaaaataaaagaacaaggaaacaaaagtaacaaggcttgaagccagatgagcctgaatctaagcaagaaaagcccagaagaaatcccattttgggtcactggctgcatggtagtaataccatacacataagggaagagaggaggatgtggctttcactttgaattttttgagcttaaggtaacttttgcgtagctacaaagaagaattcaacagagatttaaacctacgatggaaagactgaaggggtccaagctgtagagaaacaggactgcaaaccacaaagggcagaatcagtcaaggagagcttcagggtgggatgaacagggaccaatggaacatttggacaagctgttgagaagaaaggaaaattcagagaaaaagaactgtcagtgaggtcataataggaactgttacagtgaactaaatatggcctgggaaggactctgtacttctagatttgagtccctgtggacgaactgcaacctaacttaataggtagaaagactgataacctaactttggagtatgcacctgtaactatagctgagtcctggccaatcccaacagccaaacttctgccactcacacactgctgagtgttcagctgtgttcaaataaggcaaatgctgagcaccgtaaccagtccagttgtttctggacctcactgctgagaactgtaacggacccagttgcttctggaccttactcctcacttcagatttctgtacatcatgttccctttattacctataaatcttccaccatgt

SEQ ID NO: 633257 - DNA, 148 bp, Homo sapiens
agagtagatggacagaggctgaggataatgtcattatttagactctgttctcaagaatcagtaggttctatatgccgtatatgttagatatcttctacttggcgaatactgccagcaataactaataagtactcaccaccattcagcg

SEQ ID NO: 633258 - DNA, 271 bp, Homo sapiens
agagccatatctttttcaacagagatctttaaagatttggataccgcctattttggttatatctaagaaattgtacctccattgcattcacagacacgtttggcctagacacaagattatgaaaaatcctcctcctcttaagttggatccgtaacatcaagcaacttttggaaatgatattgtttaacaaaacaaatggtttggtagaaatccatttcaaaagcaatgtttcttccacaaacaaaactctcgttaaacagaagcatcttgg

SEQ ID NO: 633259 - DNA, 887 bp, Homo sapiens
caggtgtttgcctgagatggcccgcgatatgactctgccgatacccgataacgtggctcgtcaggtttcccgtgccgaagtcgggaccgtatttttgtggtcggcggcaagctgctctggctgtgtttgctgggcgtcgcggtactgctgccgctgctggccatcttctggcgcggcttcagcagtgaagccgggcagggcggtggcctggtggcggcgcgggaactggtcaccagcgacaacttccactggttgctgggtaacagcctgaaggtttccggcagcgtggcggccatcgtcgtaccgttggcctacctgtttgcctacgccctgcaacgcacgttgattccgggcaaggcgatctggcgtggcatgtcgctgctgccgttgatggcaccgtcgatgctgcccgggattgcgctggtctacctgttcggtaaccagggtatgctgcgcgggctgctgtcggacaacatctatggcttctggggcatcgtcctcggcgaagtgatctacacctttccccatgccttgatgatcctgttgtcggcgctttccctggcggatgcacgcttgttcgacgccgcatcgagcatgggcgcgagtcccgcccgggcgtttcgcagcatcacctggccggcgacccgccaggccgtgtttgccgcgttttgcctggtgttcaccctgaccatcactgacttcggcgtgcccgtggtagtcggtggcgactatcaagtactggccctggaagcctacaaagccgtggtcgggcagcaacaattcggccgcggtgccttgatcggcatggtcctgctgctgccggcgctgttcagcttcggtgtcgacgcctggctgcgccgccgtcatggcgactccatgagcggccg

SEQ ID NO: 633260 - DNA, 231 bp, Homo sapiens
  misc_feature (10)..(10): n is a, c, g, or t
  misc_feature (19)..(19): n is a, c, g, or t
  misc_feature (135)..(135): n is a, c, g, or t
ggcacgagtntgccatgtntggagagttttggttgttgcagctggaggaggtggtgctactggcatctaatgggtagaggccacggatgctgctaaacatcctacaatgccccggacaacaagacaaagtaatgntccagccccaaatgtcaatagtgctgaaagtgagagaccctgattccatcttagagcttagagatcatccaagcacatttggcccaaattgttttt

SEQ ID NO: 633261 - DNA, 119 bp, Homo sapiens
tttatagtgctcctactaggtgctacttactttaggggcactcttaacaagttcttgttgattcacagatctaaaattgattaatgaagttttcatcattgaaatagaccgctttaccg

SEQ ID NO: 633262 - DNA, 452 bp, Homo sapiens
  misc_feature (28)..(28): n is a, c, g, or t
  misc_feature (32)..(32): n is a, c, g, or t
  misc_feature (34)..(34): n is a, c, g, or t
  misc_feature (110)..(110): n is a, c, g, or t
atcctcggaaggcaactgcaacagcttntcananttgggcataccagaagcttcactgagaaaatgatgtttatattatgacgagtatgactcagctagactcgagtgtngggggaagaacaacatatgcaaaggcccagaagaagtgagaacacggcatatttggggatgctcacaaaagctaagtcagtatggctgtgtgtgttactctagggttagggtggggtactcaaggatgacccgagataaggctagagaggaagggccaggtcacataagatatgttcgagaatctgtctccctccctgccaccaaaaccttgtcaatagaaagagttgggaccatatcctgggatatgcaccaaactattaaaggtagctttccctggggagtgagagtgcatagaggtggagggatttcactttattaaatattcccatgctggcatggtg

SEQ ID NO: 633263 - DNA, 1336 bp, Homo sapiens
ctgtgcctgtgtttactgctcgtgcttctggtatgtcggggctccatacacggtttgattccccccccgtgtgtttcacaacctacgaggtttccccctcgttctccttgggggttttgttttcccccctggctttttttttgctcactgtcattctccgtccctcttctcattttttatcccccgggcccgccccgtgtgtgctcgtacctcgctcgtgtcccccttagggtgtcccttatttcccgccccccccctggtgggcctcaagggaccccccctgggccaaaaacccgtatatttttcttttccccacgtgtggccccccttttttctctcccctttgtgtggggtcttttctttatagccctccccaagaaccttgtttgtcgccccccaagaacccaggtgtgttacccgcgccccagatctcgcgcccccttgaggacccagccgttttgagcctgttctcgcccgaggaaaggtggtccccctctgcacccgccatttcctcttcgccctctgtcccaacctctgtgtaaggcttatatctgccccgcgttccccccttgagggtttgcgccctcgccccacctcccccacaagggggatattggtgccgcgggagttttggagaagagaaccctcgttgcgccacgcgctctctcttgtggcccctcgttggttccccgctctccccgcgccctcgcccccgcggagaaggcccccggagactccgcgcctctcgcccccaagggccccctctctgcgcgtatgtgtgcccctcttctctctttctgagagggagaattgggaaaattttttgttcttctctggggtgccaccgctaaagggccacgcaaaatgtgttcccccccgagacaccccacgctggtgtttggagattttttaacacactccaccccgtgagagttctgtaaaaaggagccccccaccgcgtgttgtttttctgccacgcctatttttgttctaagacctcttggccacgctcccctcgggccctcggaactcgagattggaaccacctcttgttttttctcccctcgggccactcttatccctctccaccctcttccactcctcgcctctttacccaccccctggagtgagatggagttttgtaatttctagctcgttgtattttgtgaaatttgttaaattttgttgttttttctgtgaaaacacacacaaccacttggaatatatgggaggtaaaggagtgtcccccttgctcctggtcacctccccttatagcccttactgtcttgtttcttgtaaactccggttaggttttggtctctcttgctccccccgc

SEQ ID NO: 633264 - DNA, 274 bp, Homo sapiens
ccagctctactaaagatcattgagacacttctcgactagtatacaatcccatcgataggcattgtgcgtcacactagtgcagtcatatatttctcactgtgatatttaagctcggacccgaatatttatctgtccttcaaattcactgtgcccactatatgcttcgaaaggcctcatccctctgtttcagccctgagagaggagccatgatccttgtttggtctagctgaattctgttaggggagtgtgccccatctcatcatttcgaagatag

SEQ ID NO: 633265 - DNA, 258 bp, Homo sapiens
  misc_feature (10)..(10): n is a, c, g, or t
  misc_feature (49)..(49): n is a, c, g, or t
  misc_feature (61)..(61): n is a, c, g, or t
  misc_feature (63)..(63): n is a, c, g, or t
  misc_feature (121)..(121): n is a, c, g, or t
  misc_feature (229)..(229): n is a, c, g, or t
  misc_feature (236)..(236): n is a, c, g, or t
tactgtgacntcaggacacctcagctatttaatacacttcgcatccttngtctccatcagngnccactctcagtctggaatgactaccctgaagacaaatatcatactgtgagtgttcatnaaatgataagtattatcatcttcaaggcataacctgagccatgaagagcaggtagagctgagattggcaaatcagggagaacgctggcctcctgcccttccctgtgtnctctgcnctgtcttgagactcaacaagtc

SEQ ID NO: 633266 - DNA, 572 bp, Homo sapiens
tcaataggtgcatctcgattcacgaaagtactcatcaagtaggagcgtccagaggaacgttggactgacggtcttgaagacattgcaaaccagtcaagcggacccgtaaaattattcctcagagaaccaataaagaggtggaagaaggcgctactgttgctacgggatgaccgggggagccggaatggggagaggcgcccgtggtcaccagactgcaggtgtactagggttacagactcatgataccgtaccccagacagctgcatacattaaatgttcgaggcacttgagtttgttgaagtccgggggccgtctaaacaggctgtagagggagagcaagtaatccgaagacataggatctcttgctgttgcccaaggtggattgcatcgacatgatcttgggtcaccgaagtctcgatctcccaagtatcgaggcaccataagtgatcctgaggtaatcaggtgattctttcacctcagcctcttgagtaagctgggaccacaagtgtgtgccaccacacctggctaattttctttcttcttgatagagatagggtcaccccatgtggccc

SEQ ID NO: 633267 - DNA, 117 bp, Homo sapiens
ccgagcgctccgtaactgagctcctccgtaagagcgctctagaatggtttatattgggatcgcgatttttcttttcttgtgtggggctgttacggaggcgtcgttacggaggcgctc

SEQ ID NO: 633268 - DNA, 825 bp, Homo sapiens
agaatggggagaaggttatgagaagagcattattaagttaccaaatataactttgaattgccaaattgtacacctcagcaatgaagaatcgtcaattttatagagaaatgtatgataaattataagagatgtactaaagtgataggatagatttttgtattggagtttgcaagagatgcggattatatttgataggctatagtatgtagatatgccttcttaggaactattacagactgtaaatttatacttgagacttggcagtatctaaatgcttatattggttttaactgaaagagttatggcaatcgtcaaggttaatgggaaatatgtttgtaatatcccacaattcagagttttgaaaagactggtcttccaatgtgtaatttatagatgtcggtcactgtgttctatagcattaagatatgataaattagaccagttgggcatcctggtccttttgctaactgttccttggtgaattctgagcatttattctgatgacttaatatttttcactacctttggagaacagatgaacattgattcaccgatgaatggatctatactgtgtggtcatggagtggtgtatacttccataacactgtatcttgcttctgtcagtacccttaggagtacactttaaaacaccttaaggtctgagtgttatggcaagaaactactttttcagacctaaataggaccgatgtaatttctcaaagggtgattgcaacaggttagcccagaacttagttgtggggctaatgtaaacacatcgggtcaacaatcaaagtacacactggatttcacagacacaacaacacg

SEQ ID NO: 633269 - DNA, 415 bp, Homo sapiens
tgggtgaccttttcactagtgagcccttccttgtctatcgcatattgatcacggccagcctcaggatcaatcaccataacgtgtggcctttatcggtgggccaggaatggcagctggtgacaatgactgccatttacttttcattgtggcttatttaactcagcctctcagcaacctatagatgtaggggttaccacccccattatcacagattaaagaactgaggcccatggaaattaaggaaaacttgtccgaggacttgagctggtgaacaccaggactcccaaatgacagtctctttcctcctttaaccctgacttcctgtttaaactcaatcaaatttaccatcagtatcctcagtactctttggaaacaggcaggatacagattaatagccaggccaggcatatagtag

SEQ ID NO: 633270 - DNA, 225 bp, Homo sapiens
cataacagtagagacatgtcataaacaccagcacaggagacactgggtcccagtgcacattgcatgggtatactttgtgcacggactggcacgtgtcaggaaaatttgaagatcttgaagttactacctttgaaaggttaatgcagcatcaagttacactgggcagctgtgtaccccagaccgggccgtgaatcaccaccattgaagtgtgcgccggtgtgggca

SEQ ID NO: 633271 - DNA, 435 bp, Homo sapiens
gtctcctgtcatcttgtcgtagctgtctcccgcgttgccggctggccactgtatccgcttctccgagtaggctgtctcgcctcgctctcctcatgctattcgttcctgaccctctccacaggtggccggtcttccgtataaaccctatgctctgatcagagctcagcacgcatctcatccacaggatgggattagcgctcttcatgacactaccgagcactccttaaaagtcaccgtaatacctaatcaataccatacggcttagcatttaattattatctatattgctttatgtgtggaataatggaaaagaattaaaagatcgaaaaaacaaacacccacctcactccacattaggtgtgtcaaaatctgagctgatgagaggccttccccaccaaagctctgagcaccaaatgagatgatgtagggaagcat

SEQ ID NO: 633272 - DNA, 82 bp, Homo sapiens
agcggagtgcccccggcggcccgggagtggaatcttcccccaaatgcgcccgcctgcatggaacggcagttggaggctgcgc

SEQ ID NO: 633273 - DNA, 898 bp, Homo sapiens
gatccgcttccggagtcgaggtttcgggcttgtacccgcttggggggcgcctgtgtcggttgcaggtctttctgtgtggttctcttgccctgcaagggcctgtagagctgggtgctgtggaggagttagcgggggctctccggagggagagccggcacggcctggtggcacctattggttcccacctacaaaaaattctccttcttgaaagggcctacacttgtggcgggccccatttaaactcattccggccttttggccctggggtttggctttgcccccatttcggcgcggtccaaccggattgggtgcctgccccacaaacaagggttgctcccagggagaatgggccgtgtccgaaagaaagcaaggtggcgcttctattattgatccacatttgtgcccagagccaggtcctttggaacgaaacaatcctctggtgggccttcaaaacctaagacgagggattcgggcacatgtgtgtcttgggtctgcggggcgccacaaccttttttaaagcgctttatgttaaacaacgcttctggtcccggggggggggttttatcccctttctgggcattcctatttggttgtatcacaaatttgttgaggacgattggcgagaggaaaagggtgcaccggtgaaggtcttgggtaacgtttcttcaagagaaagcaggtttgcagacgcgttagaggacttacgaacggctacagacaacattaattggggtggcttgagtggacgccaatagcgtgtgggacaaaggtccaggtcttttggaacactggagggctttaattggtgaggttggggtccataatggggttttctaaaaaaaaaagaaacaaaaatatgtgtgcggtggctagggaatttaaccattgtggcggcaag

SEQ ID NO: 633274 - DNA, 134 bp, Homo sapiens
aggttgaggagggtcagtggtctgctgctccgtatcaagatagctgtatgttgagactctcacaaggccagatctgccgagtgcctgtcagatcccagttctcatctgagggctgctgcacctggaggccatca

SEQ ID NO: 633275 - DNA, 461 bp, Homo sapiens
  misc_feature (93)..(93): n is a, c, g, or t
cggcttctccttcttaagggttgggaaggtctgggggcaactctggggctcccctggggtggaaggagcctgttccagcacccttttcccaantgcattcccacgggtggccctggaactggtgagctttgtttgggggttgttttcggctggcattgctcctcccagctttggcccctttggtccctcaggaaacagtccccttgtttccctttttgggcagcttccttgagggcagaaacttgaaaacaaacccaaaccaaagtttttggccatttgtgggtggagggttttgaatgtcctctttccatgtcaggcaaagggtcagcccccatggttttgcctcaggcccccccccccccccccccaggcctgcccctcccctcagggccatacccccagcgccctgatggaggaaccagaccgcaggctgtgcccccctttaacaaaagcggctgtga

SEQ ID NO: 633276 - DNA, 117 bp, Homo sapiens
gggggggggggggggacccccccccccccgggggggggggggtttttttgggtaaaaaaccccccccccctttttttggggggggtttgggggaaaaaagccccgggtttttcccca

SEQ ID NO: 633277 - DNA, 834 bp, Homo sapiens
agcgggggggggcgggaggtgttggggccgttgaagcggcctccctcccgccccagcgccggtctggccccaaccctgtcccgactcgcggactggaccactccgaccctagccggccgaagggttccgctggacacgcaggcggactccggagcagccaagcccaatgagggccgcgcgcccggccgcacggtgctgacgagacggaagctccatggacacacgacgaggagcagacggatcaaaagcggaatcaaagaatcgattcaagaagagtataaattgaaacacacttcgacgtcttccaagagcaaaatgggaccagactacaaaagaccacacaccatgactaatggaacaatgccatgcactaaactgataaaaaatcacaacctgcaatttcccatcagtagaactcccgagcccagtccgaggggatcagatgaaccatacacataccaatacggaacagaataatgcaatgacctgcacatggggagaagaagcaattaaaacgacaattggtacataacaaaagggacacgaggaggacactcctgagacaccttcataaacaatcccacacaaccaaacacgagcaaaactaaccaccaacatcagatcaatcacaaggggacagaaaacagaaggacgcaacaagtaaggggacccaagaagaggaagcacaagtgagacaagaacaaaactgcctgactaaaacaagccaaggagtgacaaagcaaagctacaataccaactatgacagaatcatacacaagacatgaagaagcaaagcgaaaaaaacataatgaccagcaaacacaggaggcaccc

SEQ ID NO: 633278 - DNA, 1077 bp, Homo sapiens
agcgggggagagggaagggggcggagctagccggagccgcgagtccatttggggctgtgcttggcgcgtaccgtgcggtccctgtagttggagggacgggcggtcgcgcgggctttcccactcagccggaggtcgggagatgagtagccgccgcccggcgtcctctcgggaacagcggggtggtcctcgtagaccttctagcgtagggtggggagttggccaggtcggcagtgatctgcgtgggttgggggggctggcgaaggccgtctgagctccagtccggcagcgcgggagaaaccagcgggggcactgtcatgggcctggtggagagacgcggcctagcaggagggcgccgggtgcagctgtgtctgtggtccagaaaacctgctcacgtccggaggcttcctgggcccagctagcagcgtctccgacatcccctagaaaagaaacagacgggtgtgggcctggaggttacagcgcgccagcagcgtatggttgcatggcgccgggggagggtcgccctaaccgagaagctgcttattactaagagctccagggctcctgggcggttcaccaggtctaacacagccgggcttgatctggtgggggcgactgacagggacttgacgggtcaggaatggggtgctgtgccaataaatgcgttgatactgttcttttgcttcttactttgatgtaagcctctagattcgttagtcgaaagcgtgaaaaaaagagctgcttttggctcggggggaagtacgtaaaccctgccatataacattcaggcttgtatgcacaccagcagatgtgaatggaggctgttggaagcaagattccacatgagccagtatgtagagacagggatgaaggacacccgggggttagtgcccgtgaaccaccaaagaatgagcagaacaagtcttgaaggagaatcagaaggaagatgctgggaaaacctgatggcgaaccgagggcaagtcagaggtcacaaagccagaaagagaagttacggaagaggaaacaagcgaacagggatacaccgaacgggattgggcagaaatcaccacagagtctcca

SEQ ID NO: 633279 - DNA, 327 bp, Homo sapiens
  misc_feature (25)..(25): n is a, c, g, or t
  misc_feature (63)..(63): n is a, c, g, or t
  misc_feature (72)..(72): n is a, c, g, or t
  misc_feature (89)..(89): n is a, c, g, or t
  misc_feature (91)..(91): n is a, c, g, or t
  misc_feature (269)..(269): n is a, c, g, or t
  misc_feature (277)..(277): n is a, c, g, or t
tgaaatccgtgggctgtgtgaggantgtccatagtgggtcccaaacccctccctctgctggantttcctagnccttccccctccccaanantgtggcaagctagaggagcccctgccctccctccctgtcctgtgccaaacttctggggccaaacccagcccccttgagccagccctgccagactccaagcccaccctagaaccctcctcctgtgtggagactctgttgccccactttggacacagaattgcaacctgcctcacactcnccccctangctggggcttccatcttaatttattctcaataataaagacttcatgatga

SEQ ID NO: 633280 - DNA, 730 bp, Homo sapiens
  misc_feature (427)..(427): n is a, c, g, or t
  misc_feature (433)..(433): n is a, c, g, or t
  misc_feature (472)..(472): n is a, c, g, or t
  misc_feature (479)..(479): n is a, c, g, or t
  misc_feature (485)..(485): n is a, c, g, or t
  misc_feature (502)..(502): n is a, c, g, or t
  misc_feature (508)..(508): n is a, c, g, or t
  misc_feature (513)..(513): n is a, c, g, or t
  misc_feature (515)..(515): n is a, c, g, or t
  misc_feature (518)..(519): n is a, c, g, or t
  misc_feature (522)..(524): n is a, c, g, or t
  misc_feature (533)..(533): n is a, c, g, or t
  misc_feature (549)..(550): n is a, c, g, or t
  misc_feature (552)..(553): n is a, c, g, or t
  misc_feature (561)..(561): n is a, c, g, or t
  misc_feature (564)..(564): n is a, c, g, or t
  misc_feature (568)..(571): n is a, c, g, or t
  misc_feature (630)..(630): n is a, c, g, or t
  misc_feature (639)..(639): n is a, c, g, or t
  misc_feature (722)..(722): n is a, c, g, or t
cattcctcttgccatggggaagcttctgatgagagaaaggagccccacatccactgaaacatcctttggttctcaagcttcttctggaggcagtaaggaaaaataaaacccaccaaggctcaagaagggaactatagaaaagttcaggtttttaggctatagcagagacagtgagaaagcatctgggcctttctcttcctcttggtccaggggacctcattcaccaactagagcttggtgtacaggaacggggctcacagtgctgagggggcttgagtcccacctttcagcttgatggatgctcacctcttctcagccccagctcgtgccctgtttttctagccatagcccccagattactcacagctcctcatgccatttcctgtccagattgctatgtatgactctgcacctctcttgtccagtngctctngctgctcacctcctctcactgctagcaatattcaccaanggctttncatttngcgaagtcccttaccanctcctncttananctnntannnccatacatntccacactcccaactnntnnctctcccnctnaatnnnncctcatcattttcccattcttctacaaccttttccactctttttctccaccccatcacntttcatttnaattatcctttccccattttaatttattcatttttttcaattttcaacttaattccccacttcctttttaataatcagtatcnccttttaa

SEQ ID NO: 633281 - DNA, 355 bp, Homo sapiens
  misc_feature (21)..(21): n is a, c, g, or t
cgctgtcttacacaccacgcntctgcgttgaaagcggccctgtgcagctgagctcgactggatttgttgtagcagaggtagagcattttcacctgaggcgtgttgtgtggcgtagcccaccagtgtggtggttatgccggtaccggcaaaagcctgaaccagtagcttgtcagcctgtggaatgtgatgatggggcctgcttgtacttgtgtacactgcatgggcagctcctaaaggtataattagaagcttgaaacggtgattgtaaacggaacacacccaacagcacggcgcagggcaacagaatcaaaagggggctgatgctgatggggatgagcaggtagacgcgaccagg

SEQ ID NO: 633282 - DNA, 761 bp, Homo sapiens
ctagacggatcctctcggatgcaagtgtcgaaacagagcagaatgacgatagcccagaaaacaatgggcagggaaaatcctggtgatacacacagggtacagaaatggcatcgagcttttccaaggaagaaaagaaagaaagctgctacttgtaaacaagagcttccaaaacttatggatcttcatgggaaaggccccacagtggagaaaccttttaagtgtcaggaatgtgggaaaagcttcagagttagctctgatcttattaaacaccacagaatacacactggagagaaaccctataaatgtcaacaatgtgacaggaggtatagatggagttcagatcttaataagcacttcatgacccatcaaggaataaaaccatatagatgctcatggtgtgggaaaagctatagtcataacacaaatctacacacacaccacagaattcacacaggagagaagccctttaaatgtgatgactgtggaaaaagattcattcagaactcccaccttattaaccaccagagaactcacacaggtgagcagccttatacatgtagcttactgcagagaacactttagtaggcgctcgagacttcttagacaccagaaactccaagaagaagggagcatgtctagtgtctccaactgaggacagtacatgtaaagctgacttagaagggtgacgaatacaaatatgaggcccatggtaggattgtgatataacatgggaggtctgtacctcaaaaggacagggtgta

SEQ ID NO: 633283 - DNA, 91 bp, Homo sapiens
ggccatatattattgtgcgagagatattccatttcttacaatcggccagggaaccctggtcaccgtctccccagcatccccgaccagcccc

SEQ ID NO: 633284 - DNA, 452 bp, Homo sapiens
  misc_feature (373)..(373): n is a, c, g, or t
gcatggtcgtagtctaccctgcatagtggccattgaactggtcatctcctccttgacttcgtcccaggtggtactttgtcctcctgcagcaatcgggtcagtagtggagtggggtctagtggcactaacatcgattggttgatccagtggtggttcatgaactgagtgatggtcagcctctctgtggggtctgtcttcaacaggaggcggatcagctgcttggcatcctcagagacttctgaccactcaggattggggaagccgtactggcccaggcgaatcctcctcttcatccccggggagatggcctggcccgtgttggagtagaagggtgggaagccacaaaggaggatgtacatgatgacacccaggnaccacatgtcacatgacttgtcatacttctctggacccaggatctcaggggccacataatagggagtatagcagggtgt

SEQ ID NO: 633285 - DNA, 220 bp, Homo sapiens
  misc_feature (130)..(130): n is a, c, g, or t
tgttgggcatcacgtggcatcattgctatcttcacctttgtggaacctgtcagcgcctttgtgaggagaaatgtggctgtctactacgtgtcctatgcgtcttcgtgtcacctacctgatccttgcctgntggcagggacccagacgccgtttcccatggaacatcattctgctgagcctttttacttttgccatgggcttcatgacgagcttccgggat

SEQ ID NO: 633286 - DNA, 1011 bp, Homo sapiens
tgtgagtgttgtgttcggttcgctgtgtggttgtggcttgcgtcgttgacgcgtgtaatcttggtgtccgcgtgcggcgcggtgtggggcgtccttttttgccactaggttcttcgcttgcgaatttcggggttccccttcgccggttgtctacctcgcacttggtgttcacagcgtctgcctcttgtctataggagcgtccgccttggggccggccctcagaagcatgtgtcgtgattgtgtgtcgtcagtgcggcgtgggcgtggtggtggtgcgcgcggctcacgaaggtggttgtgttgtttgacgatttgtctcgcgcttccggtgttttgatgccccttggtagtcatttctctcccccgtctttagttcgctgttggcttcttcgcccgctccattactcgttatgacggcccttgaatctaaacagcagcgagggggtcaagcgtgtgccgcggccgtgagcatacaagaccaaggtggccccaccccaagtgtggcgtcaactaccacgggtatctccccgcttttgcgtcgcggcttattttcccaactgtccctacataatgtcccccccccgctatttttcctgtaaccctcgcgatcctgtcgagtcctcgatgccgtgtaacacctatcggtgtagttattgcgccgcgtctgtatgcccccccaccatctgttattataaattttcactcgaccaaaacactgttttcacacaacactaggactggtccgcccaccaacttatgtggcctttaacacaacagtctatatttccccggaccgtttatacacccaaccacccgttctccgccgacaacacacagcaccggggtatatatcatccgtcccaatagcttctgaaattccttggggcgacaaccccaacacgtttctcacacccacttcgctgccctataaataattctccccttaaaatttttaaaaagggcccctttttccccttcccccccctttcccccttttagggcccaaaaaaa

SEQ ID NO: 633287 - DNA, 163 bp, Homo sapiens
cgatctagaggatcccggtggagacgggggtccagtagacagtgtcagggtttatcacggtagctggctatcaaggagagtgaacatagtagggtatgctgaagattcggtagggtggctgccttattctggctgcagctctccagaaggcaccccggttcca

SEQ ID NO: 633288 - DNA, 173 bp, Homo sapiens
gctgaactgggacccttgtctaaagtagaagtggctaacgggtatcgccagcctacccaaagctgaagaagagctaatacatcccagtgccccaggaataagaggacgaggtgcgggttctgacacttcccctgcaagcccaccacgccatgtgcagtaagatggaagagttt

SEQ ID NO: 633289 - DNA, 384 bp, Homo sapiens
acacatatgcaatatcctatcagatacagttcagagatacatatacatgataccacaggacagcagtagttgttatcacagtgagttcaatcatatatgtatatctcttaagctccctgactatgctgctcgactttctctggcaaaatctcatccttggataaacccgaatataagatagttatgctcaatgacactactacactaatactttgctgccttatgtagtagcttcttactcagtacttacaccagttgggattgacacacacctctacagctgggattcaggagccagacagcagcacacagaacggggaatccaaagccatctctgacactgtacatttatacaacatgcctgtcatggttccagctgctact

SEQ ID NO: 633290 - DNA, 372 bp, Homo sapiens
acatgagtctagctttttttccagttctaaccaaacaaaataaaacctgcgtgcacagaagctgccactcaagtatttcctcacgcaaggcgaaccgctagtccataatccttctaatagctatccgtcttgcacacaatatactctccggacaatgaaccagtaaccaatactaccaatcaatactcatcattaataatcataatggctatagccatcaagctcggaatagccccctttcacttctgagtcccagcggttacccaaggcacccctctgacatccggcctgcttcttctcacatgaccgagactagcccccatctcaatcgtataccagatctctccctcacgaaacgtgagccttctcctc

SEQ ID NO: 633291 - DNA, 294 bp, Homo sapiens
gggcctaagcaggggggctgcgggcgcgcccaagcgagcgtaccataaattgggcaaatttacccggaagagaagtcggatgccgtggacgcaatggacttttgcagaaggtggcggaggaaagctgaagagcagtagagcgagaggcggtaattttgtgaaagggaggggtaagtgctctagacgtcagcttaacaatatcacgcagatgcaattagcatagcccactatcatatgcctggagtatcaggctaggcagggcccactctgatgacacgtatcggcgggtccctc

SEQ ID NO: 633292 - DNA, 328 bp, Homo sapiens
ttcacccttggcgttcttaccgctatttgggttagttcggaaatcactagcaggattaatggttggcgtagtttgttgtttgccattatttccaaacgtcagattatctgcactgtgaacactgactttagcattaccttcagcaccgagttgtaatgcttgaacgattgtcgttttggcatagcatactttttgtagcattagcttttttgttcagcaattgatttatcatagggggcctttgctttatcatattgtgcaagtgctgtatcgtaagcggccttatccttatcatactgtgctttagagcatcataggcggcctaatc

SEQ ID NO: 633293 - DNA, 224 bp, Homo sapiens
catttttaatcttagagcgaacagcctataatcactgcgcccgctcataaacgggatggccataggctaggtctatatgatagtaggggtggttggtgtaaatgagtaaggtaggactccgaggaggttaatcgtgagccaataaaaatcattccggcctactagtctatgagactcaggcttcggtccttccccgtatgttgtctggttctcagtttgtttgg

SEQ ID NO: 633294 - DNA, 685 bp, Homo sapiens
  misc_feature (31)..(31): n is a, c, g, or t
  misc_feature (115)..(115): n is a, c, g, or t
  misc_feature (140)..(140): n is a, c, g, or t
  misc_feature (174)..(174): n is a, c, g, or t
  misc_feature (188)..(188): n is a, c, g, or t
  misc_feature (196)..(196): n is a, c, g, or t
  misc_feature (230)..(230): n is a, c, g, or t
  misc_feature (232)..(232): n is a, c, g, or t
  misc_feature (251)..(251): n is a, c, g, or t
  misc_feature (262)..(262): n is a, c, g, or t
  misc_feature (265)..(265): n is a, c, g, or t
  misc_feature (271)..(271): n is a, c, g, or t
  misc_feature (279)..(279): n is a, c, g, or t
  misc_feature (286)..(287): n is a, c, g, or t
  misc_feature (291)..(291): n is a, c, g, or t
  misc_feature (319)..(319): n is a, c, g, or t
  misc_feature (323)..(323): n is a, c, g, or t
  misc_feature (327)..(327): n is a, c, g, or t
  misc_feature (350)..(350): n is a, c, g, or t
  misc_feature (357)..(357): n is a, c, g, or t
  misc_feature (363)..(363): n is a, c, g, or t
  misc_feature (372)..(372): n is a, c, g, or t
  misc_feature (386)..(386): n is a, c, g, or t
  misc_feature (461)..(461): n is a, c, g, or t
  misc_feature (592)..(592): n is a, c, g, or t
  misc_feature (680)..(680): n is a, c, g, or t
agaaaaaaactttcttgagtgtgcttgtttnctgtagcaccttggattttgtgatcagtcttttaaagatattttttaaaaaattcaacctctgtgttcacatttaggacagggnataagagtgtgttgtgctttcatgnaaatgagaggaaaaatttatacttgcttagtttngagcattgaaagcnctggcgcntaattgtgccatttgctcatgtgccacatgaatnanagggtacagcttagaaacnagggggttgcngcnattgtntttttttntaattannattnagagtattaaacacagttgagtacatcnatgnatanatgagatacggtgatgacatacnggaggcnccaatnaagagcgcngagcaaagctcgtnttcataacatcattaagattcattgtacactgcgtttcagaaaggctttgtcaaagcagataataatggcctgtnagaaatgcacaaacagaaatttatattaaattgtcctttccctccttttaaaatatgggaatctattaatagctgcattcccggtataggggactcaagtcttcagttaaaaaaaagtccccagcttcttnattattgtaagcttattaccaaaataagagtataaaaagttaagtgaaatatatttgagtacataggtgggggtattcctggggaatnctaat

SEQ ID NO: 633295 - DNA, 119 bp, Homo sapiens
tgtagttccactctagggatggacttatcccttgggagaagagtgaagttggtttcatcgccatgtgatgaagaccactgtgatttgtaaaaaagctagactatactgaaaactggcgt

SEQ ID NO: 633296 - DNA, 300 bp, Homo sapiens
  misc_feature (4)..(4): n is a, c, g, or t
  misc_feature (6)..(7): n is a, c, g, or t
  misc_feature (11)..(13): n is a, c, g, or t
  misc_feature (22)..(22): n is a, c, g, or t
  misc_feature (25)..(26): n is a, c, g, or t
  misc_feature (29)..(30): n is a, c, g, or t
  misc_feature (39)..(39): n is a, c, g, or t
ttgnannggannnactctcttntgnnccnncgctacagnttttgcttcccaaggaatggccttactgttcaaattcagatgcactaggcaagttcagaagacaagagtgaagatgagacgccaacagcctcacactgaggacgattctttctccagctccccactgcacaagcaagcttggtattcatcaatatgacatggtctggaagttttcctgtatattcatcagcttgggttactaaacaaagtacaaaataaaagcatggcctcgttggcctcagcggtggagctctgcggccg

SEQ ID NO: 633297 - DNA, 275 bp, Homo sapiens
tggtgaataacactatggctggaaaactacaaggcttgatgaaacgactggatggatggaaagatggatgactacgactaactgaaaagaccgatgaattaaaacgactggactggagggaccaggcacatgttgactcacacctgtaatcccaacactttgggagtgcaaggtgggcagcttgcctgaggccaggagttcgagaccagcctggacaacatggtgaacctccgtctctaccaaaaatatacaaattagccagtgtgtgatggtgg

SEQ ID NO: 633298 - DNA, 158 bp, Homo sapiens
agtcatcaggcctggggggcagcagagcttcaaacagctgcttactgcctcaatcttaaatatgaacacccatccaaggatacctggacatatgaggaaagcttccaaatggagacagcgactcacgagcaaaaagacaccacaacgtccgtggagga

SEQ ID NO: 633299 - DNA, 293 bp, Homo sapiens
  misc_feature (4)..(4): n is a, c, g, or t
  misc_feature (6)..(7): n is a, c, g, or t
  misc_feature (11)..(13): n is a, c, g, or t
  misc_feature (22)..(22): n is a, c, g, or t
  misc_feature (25)..(26): n is a, c, g, or t
  misc_feature (29)..(30): n is a, c, g, or t
  misc_feature (39)..(39): n is a, c, g, or t
ttgnannggannnactctcttntgnnccnncgctacagnttttgcttcccaaggaatggccttactgttcaaattcagatgcactaggcaagttcagaagacaagagtgaagatgagacgccaacagcctcacactgaggacgattctttctccagctccccactgcacaagcaagcttggtattcatcaatatgacatggtctggaagttttcctgtatattcatcagcttgggttactaaacaaagtacaaaatacttagtggctttagcaacataaatttactttctcag

SEQ ID NO: 633300 - DNA, 185 bp, Homo sapiens
tcccggaccaccttgtgctgtgctttacacggagtgctcttcttgcccaggccgagcgagctacatccccgctgcctgcttgccggacagtccggtgcttttgttgctggtttgtttttgcttttttttttcgacggagtctcgctctgtcgcccaggctggacgtcaggggagcgatctcggcc

SEQ ID NO: 633301 - DNA, 321 bp, Homo sapiens
  misc_feature (4)..(4): n is a, c, g, or t
  misc_feature (6)..(7): n is a, c, g, or t
  misc_feature (11)..(13): n is a, c, g, or t
  misc_feature (22)..(22): n is a, c, g, or t
  misc_feature (25)..(26): n is a, c, g, or t
  misc_feature (29)..(30): n is a, c, g, or t
  misc_feature (39)..(39): n is a, c, g, or t
ttgnannggannnactctcttntgnnccnncgctacagnttttgcttcccaaggaatggccttactgttcaaattcagatgcactaggcaagttcagaagacaagagtgaagatgagacgccaacagcctcacactgaggacgattctttctccagctccccactgcacaagcaagcttggtattcatcaatatgacatggtctggaagttttcctgtatattcatcagcttgggttactaaacaaagtacaaaataaaaaggagaggcgacaggtccactcctccgcggggaatatacgcgggagcggagttaggcgaca

SEQ ID NO: 633302 - DNA, 733 bp, Homo sapiens
tcaagattgacccatttgtgtatttttaataaaacaagctacaaatagtttccctctctccttcacaagggaaaaccacacaacaccacctacacacgacgatccgtgggggagacaagatgccgggggagatctcgaagatccaaacatctacaggcaggcgccgctctccagtggtgtgcatgcttcctccaggcctgaaagggggcgccagtgtctcgatgcagggcccactcagctccggcacgtgagtcctctcatgggggctaaggggagaaggcttccttcccacctttccacgtgggggcagggccaccagtcattcctgagataacctctaggactttctcacaggacagcagggacctccttaagccacaagaccccatcagatccggtcccgagaaggtaggtgctcctcccacagggacacgtgctggtggtgccaacagccttcaagacccggaacggggggcggtactcccagggatgtcgggtgggacatacaagatgaggccagaattggcaaaggggtgaccacagacggaggggaccaggcacagggctacccaagctccctcatggccaccacagcggcaaaggggacgggggcgctaagggcccactggcagcatctgcctgaaggccaacttgaataggcacagcaccggggagagggagctgcgcctacagaccaaaaggtgggagccacctaaaatcgcggagaaccgtg

SEQ ID NO: 633303 - DNA, 300 bp, Homo sapiens
tgtgttcagcgtacctttggcggagtactgcctgatcaccaaggctcaatggatcgcaggtacgtgccggatccgaacaaggcgcaggatctggagaagaagcgcgaaaaggcactgctgaaggagttcgagcagtaccagcaacacagcggccgcaagctcaaggagttccgactggaggtgctgcgcgccggcttcaaggacgcttggagcaggaaggactaccagaccatcatcaaggtcgcccagaagatcccggacgaggcgctgcaggaagacgagaagctgctgctctggtat

SEQ ID NO: 633304 - DNA, 92 bp, Homo sapiens
  misc_feature (33)..(33): n is a, c, g, or t
  misc_feature (86)..(86): n is a, c, g, or t
  misc_feature (92)..(92): n is a, c, g, or t
aaaaaaagggggggggggtgtttttttgggggnaaaagcccccccacccccccttttaaaaaattaaaaaggggaaaaaaaagggnaaaggn

SEQ ID NO: 633305 - DNA, 400 bp, Homo sapiens
  misc_feature (63)..(63): n is a, c, g, or t
  misc_feature (171)..(171): n is a, c, g, or t
  misc_feature (236)..(236): n is a, c, g, or t
  misc_feature (296)..(297): n is a, c, g, or t
  misc_feature (323)..(323): n is a, c, g, or t
  misc_feature (354)..(354): n is a, c, g, or t
gagttgagccgagccacaaccttagaaactttcaaatccaatgagcgagagagccactaaaanattaggagagatggagaaactgaggcctggaggaacacagtgacttgcacaaagacctcctctaagtccaagaccaggatgacaggctgtgtcaccttccagagcagnaaatccaacagtgcagtggaggtagccactgaaagctgccaagagcctcttgggacgctctctcncatgccctttcctgttggggccaggatgcctgcccttttgctaagccccatggctctgcnncccgttatgcttcttaaccttgcttncgagagttagctacagctgaaggctcgctcnctgctctactctcccttgggcgtggttttctacacgacctatagcg

SEQ ID NO: 633306 - DNA, 188 bp, Homo sapiens
cggtgagggcagacagttcaaatggcttgtagggagtagaatacagacgtgtactaccgatgctgcaccttacctctatcctcctccctgggcacactccccatcccagcctggtcccaaggacaggtggtcgcgtgagggtctcggcagcgggagaatctgtagcctagacatacacgtgagcatca

SEQ ID NO: 633307 - DNA, 367 bp, Homo sapiens
  misc_feature (213)..(213): n is a, c, g, or t
  misc_feature (242)..(242): n is a, c, g, or t
  misc_feature (332)..(332): n is a, c, g, or t
  misc_feature (348)..(348): n is a, c, g, or t
tggtcaacagactgcaccaatgacagtagtcccttgagcttatgatggagctgaaaaactgctatcacctagtgacatcgtaatgtagtgcaacacatcactcctgtgtttgtgatgatgctggtgtaaacaaacctactgtgctgccagtcaaacagttatagccagacacagtggctcacaactgtaatcccagaactttgggaagccaanatgggtggatcacttgaggtcaggagttnaacaccagccagaccaacatggtgaaaccccttatctacttatacattagctgggcgtgatggcgcacacccataatcccagctacttgnaaggctgaggcatganaatagcttgccccgggggc

SEQ ID NO: 633308 - DNA, 661 bp, Homo sapiens
cacgagctctggctgacatgccgcatgcccccattggactgtactttgacaccgtggctgacaagatccacagtgtgagcaggaagcacggggccaccttggtgcactgtgctgcaggggtgagccgctcagccacgctgtgtatcgcgtacctgatgaaattccacaacgtgtgcctgctggaggcgtacaactgggtgaaagcccggcgacctgtcatcaggcccaacgtaggcttctggaggcaactgatagactacgagcgccagctctttgggaagtcgacagttaaaatggtacagacaccttatggcatagttcccgacgtctatgagaaggagtcccgacacctgatgccttactgggggatttagtgccactgaagcctgcgtcaaaagcccgagcggggccgggaaatgctccccgacgtatggtccctctccactctattttaaaaggctgaattctggttctcacctaagaggtttttacaatgggggttcaaattaattttaagaaaaaagggagggaggggacaataaagggaaggcaaacattgctgggacaaatctttaaaaataaaatttggaaaaattgtttatggaaaaatttaacttttaaaaatttttcccaactgggacaagtttaataaaatggtttt

SEQ ID NO: 633309 - DNA, 775 bp, Homo sapiens
agcggaggggccggggcgcgggcggtcggccgtgtggtgcggctagagcggtgggacagcgcggtgggctggagctcaggtgcgcgggcgccgggcggtggcggggggtcctgttacacacggctcgttctcgccctccagatcgagagcgaacgcatggcccttcccgtgcataatcagagtcacataaacgcaggcgaccggggcatgactgtacagagaaccaggtgacttgagagacaggagtgtcggataaagcccgtcaggtagagaacagtgaagttgcaagtgcggccgaagacagaaagatatccgaagccgtgaaagcctcgtgcaccggtcatgggaaaggtaagagtataagaataaaccgtaacttagatggagagagaagggcgagtactgtaaaccattaaaagatgtacgccaaagcacccagttctcttcaaagaaaggtacagttcaggagcaaaaggatcacagttagacacatcctttatatggcagatggtaaaaaagtagaatcacaaaaacaaaacaagaattggtggaaactaaggaacaatagacataagttagggaaattacaatgttactcataaaattattcattcacgtaacagagacaccagaaattaagggtttaagaggagaacggcacacaataagtacgtcgagaccattcaacctggattgccaacgaagggccagcagggggacaagtcgtttcaagagctgaaagaaccaagaccagtaaaatacgcgaagaggaact

SEQ ID NO: 633310 - DNA, 386 bp, Homo sapiens
cgagtcgggactccagtctgggcataagagctaaactctgtctcaaataaaaaaaaggacaagaaatacactaatttctctggtgtactggttgggccacaggtaactggctggcccatttttaggcactacccggggagaagtcccacatcagttggccagtaatctaggccccggatggtgattggtagccagcaataaccttttctaagtagaatttgggcagaaggaacatagagattagcaagtacaaagagagctgagaactcccatggaccttccaggaccatgagggaggtggcttatgtggctatgacccccttagatggccaattcccaaacggtccagaacttgacttcggggcttatagagctcttatggcccg

SEQ ID NO: 633311 - DNA, 143 bp, Homo sapiens
attaaaatactatggaagtgctttcaactcagccacatcttagctattagttcttgtgtgtcttatcaaagtttaatggatacagttccacagtgttgatgtgttgtgtgtatattcgatttttataaagatggtagtaagtc

SEQ ID NO: 633312 - DNA, 283 bp, Homo sapiens
tcccagggccctgggtttttggggggggaaggaaaagggggggaccaaaaagtttggggtttgtcccctgtgggacccttttcccttttacttcctaggctttgatttttccggcagcccaaatgttcggtttttttggcccctttttcccccctattggggtttggttttctttttccggtccttttgccatacccagtttcaggggtcggtcaaatccatcccccccctgggttttttttttttgccccagggggccaaaattaattaccccaattcccca

SEQ ID NO: 633313 - DNA, 1234 bp, Homo sapiens
gtgtgggtgggtggggcgggggggggcggggtgggagtgggagggtgggggggatgagttgggggggtagggggagggggggggggctgcgtgttctggggtgatgaggcggttgttggggcgggcgtgagtggggggtgtgttggccgggcagggggggactagagagggttgggtagatggccgcgttgggggtgagacggggcggggtgttgtccgggggggtgggcggggggggggtggcgggtgggtggggggttgtcggagggggggttgggggagtagggcgccggggcgggttgggtggtgtgaggggcgcggtttagcggcgcgggcaagggggggtgcggtgcgggtcgggggcgtgtgtgcgctgtcgggagttgtgggtcgccggtggtgcgggctggggagggggtggttggtgggggtggcgtggggaggggggctaagcgtgggaggcggtgtgtggggggttcgtgcgcgtagttcgtgggggtggaagcgttgtctttggggggcgcatgggcgcgggggtggtggcgcttcttgtcggctggtgtgcagtggggagggtgtggggcgtcgtgggattcccgttgggggggagcgcttggcgccgtggtggagggtggtgggctgcgggggtgtggggcgggggcggggtgtttcgcggtggcgggggccgggggcgcaggcgcagggtggtggttccgcgtggcgagggcgcgtcgcagggggtgcgtccgcggtgaggcgtggaggggtggggcgcatgtggctttgggtgaagggagttggttttgggacgccgcgcggccctttaccgcgcctgtagaggccgtgctgttggggatcgacgagctgggggcgggctgcgtgggcgtgcgcgatcgacgaagacctagtgagaggctgcgcgccgaacaggtgtcttcttcggatgccttggggacacccttgctgtgaagttgcatgagacctgttttccagaccgtggtacctttcgaagagacatctgcttggagccttcagcctggagaggtgaaaaccgttgctactcccaaatgtggtcctcagagtcagcaactttacatcatgttcgaagccttttataaaatgcagctctgcatagcctgaccgaatcagatgtgttcattgtgacaagatcccccggtgattcaaggcaggtttaagatttgagaagccacccaagttaaacctggacttaata

SEQ ID NO: 633314 - DNA, 991 bp, Homo sapiens
agcgggatcacttgaggtcaggagttcgaggaccagcctggccaacgtggtgaaaccctgtgtctgctgaaagtacaaaaattagctgggcgtggtggcaggtgccatgtaatcccagctagctcaggcgcctgaggcaggagagtcacttggacctggggaggcggaaggttgccaggtgaagctgagactactacgcatgtgtcgactccagacgctgggcatgacaagacgagactctacagaaaacaaagatctctttattcagcccgctgcaggggttcaccccgtataatccgcagcactttgtggaggcgtgagatgggaggattgcttgagcccacggaagttttgaggacctagattgagaacagtctgaggcaaccaaagtgtgacgaatcccagtctcctatggaggatgaaaatggatatatatccggacatacacaaattttctcagccgcggaccatttggggaggggagacgcccccccctgtgtaggagatttctcaccaacataacgggggagaagcgcatggaacggagggagagagagcatacctttgagacacccgtgggggaacacattatagagaggtgttggacaagtagatgcatcgaggggtagttaatgccccccctttaagagagtctccaaaggccctgatgagagcacaagagggttgaaaacccccggttctcagccaagaagacaagaagaaaagaattctgttttgttggacaccaaatagttgactcccgacagaagaattatgaggggaggaattacacatagatacttttcgtatgaaacaatcccgccctgttgttagaatgatagaccacttttattccagctggacctgttggagtcgagagctttacaccagagatggtgtgcaaccaaatttatcacgggtgactaccacatgcgttagcgagaacatttttactcaccgagctgatgtatagaggaccgccttaagatcc

SEQ ID NO: 633315 - DNA, 839 bp, Homo sapiens
  misc_feature (542)..(542): n is a, c, g, or t
  misc_feature (549)..(549): n is a, c, g, or t
  misc_feature (567)..(567): n is a, c, g, or t
  misc_feature (601)..(601): n is a, c, g, or t
  misc_feature (671)..(671): n is a, c, g, or t
  misc_feature (684)..(684): n is a, c, g, or t
  misc_feature (691)..(691): n is a, c, g, or t
  misc_feature (700)..(700): n is a, c, g, or t
  misc_feature (702)..(702): n is a, c, g, or t
  misc_feature (707)..(707): n is a, c, g, or t
  misc_feature (715)..(715): n is a, c, g, or t
  misc_feature (718)..(718): n is a, c, g, or t
  misc_feature (724)..(724): n is a, c, g, or t
  misc_feature (729)..(729): n is a, c, g, or t
  misc_feature (739)..(739): n is a, c, g, or t
  misc_feature (741)..(741): n is a, c, g, or t
  misc_feature (745)..(746): n is a, c, g, or t
  misc_feature (749)..(749): n is a, c, g, or t
  misc_feature (752)..(752): n is a, c, g, or t
  misc_feature (755)..(755): n is a, c, g, or t
  misc_feature (765)..(765): n is a, c, g, or t
  misc_feature (769)..(769): n is a, c, g, or t
  misc_feature (773)..(773): n is a, c, g, or t
  misc_feature (777)..(777): n is a, c, g, or t
  misc_feature (780)..(780): n is a, c, g, or t
  misc_feature (791)..(791): n is a, c, g, or t
  misc_feature (807)..(807): n is a, c, g, or t
  misc_feature (810)..(810): n is a, c, g, or t
cgccacgttcgggttgactattccctgtcaacgagttttctttccctgagattcatatgttcaaaatgttgaccccccccgtcgccgaccctccccatgaatgtggccaagagttgaagagggccagagaattaagcttttcgggcagagcttcagaaacttggtgagtctcccaatcacgcagagagagcttggtgccacagcactgggcaggaaaacttctgtcaacctgaccccttgtgaggacatcttaatccaccggacccgactctgctgaactgcagaacaacatggtgctagtgaaactggaccttcggaagaaggccgcaagtattgctgacagtatcatactgtgttggaaactcccaggcccggtttctgcccaaaagcgccttggtacccacccgggaaatcagccacccaacccaccaccccccgggagagaaacccttccctcgaaatttacttccccggacacccacctgcccaagctcacagactgcagcccttatgcccggatcctacgctcacggcgttccccnttactcnaatctgggccttttggcnaaaagtactaaggctgtggggaaagagaagagcngtcatggccctgaggtgggtcagctactctcctgaagaaataggtctcttttatgctttaccatatatcnggaattatatccnggatgcnatactcagncnctagnttttttcncanttttgnattanaaccccctangnaatnncangtngtngttttttttnattnactnatanganttctatgcacncaaaaccgttatattnaanatattattgttcacattttaaaaaaaaaa

SEQ ID NO: 633316 - DNA, 120 bp, Homo sapiens
agctcttccacaacttccttcttctcctttaaagtcctttgtaggtgatttcggagctgtgtctacagctgcgtcttgactatggtgcgggcatcgccctgagtaaatccgcgatagcac

SEQ ID NO: 633317 - DNA, 312 bp, Homo sapiens
ggcatggctcccaacgtgctggtattacgggtgtgagcactgtgcctgaccccggttgctttttttagatggggtctcgtactgtcacccacgttggagtgaagtggcgcgatccacctcccaggcttaagcaatcctccccatcagcctcccaagtagctggggccatgggtgcacaccaccatgcccagctaagtatttggtagagacggggttttgccatgttgcccaggctggtcttgaacttctcagctcaaatgatccacctgccttggcaaggcatgagccaccgccccatgcgtggattgccag

SEQ ID NO: 633318 - DNA, 305 bp, Homo sapiens
  misc_feature (114)..(114): n is a, c, g, or t
catgatgtgatagtaggaaaaaagttttaaaaagagacaacaggaaacataacttatgcagcagaaaagagtctcctttaaagcaggatctaataaaggtgatatttatttatngatgtcaaacattattgagaagcagtagataaccaggagagagacataagctgctgaggaggaattttcctaaaacaacttcaataatgaacgctgataacaaggcaagggtgtcttcttacaatttcccctcaagttaggaagtaagactgggaagcaagaagatgtatgatttgaacaatcacatcatg

SEQ ID NO: 633319 - DNA, 184 bp, Homo sapiens
gaacagagtgagaccctgtctccaaaaaaaaaaaaaaaaaaaaaaaacacacacacacaaactagggggcaactggggcacagccagaggtgcccatggagccttcgttctttccctgactggtttcctcaggacactaggccctgggcttctagcttctccctgtcccttctgtcgtcttctc

SEQ ID NO: 633320 - DNA, 747 bp, Homo sapiens
  misc_feature (97)..(97): n is a, c, g, or t
acaaaaaaaaaaaaaattggttgggcgtcgtggtggttaccattgcgcattaattcccagcttacttcgggaaggctgagaacaggagaaatttgcntggaaacctgtgggaaggcggaggtttgcagtgagctcgaggctcaatgccatttgcacttccagccttaggcgacagagcgagaactctctctctctcaaaaaaaaaagagaaaaaattacctcccggaattatttgttctccttcaccccttcttcttttagattctcccgagttattcttttcagcgttatttaggcttgattcctttaatataacctcttctcgcatcaacggcgtgtgacattttctacacttttgtgggggaagaaggggggtttacgccgggtaaaaatttgggggagtctcacagacgccaacagaagaacatatctcagagaattctattgggggtataatggagctttacggacaccacaaaacttcttggagacaacaacagggtggtccctctattggatccctagttcaggagagagtctcgtggatcgctgtggccaatttctgtgaaccacggtgggacacataactttctccatctgtgtgtgtgaaagagtctcctgggggaatctaccactcgtgaaaggcatatatattttgtgggactccaataaaggggccttaaaaggcccctattggaattccagttccccatttttgaggttttacccagagggcacacacaaacc

SEQ ID NO: 633321 - DNA, 376 bp, Homo sapiens
  misc_feature (254)..(254): n is a, c, g, or t
  misc_feature (264)..(264): n is a, c, g, or t
tttttcctaagtccttaagacggatgaacttctacaggtaagtaggtagatctactaaacagaagtaaggaatgttggcatgaagaagctccctaggctgctggttggctgacgctctgactggtcatgctgcttaaggatgcgtctgagcaagatcggtcgtgacaggtaggtgtgtagaaaataacctatatgtggtggtccattttcagttctaagtgccttcatataggtttaagcaggctatgtggaantagagaaatnaagaagcagaaatgtactgagtcaccaccctgccctccttcctgctttcactttcaaccagcgaacaaatgcctatcagtaggagccccctcaactaccctcccagagcctt

SEQ ID NO: 633322 - DNA, 148 bp, Homo sapiens
agctcagagacctcagaatgaggtggaaaaatgcactacaatacatgtcataagattgtggcagactctggtgtgaaacatagcttttcaatttctgttccgatcttcaaacagtttcactagaatttcgtcgcgactggaggagacc

SEQ ID NO: 633323 - DNA, 389 bp, Homo sapiens
  misc_feature (7)..(7): n is a, c, g, or t
  misc_feature (10)..(10): n is a, c, g, or t
  misc_feature (164)..(164): n is a, c, g, or t
  misc_feature (166)..(166): n is a, c, g, or t
  misc_feature (188)..(188): n is a, c, g, or t
  misc_feature (197)..(197): n is a, c, g, or t
  misc_feature (205)..(205): n is a, c, g, or t
  misc_feature (217)..(217): n is a, c, g, or t
  misc_feature (377)..(377): n is a, c, g, or t
tcgtcgncangctttgcgatgaggaagctccagagactcaacagctgtgagaccaagtccagcaccagcagctcccagaagaccacgccagatgcgtctgagagctgcccagcccctctgacgacgtggaggcagaagagggagcagagtccgagccagcatgnanaggatcccgccagccatcctgnatctgagcntggtacanctgcacatgcantggatggagaagcgcagggccatcgaggcatgaagaagaagatggaggcgctgtcggcaaggcagccttgaaagctcggcaaaggctgcattcctgcatgtggtgaaagaagggcaaggccgaggcttgccccacccctcaaggcccgggagcacttttncaaaaggaagta

SEQ ID NO: 633324 - DNA, 359 bp, Homo sapiens
  misc_feature (76)..(77): n is a, c, g, or t
ggagcccgccctgctttaatgcgcatgcgggggagccgagacgagagcagtgctggcagggggagccgagacgcgnngcgatgctggcagggggagcacgctgcctggtcgccgcactctgcgcagagcatcttggatggcgctcaccacgtcacgtcttctgtgctttcggccaagcactgggccaggtggctgcctcagcctctcaaagggctgggattacaggcgtgcgaccggtgcccggccttttcttttgttgttgttgttgttggctgccaagtttggactccggtgccttcgcattcccgagctgtttttgcttctgggggcgaactccttctggcacatggggcagctgc

SEQ ID NO: 633325 - DNA, 307 bp, Homo sapiens
aggatcccgcgggccattggggacaccattttgttctgtactaagaaaaattcttctgccttggggtgctgttaatctataaccttacccccaaccccgtactctctgaaacatgtgctgtgtcaacttcagggttaaatgcattaagggcggtgcaagatgtgctttgttaaacagatgcttgaaggcagcatgctccttaagagtcatcaccactccctaatctcaagtacccagggacacaaacactgctgaaggccgaaggccgcaggggcacctctgcctagggaaaacccaagagaccctt

SEQ ID NO: 633326 - DNA, 791 bp, Homo sapiens
gatcgtaccactgcactgcagtctgggtgacaaagcaagactctgtctcaaaaaacaaacaaacaaacaaactttttgaaattgaattgcaatatgtctgctactttggcttgggctggacagtttatctaataagcaaggcagcttcttgtgtgctatggtaataagccttcttaacaggctaagcttccctcataagaactgtggtgtttctctttttttttttttttggttagggttggtttgggttttgggttgggtttggtttggtttttaaaatcagtatccaagtgttttataggggccaaaggtttaacttgtgcactattcccgtgtcagttaaaggccacgttgatattttcctaagttagcaaggctcactggctggctttctggcctcccttgcctccatccctctcccttcctaccttctctatttacctatttctctccctccctctcttctcctctcttttttttccccccgcaatatgcagcttttggatggtcacttgattttatagagacttgccagtcccagcaagatggggagtcaggcatggagcaggcatctcaggctaccagaaagaatgggtcacctagaactttcagtcaggcatcctcgtatggcatggtcctgtaagtcaattagttgataaatagttcccccttaatcccttaagttggttacggtataggtgttaatataggtaaggtgggactctacctaaaattgcgcatcatacttagtggcgtaaatatcttctcatatcttatctctccacgtttga

SEQ ID NO: 633327 - DNA, 1115 bp, Homo sapiens
agtatatagagagcactacatccgacgattctctcgcgacacagaaagacgtagttcatgattgtaatggagaagaaaagaaattagatgattcctgttctggctctgtaacctactcttattccgcactaattgtgcccaaagagatgattaagaaggcaaaacaacctgattgagaccacagcccaacatgaactccagttatgttaaatctttaaagcaggcaacagactaattcagaaatcagttctgctacaaaagtgacgtcagcttaaggctagtaagatctgtgatggctggatattacagaaggctcatcttgacatggcagaagaccttaagcttccgagtagcgagcgatggatgctgtaaacacagcgcccaataccaaagagcatacacagtcatagcatgctaagtagaaacaaaagcagcgaaaaggagaaaaaccttgggctagggaaacaagacggatatctcaaagacagaagcaacaaactacgcaacgaaaacaggaagatagggagcacatgccatcgacaggcccaacagaggaacaaagaaccactaacaagtaacggagcgtcgaactaagcacacagaaagcaacagcaaaacccacaatgaacaggccaacacgtgctgaacgataagacacatggaacaactagggacaagtacacacaacaccaaaaccccgaagaacataaagacgaaaacagtagagagtacaagacacgcacaggagaacatgaagcaaaacagggcacagcacaaaagaaaagcgagccccccagaggcaaaacacccagagagagaaaccacaaaaaaacacaacgcgccgaacagacaacaaaaacaaccaaaaaagaaacaaagaccaataggaagaaaagaagagaaacaatagatgaaccagcacaaacaagaagaacaaaccaaaacagaacgaatacacaaccacaaaaaaatacagagaaagaagtaaaagcacaacagagaaacaaagagagacaatacaagagaaaagaatgtagagatatcacacacaccacaccgtcaacacaccgaatcaacacacgacgcgataccgccccaccactgtattcgacagc

SEQ ID NO: 633328 - DNA, 159 bp, Homo sapiens
ggcagtggcataacgactgctttgactgtaagaagtacacccactcactggtgggaagaaggaacctcacagagagggacgacatcctgtgccccgactgtgggaaagactactgaatacaacacagagaagatactgcttgtgatctcacacacggat

SEQ ID NO: 633329 - DNA, 347 bp, Homo sapiens
  misc_feature (90)..(90): n is a, c, g, or t
  misc_feature (151)..(151): n is a, c, g, or t
  misc_feature (302)..(302): n is a, c, g, or t
tcgctctgttgcccaggctggagtgcagtggcacgatctcagctcactgcaacctctgcctcctgggttctagcgatttgcctgcctcantctctcaagtagctgggattacaggcatgcaccaccactcctggctaatttttgtattttnagtagaggcggggttttgccatcttgcctaagctggtctcgaactcctggcatcaagtgatccatccaccttggtcttccaaagtgctgggattacagacgtgagctacttcacctggccttgttggctctttttcaaaaaaagtttactngactcttgctttattgcaagtcccagaatggatttgatttaggga

SEQ ID NO: 633330 - DNA, 407 bp, Homo sapiens
atcaactcccgattataagcgtcaggaaaagaatctgagtcagttcaatgataggtaaggtcatgtgggtcacgtgtccactggatggggggccttccctgcctggcagccgaggcagagaaggagaggagacagagagaaagacagcttacgccattatttctgcatatcagggactattagtactttcactaattgactactgctatctagaaggcagagccaggtgtacaggatggaacatgaaggcagactaggagcatgaccactgaagcacagcatcacagggagacggttaggcctccggataactgtgggcgagtctgactcatgtcaggccctccacaagaggtggaggagcagagtcttctctaaactcccccggggaaagggagaccaccccgccc

SEQ ID NO: 633331 - DNA, 145 bp, Homo sapiens
cgccgtggccctggactcttttcctatcgttcacctacgaactgctgcttgcatcgcttgctcctcagtcctagcttcagtcaaacactggtttcctgtaaatcctgtgtgatactgtcatcctagattcactgaggaagtcctt

SEQ ID NO: 633332 - DNA, 131 bp, Homo sapiens
tggctgtctcctctttccggcttgatcactttgacgttgtctgtatgcgacgagacttgagattccggtggaaaatacccctcgtccacctaatgatattttcgatatagttttggacgaacctattgaat

SEQ ID NO: 633333 - DNA, 125 bp, Homo sapiens
atccggtgcatgggcagcccacctcatcttgcctgtgttgtctctctcgatcgttcaggcagccgtcatgacgcggtatgtgcgcagcgccttcatcgatgtgctaactgacgatcacatgcaga

SEQ ID NO: 633334 - DNA, 322 bp, Homo sapiens
acacttatgcagaactcacatatgcacacagcacatacatgtacacactacacacatgcctatacacatgacacagcatacacatctcacatatgtacatgtataaatacacatgtgagaacgtataaacttacatatccggagatgggatttctggccatctcaatggtataaccatctagagctcagaggtagagctaccattaacaaggtcccagattccagcccccagcagaaacaacaagagtcacccagagttcactgccccctctccaattctgtctacagcggactcaaaggaggatgcggtgaaggtcgacgc

SEQ ID NO: 633335 - DNA, 635 bp, Homo sapiens
atgaggaagatgaagagagacgaagtctcgctctgtcaccaggctggagtgcagtggcgtgatcttggctcactgcaacctctgcctccgggttcaagcaattctcctgcttcagcctcccgagtagcttgggactacagacgtgcgcaaccatgcccagctaattctttttttctttattttattttattttttttttttggagatggagtctcgctctgtcgcccaggctggagtgtagtggcgcgatctgggctcactgcaagctctgcctcccgggttcacgccattctcctgcctcagcttcctgagtagctgggactacaggcgcccaccagcacgcccagctaatattttatatatcttggtattttaagtaaagacggggtttcactggggttagccaggatggtctcgatccccgtgacatcgggactccgcgtgtcctcggtctcccaaagggcggggatcacgggcgtgagccaccgaacctgtgtcgattaacctctttaaagccggttttctcatccatacaagggacgatatgggcagcacccactgctgggtagggactattcgtgtgaacacaggtgcctatgtggtcctccatttccataattgtaatccttatccta

SEQ ID NO: 633336 - DNA, 440 bp, Homo sapiens
atcagaacggagaccgaaaataggatgatgaggagaataatttgatctaggttaacaagaacaagaagattactcctgtgcagcacattggaagaggaaaatgcatcgaacgtcaataagcacattctagaaactgaatggcatgagtcgagagggtaaaactggcctacaatctataagcacccacaaagagacagaagaaaagactgtttctgaggctctgctcatggaacctactgatgatggtaataccacgcccagaaatcatggagttgatgatgatggcgatgatgatggcgatgatggcggcactgatggccccaggcacagtgcaagtgatgactacttcatcccaagccaggcctttctggaggccgagagagctcaatccattgcctatcacctcaaaattgaggagcaaagaccccaaaaggggtacc

SEQ ID NO: 633337 - DNA, 1050 bp, Homo sapiens
ggacgcgtgggtcgacccacgcgtcagagaagccatcacgtatgtcgcagcagcatttcacccctgcaaagtctctaatagctctgagaccatgatgagatttgtaactagagatacacatcacattccaaagtccattctggctttcctattctgttccagattagtcgcttgtgttatatgcttcggaggggaacttaagtacacagatccttatctctccccatcaccctagcctcacaaaacaccagttgagagtcattttcaaggtacctgaagctctcgtagagctgacccgagagatctgtaactagacgtcccgcttaccttgaacgactgggttacgcctcaaaacgacgaggccactgcaacgcttcaacttgcgagaatgtctggcctatttcatgcgacgaaagagaaaatcgttttcttcaaagctatctgttgctcaggcacagggagcatgggatgaagtgctttgcctcgcaacttgatcttcctgacatgagaaggacatccggccctatgaagtctgtaggcgacagttagaattcgcagtgcgtggcatcgaatggagcgacaacgaacatctatgcttgttatggtgaatcggcacaccccaggggcaaatcaatgcaaatcgatggtacactaaagtcccaagcagtctgatgtgcacgtagacccaactgaaagggatcatgctcggtcgtgtgaacaggccttgctcagatttcactgtacactttttaagggtcgcaattcctccccgttctccattaaagccgacgtaaccagttggcctggaatacttacaaccaactttaaattgccctctaggaaacgcttaatagagggtttgccttatagcagctatgtaatacaaccttttaaggccacttcacacctggtgcgttggttctcactcgccggacgagtggcccttgcatccttaatagagccttacgctccccaatccttcgcactttccttggggtggcgtagccttgagggttgggaccccgaaattcctaaggctccatttgggtg

SEQ ID NO: 633338 - DNA, 159 bp, Homo sapiens
attagatggtctggaatgttttaattcaatttcattggattttctacatagccaatcatgtcatctgcagaaaagacagttttaattcctccttcccatctttatacccttcactttcttctctctgtcttactccattgctaggacttctagggcgat

SEQ ID NO: 633339 - DNA, 117 bp, Homo sapiens
  misc_feature (58)..(58): n is a, c, g, or t
  misc_feature (97)..(97): n is a, c, g, or t
attaggcaggtgtcacatacctgtagttccagctactcgagaggctgaagcaggaagntcactagagccaggtggtcagacctgcagtgaactgtgntcctgccactgtgctccagc

SEQ ID NO: 633340 - DNA, 401 bp, Homo sapiens
gtcactgctacctctgttacattaacctgacttgaaggacaaatcctactaccatgttttcatcccaaggtggtaactagatgtatcccatggaaatatacttagtgtcctatgcttctggcgttgtacgtatactgaagctgacggaaaagagagaaccttccatttcgtcttctaactgtatatcgtatttgagacggatatcgttgctatgtggcccaggcatgaaggtgcacgtgcgcatgtgatctcggcttcaactgtcaacactcacgtttcccgtgtttcatagcagatcctcctgtgcctcagatacccctaggatagttgcagaattacagggcacattgcgatccaatgtccaggtaatttcgcatttttcatcagagatggggtttcac

SEQ ID NO: 633341 - DNA, 249 bp, Homo sapiens
tctccggccacagcttctcgcatcagtgcccacgtgcttcaccctgtctgggtggaagtcctggggcgcgtcacggatgtcagcatgaaggggctgaaggcggatgttcttcgctgtttgcacagcacgtgaacggcatactcgccaggctcctgtggacagtagcgcacattacaggagccgtcgcccttgttgtcacattcgatcttagcctgcgatgggcctttcaacgagaagctgtggcgggcg

SEQ ID NO: 633342 - DNA, 622 bp, Homo sapiens
attccagaagtaccctcaaagacagagacaccaagaagaatcggaacatacaggcttggtcaaccccaatggaaatgtggggcttatcggagcagcaaggagacacacaattaaattttacagagaaaacccaaaaaaaaaaaaaaaaaaaaaaaaaaaaaaaatgtgtgggcggcgcccggcccgggggccccggaaaaggtttctataaacccctatccgtgtgtggggcgcgcggggggcccccagtggggtaatgtgtggaacaccggggggcccaaggcgtggtccccaagggaacacccggggccaaggaaaaaggggtgtggggttccccccccaaataaaaaaaacgcgcggggggggaacgccggcggcggttcgtgagaaccaacatcccagagaggggaggtccagggggcgcacatagcgggagtctttaacacacacggggagcgcccaaggcggagggccccgataaattaaaattaacccgcccgcgcgatgagggagaccaccacgagcaaaacgacaaggaagaagcgacacaaaaaacgcaaacaacagagcagacgagaagaaccaaagggaacagaagacgacagcaccagacgagtacacg

SEQ ID NO: 633343 - DNA, 550 bp, Homo sapiens
cggtgttacactgcaatctgtgctctccatgggccctctggatctgtgccagagccaacccatggagacagagcagggcccctttgcccattggaactcatggctgctgccctatacgtgatccaggggtgtctgagagcctcttggattgtcgagccgtttcctgcaatgaggattgggaaacagtgatgatccatgaggacagaagttgggagcaaccatctccgttctcactctttttagacctatattttggcattatttggccactgccgtcaaaccagtggaatggaggatgcagagatggatgggagctggctgcaaatcctgcactccaggggaaggaagcagtccagacagacccctcaatagagtggccttgttacctacacccatactattagtcccaaagctgacaggcctaagacgagtcataaatgctccaatgagcttcccgaatcttccaaaagccaactctccattgctaaatccctggtctgtttttctgtttgcctccaggaggcaccgattgcaggcggggctcctctag

SEQ ID NO: 633344 - DNA, 733 bp, Homo sapiens
gaacagcgagaagtcccagaacatactgtcgtcatccgtggcgagcaggctgtctcggtcatcctgaagcttggacgcacgcaagtgcgagagcggaacctgaatcccaaagcagcctgttcgaagagcggctgagaagaggaagaaggtgtcaggtgtggcttggagacccccagatggtgcttgtcagcgtcccgcacccaggcgctgagcgagagcccacgaaccccgccgggcacatgtgaacaggtatgcctccgtgggacgagccacccgacgtttcagccctgtgctctggccccaggaacggccactcgagaccccggtgcttcatccacatccatgacctcagcacacctgttgtcagcactcgagccaacaccgaaccgtgacaaggttcggagctgatgcggcggcgggcaaggctgacactgggtccaggagctccctggggccctggcctaccagtcactggcctcgcgtccccctgtccccgaactctcagccaccgttgtcactctgtgacctgtcccatggagtcctgatatctgcatcttggacctgttgcctgggctgacaggagcattaacaactaggaccacttaaacagcacccgtgaacagcacactgaacagaccatacactatggctgacacaacacaccagatgcctacctatcaaaagcgagcgaacgggccccctatcactcaagggggacgcagtggaaacctga

SEQ ID NO: 633345 - DNA, 379 bp, Homo sapiens
acaccaaagacgccgccatgggaattgcataataaccgtacagtaactgccgactcgtatcagcagcacccggatcccatggttcgcaaaactggtaaaacgcgccaagggtaaatgttggccaccactcatattaaagtaatggtcagcaagacgcacgatggtttgtaatcgaccaaacaacaagccaccaaatgctgcgaccaccgcaataaccttacgtgagacccctgaggccagaaaatggccagcaaatcagcaaatgatcaggcattaccattatctggcatgataaagacaagcagcaacctcaaagctggtaccccccaaacatcaaaacgggcaacagcttgttcgcgtattggcacatgtctttccc

SEQ ID NO: 633346 - DNA, 568 bp, Homo sapiens
  misc_feature (37)..(37): n is a, c, g, or t
aagcgggtgacgcccggcggtgattataccgcgcaanccatattggggtctcttttcgggagggacgagaggttattttgccccttttacacgcgggggcgtggtgtgcgcgaccccaaaggggggggaagggttgtttcccgcgggtttttttattttcccccccactcgacaaaggggggtgtttttgcgcccacaaaacagggggttttttaaatggttgtaatccccccccccccttccacaaaagggggggggggggggggggggggggtttttaaaaaaaaacccttttttttttcccccccggtcgcgggggggccccccccccctttttttttcccccaaaaaaaaaccggggggggcccccccccccggttttttttttgggggcgggggggggataatttttttccccgggaagagattttcccttttggccttttttggggcccccaaaaaaaaattttttttaaaaaaaagggggggggcgggggggcatttcccggggattttttcccccccccggcggtcccgtttttaaaaaaaaaaacccccttttttttta

SEQ ID NO: 633347 - DNA, 369 bp, Homo sapiens
agacattccagctgatcccccagaaattcaaaggatcattagagggtactatgagcaactatatgccaataagttggaaaacctagaggcaattgttacattcctagacacatacaacctagcaagattgaaccaggaagaaacccaaaacttgagtaggccaataataagtaatgtgatcaaagctataataaaaagtctttcagcaacaaaagcccaggacccatcaacttccctcctgattttttttttcaaattaaaattaattttttcaaactatttcaaaaaatagaggaggtgggaatatgtcgaaacctattttatgaggccagtaataccctgataccaaaatcagacaaagattcatca

SEQ ID NO: 633348 - DNA, 151 bp, Homo sapiens
  misc_feature (27)..(27): n is a, c, g, or t
  misc_feature (65)..(65): n is a, c, g, or t
  misc_feature (97)..(97): n is a, c, g, or t
  misc_feature (140)..(141): n is a, c, g, or t
caaaaacataataaagtcaccaagcanccactcacaatctgaatgtatataatgatccagcaggnaaggcatgttgcagtggtctgtgactgacttnttggaaggggtgtgaaggagcttttacccctcccaaatccaannaagcttcatc

SEQ ID NO: 633349 - DNA, 282 bp, Homo sapiens
agcagctgaagactgatgctgcctgatcgccttggaagccccctggaccattacggatgctgagctttggataactcttacagtagaggattcccaactatatgaagacaccctagctggacgatcagttcttattaagaacctgacccctcaaactctacaacctcgatggactggaccctacttagtcatctatagtaccccaactgccgtccgcctgcaggatcctccccactgggttcaccgttccagaataaagctgtgcccatcggaaaaaaaaaa

SEQ ID NO: 633350 - DNA, 800 bp, Homo sapiens
ggtttcttggagctaccacaaacttaaaaccatgaaacatctattatgctactatgtgtgttactagttaagtcccaaggctgtcaacgacactgaggagggtttcttcagtgcccgtggtcatcgacccttgacaagaagcgagaagaggctccagctgaggcctgccccagtgaatgggacatagggtttatttaggacttaaatacagatgtggtccagtggcagtgggctgtgaaggaccgctactattgtaaagagtatgtagtttatatcacatttctacttagacactctccactttagcaactctccattataacccaaaatcacaaggccttggttccttgcacatcctgagttccaacggacaggcagcgagttcaaagtgtccttcacagatcagcacgtgaaatctctctgggtaggccatacacggcattcctaagacttagaatctgaaacgcatatcttacttagaccataagatacttctcaggttatgcttgaggtacagctgccggaatgcatcactgcactcaccacaaggtcaacacatatcacgatatcatgcacggccaaatgcactcacccagaaatcacggcaccccacgatagcaacctctacaatcaacccgaaacccacaaagaacaaaaacccaaccagacaaacacccgagacctcagaacacactccacccaccacgcaaaggaccaagagcgaaacacacccacacgcaccacacaccgaacaaacaatgaaacaacaacaaacagcggacgcggcaaaaacacgcgac

SEQ ID NO: 633351 - DNA, 192 bp, Homo sapiens
aagtgtcaggtgcatctaagctttattaatattcactcatttactcctcccttgtcaagcttatcttctgagatacagatcacggaccatggtgtctaatcattcctccattgcatccattttttgcaagtctgtgtcttaccactaatctcttgtaagacttgtgtctaacctattttcatattcttaatg

SEQ ID NO: 633352 - DNA, 820 bp, Homo sapiens
gtgcggtgctgtggggggggtgtggtggtggtgtggcgtgtcgaccagtttccgagtgttagcgccggtttctgggggacgccggttcccgccctttcttgtggttgacgcggtcgccccgttggttcgtggtagagcgcctccctcttagggctcgtttctttctccgcaggcggtggccgggcgcccggattctctttgtgcgggaggagccgtccccgcttatatttgcgtgtgcgcacacccttattccggatgtttctcactctgccgggtcccgggcacatatttcgccgcggtattctcggcccccttactcgctgcccgcggagggctacatctgctccgcgacaccgcgagactgcgtgcttatggaggataacggctttataatagctcgcaccacataaggtgggtcgaatcggcccagtagtaaatgttgttgcgtcacacttgaaagagaaattgtataaatgcgctgttcttcgctagagttttctttgttggagaatttttatatggggaattattaactgagaaacccgaggagagtgacacactttctcagggggacgccagcataatacttttgtaataagcagcacacccacacgtgtagcgccagtccccactacggcgggatatgcggatattttatgcccctcgcagcacgtcatcacaataatttggctgggaacaactccaacccctcttttttctaggtcatttaatcccctttgggaaaacctacatccaatttaaattttaacctttttggaaaaaccccccaaaaaatttgggggcccaaaaccccaaaaaa

SEQ ID NO: 633353 - DNA, 732 bp, Homo sapiens
tgcagtggctcaagcctgtaatcccaggattttgggaggccaaggcgggtggatcacgaggtcaggagttccagaccatcctggctaacaaggtgaaacgccgtgtctactaaaaacacaaaaaaattatccgggcattggtggcgggcacctgtagtcccagctactcgggaggctgagacagaagaatggcgtgaacccaggaggcggagcttgcagtgagccgagatcgcaccactgcactccagcctgggcgacagagcaagactccatcttaaataaataacataaatggctgggtgcagtggcttatgcctgtaatcccagcactttgggaggccaaggcaggcgggtcacctgaggtcaggagttcaagactagcctgaccaacacggagaaaccccgtctctactaaaaaataccaaaaattagccgggcatggtggtgcatgcctgtaatcccagctactcgggaggccgaggcaggagaattgcttgaacctgggaggcggaggctgcagtaagccgagatggcaccactgcattccagcctgggtgacgagagcgagactctgtcgcaaaacaacacaggtactggtgctatttccattattacaaaccaaaaagcccaaaaagacactcacccaaaaatcagtccctcttggactacaatctaaatgacattcatttataggtatattacaactttcagataatgacacatttacatgtc

SEQ ID NO: 633354 - DNA, 147 bp, Homo sapiens
  misc_feature (109)..(109): n is a, c, g, or t
  misc_feature (135)..(135): n is a, c, g, or t
  misc_feature (137)..(137): n is a, c, g, or t
atttcccatataaaaccttgtcatttaagcaactgggatactttgtaatctccttttgaactatgatagactctaaaccccttaatgttgaaagggcagttatttgtgnaatttcctgtgggtttttaaggatgntnccccgtttcc

SEQ ID NO: 633355 - DNA, 271 bp, Homo sapiens
agaggcacaagggaggaagcagagagggatagggaaggaggagaggaagggacaaaaccttcaaccacttagtgatgaaatccagtgaagggaaggtgtggggggagttcggagggtgatacaacagtgcataaattgtgcctccccagaacgctcctcagaaggtggaggggacagaggctgcagccttggggcattggtgtgggctccagccggtctcctcacccagtgaacccacacaggaactgggcacttgcctgacgactgccag

SEQ ID NO: 633356 - DNA, 963 bp, Homo sapiens
  misc_feature (268)..(268): n is a, c, g, or t
  misc_feature (377)..(377): n is a, c, g, or t
  misc_feature (397)..(397): n is a, c, g, or t
  misc_feature (422)..(422): n is a, c, g, or t
  misc_feature (482)..(483): n is a, c, g, or t
  misc_feature (512)..(512): n is a, c, g, or t
  misc_feature (516)..(516): n is a, c, g, or t
  misc_feature (524)..(524): n is a, c, g, or t
  misc_feature (535)..(535): n is a, c, g, or t
  misc_feature (537)..(537): n is a, c, g, or t
  misc_feature (544)..(544): n is a, c, g, or t
  misc_feature (558)..(558): n is a, c, g, or t
  misc_feature (567)..(567): n is a, c, g, or t
  misc_feature (574)..(574): n is a, c, g, or t
  misc_feature (585)..(585): n is a, c, g, or t
  misc_feature (597)..(597): n is a, c, g, or t
  misc_feature (610)..(610): n is a, c, g, or t
  misc_feature (613)..(613): n is a, c, g, or t
  misc_feature (634)..(634): n is a, c, g, or t
  misc_feature (638)..(638): n is a, c, g, or t
  misc_feature (642)..(644): n is a, c, g, or t
  misc_feature (656)..(656): n is a, c, g, or t
  misc_feature (659)..(659): n is a, c, g, or t
  misc_feature (669)..(669): n is a, c, g, or t
gtggaggggcagcctgctaaggatggaaaggagttggtcagcccttgcttgtctcccagtttcaacggacagtggtaacacgcagaagtcacgtacagggtttcaggccagaaagcagcgtgcatagcctgcacagtagctgtgtgctgccagtagtgtcatgaggtccttctagatacatgagtgcacaggacaggagtgaacgttgaagcatgtggacttctatgctttctcctactattacgaccttgcagctggtgtgggcctnatagatgcggagaagggaggcagcctggtggtgggggacttcgagatcgcagccaagtacgtgtgtcggaccctggagacacagccgcagagcagccccttctcatgcntggacctcacctacgtcagnctgctacttcaggagttcggctttnccaggagcaaagtgctgaagctcactcggaaaattgacaatgttgagaccagctgggctnntgggggccattatttattacatcgactcnctgnacagacanaagagtccagncntcatagnggccgagccatccntgtccccgncagcagngtctgtgtgtntgcataaccctnctgtcctggacgnganttcatcctgaggagccacagnacangccnnngctggcactttntgnacactggctntgggacttgtaaaaaggcctgggtgcttgcccttggcaatagagctttttaccagtcacaattttggcccgaaggggctgtctgggacctggagccctgctctaatgtcacccttgtctgcctgggcctccaaagttgggcatgggacccagcgaacagaagcaacaggcaacaccacttgcaggggtgcagttgttgatacctgacatgtcccatcaccaatgaccccgtaacgaggggctgctgctgcttgctgtgcattgtccctggcaatgggaaggtctggccttccca

SEQ ID NO: 633357 - DNA, 348 bp, Homo sapiens
actacagacaccagactttggatagctcagacgacaggaccagtctattggctcatgtggctccccctgctggcgggaggccttcgagaatgagatgaggcatttctcatccctccctcttgcttctttctgtgcatcatcttccttctctcgagcagctccctctgcacacttaacggagcccagctgctcctgtttcacaccctgcagcttcctcaccagccagctgccccaccaaccagcggtctggtccacggaaacgtgtcctgagtggggtctgcttatcaacgtctgcttcacagagctatccctggaaatccctgctgcgacgggcgaagatcaccagcc

SEQ ID NO: 633358 - DNA, 443 bp, Homo sapiens
tgatgatacctgcttatgtggattcttttccacactgctttcatttttaagtataaagacttagaaaactagaataatgcttttacaaataattaaaagtatgtgatgttctgggttttttccttctttttagaaccctgtatttaaacaagccttctttttaagtcttgtttgaaatttaagtctcagatcttttggataccaaatcaaaaacccaacgggtaaaacagggcagtatttgtgttcctaattttaaaaagctttttgtaaagtttaataatatagatgcatgtacaacacttccccttgagtagcacatcaacatacagcattgtacattacaatgaaaatgtgtgagttcatgcgcagaaatttgtagtaggcaaggagccctttgtaacctttatactgtaaataaaaaagttgctttagtcaaaaaaaaa

SEQ ID NO: 633359 - DNA, 186 bp, Homo sapiens
  misc_feature (114)..(114): n is a, c, g, or t
tgtcgctgagagtcatcgatagacatggaggacgtctctgcccggaccctcagatcgtgtgcccagaccttccctgccaaacagagctgtccgtggcacagtgcacgcagcggnccgtgacatcgtcttcctgctggacggctccgagcgactgggtgcactgtgctacgaccggtaccagctcga

SEQ ID NO: 633360 - DNA, 308 bp, Homo sapiens
cgactctcgatgatcccccgccattacaactatctaatatcactgcgcccgctcattaggggatagccatgctaggtttatagatagttgggttgttacgtgtaacatacgtaggcaggagtccgaggagcttagttagtggctataaaaatgattacggatactattattagagatcaggttcgtcctttaatgtcgtgtatggttatcatctgtcttgaggttcgtttgattactcattgttgggtcgtgattagtcggtccttgatgagatagttgtaaatggcgagatagttgtaaatggcgag

SEQ ID NO: 633361 - DNA, 155 bp, Homo sapiens
tgaggtgggttgaccctttgatttccgtttcttctcaccttgtgagtagaagtcacagacgggcacacacgcacaccacggtcaggagtcccgagacagcacgaggtggaggcctggtctcaccgcctctcacgctatgtccatcacctggcagg

SEQ ID NO: 633362 - DNA, 101 bp, Homo sapiens
cgcggtggctcatgcctgtaatcccagcactttgggaggccaggcgctgtatcacaggtccggcaatcgaaaccatcctgcttaaacaggaaaccgtctta

SEQ ID NO: 633363 - DNA, 180 bp, Homo sapiens
gcggcgtgcacttatatatcactgtgaacttctcaagagagagtataaacgaagcacgaatgataagaatggcaggtgaaaagagatgggtcagtgaaaaactatagctaaaatatgtaaacctttctaagaaaaccgcttgccttcatcttgagttggaatatatttaaataaattgtt

SEQ ID NO: 633364 - DNA, 222 bp, Homo sapiens
gatcacgaaggtcaggagttgagaccatcctggctaacacagtgaaaccccatctctattggcaataaaaaaaacaagccaggcatggtggcacgttggccttgtagtcccagctacttggggaggctaaggcaggagaatcgcttgaacccgggaggcagaggttgcagtcagccgagattgtgccactgcactccagcctgggtgacaagagcaagactg

SEQ ID NO: 633365 - DNA, 354 bp, Homo sapiens
tatttaaaagaccacctttttttggaacaaatataaagtcttcaaggttttacaaattggcaaaaaggctttaagcccaaaaaaatacctttgaaaaaggaaaggtttggtgttttattggggatacccttaatcctgccaacatgcataacatttgccaaaaaagctcatgcttttttggaaaaaaaaaaaaaggggaggtacccgcttttttggcggattataaattcatggcttcagccagtttttttttttcagggatcccatttacctggagtcgggtgggggggaatctgagtctgatggggcaagttcctgtccccctttaggggggctttttactcgacccctggt

SEQ ID NO: 633366 - DNA, 902 bp, Homo sapiens
  misc_feature (303)..(303): n is a, c, g, or t
  misc_feature (386)..(386): n is a, c, g, or t
agtacttatcttgtagcactactgctagtttctgtcgcatacatgccactcaaccaggatcgcttaagtgcgccagagtgtgtgatgactgtcgtgttgcactcattctaagtgactgacactgggcatgaggcacggccacaagactacacataggactatggccgtggtcccatgacaatcatttcggcatcgagagcagcaatcagaacacaaacgtatgtgttacagtactacattcctgcgctgactattgctgctacgtagcatcgataacgaattgtattgcgcacttgtagattncgaaacatgccgataaacgcattgcgacgcgcgcgtaatgtggcggcgcgtgccagagttaactctcggttgattgcctgggncttctgcctttttcctggtggaactgagccatcttgccagtgggccggggaggatgacgcattctaaatcttactagggggattcaagggtatgcgtacttaaacgtacccagaaacactcgtggcacaacgatcggttgccatatacatcccgttcgcatcgtttttgctataacacttgtgcttggcgaaatatgcaccctttctactatgtgcgttagtgcttgcgtcgcctgtcgtaagggcccaccaattagtccagtctcgtgagggtgtggcccagcagtgtgaagtaacttggcattgtagctcactactcgggggcaatctgccgagttactgcttggggagtcgcgtgaagcattagcatctgcatcattgtagactccttgcacgagatgcgtgtgacttccaagataggatctagatcacctatccgctcctccaacagaattcgtttgaaacgtatctactgtctagaccttgtggctgtcaattaatcggaaagcaatgagt

SEQ ID NO: 633367 - DNA, 346 bp, Homo sapiens
ttcgattggcggcacttagggagaccctgcttctgaaaaatccaaaaactagctgggcatggtggcttatcgccatgccttcccgctacttgggaggctgagacaggaggatcacttgagccaaggaggtcaaggctgcagagagctgtgatactgctactgacttccagcctgggtgacagagtaggaccctgtctcaataaataaatgaatcaggtctgggcgtggtggcttaatgcctgtaatcccagcactttgggagaccgaggtgggtggatcacttgaggtcaggaattcgagaccagcctggctaacatgatgaaaccccgtctctactaaagataca

SEQ ID NO: 633368 - DNA, 138 bp, Homo sapiens
aggattgataggttgctcagctcatagaaaagtgcagatccctgctgggacatccagaaggacctaaaagaccgtgtgactagtgagctctagtgctgtagaaatttaaaaactacaatgtgattaacccgagcgcta

SEQ ID NO: 633369 - DNA, 922 bp, Homo sapiens
ctgcagcaaaaatcagaaaagagaatccagttgttgtggctgaacaataattcagagaatataaacttacttcttgtgaagagactgaaactttgtttctattctctaatatactcgtaggaaaacattagagagcagatgcggtggccattcttctttgaatgttctccagagttctttacatcacacttgtctgtcttataaattgactatctctacggatgtcgggggtgttagttacacggcagaattggatagatacagccctacaaatgtatatgccctcccctgaaaaaaaattggatgaaaatctgcacagcaaagtgaaacacacagataataggaacaaaatgtagtctcccatgctgccaaacaaaataaactgaccatctctgcatgttcgcagcactatctgccttttgggaactgtaatcaacggtataactcttctggctagttgttatgtgcctgtattttttctaaaaatggtacaccagaaaaggactggcagctctaccttctaccatagcttaaacttcaccctctttaatttcacaacatattctttggaaagcaggaagaaatgctcataaagaggatcagaccttcttcccgtgaaaacaggtattggcgccatatattagcctggttaaatcggtcatctaaagctgcaatacgaccttctgtgcacaggctaacatccgacactgctataagtaaaccctcaagcacaacagggtctgagataccttgaactatgactgccggcccaacagttgcttaccacgcaaagctccacactgccccatactggccaaaaacaacccctcggccccacgcacacgaaaaccccacaacgcgcgccacacaccccccccgggaagacccacccccacccacaacccaacaccgcgcccgaaaa

SEQ ID NO: 633370 - DNA, 145 bp, Homo sapiens
agcttgttaactttgtaagatgcaaagaggtggactcaagtttacatgactgtgctgcccctttcacatcaaagaactactgacacgaaggccgagcctgcctttcccatctgtctatctatccggctggcagggaaggaaagaa

SEQ ID NO: 633371 - DNA, 534 bp, Homo sapiens
aagatacgagtagacatcatggagaaccagatcatggacttccgcatgcagctggttcgcctctgctacaattctaaccacgaaaacctgaagcctcagtacttggaacagctacctgcacagctgaaacaattctcattgttcctggggaaattcacatggtttgcaggagaaaagctgacctttgtggattttctcacctatgatgtcttggatcagaaccgtatatttgagcccaagtgtctggatgagttcccaaacctgaaggctttcatgtgccgttttgaggctttggagaagattgctgcattcctgcagtctgaccgcttcttcaagatgccaatcaataacaagatggccaagtggggtaacaagtgcttatgctgagccagagctcgctgctgctgagccatcttgccctgaggggcccacactcttagctcactgtcagtcttgttccatcctgtcctgagggcccccactctgtctcctctgctctttctaataaacagcagttgcattaaaaaaaaaaaa

SEQ ID NO: 633372 - DNA, 121 bp, Homo sapiens
tttccaaagcgagatgctgacccccacagaaccaccaccctgccggtggagctcgagtgccctgacggcgaggtcatgaacgaagaacatgatgttcatcaagacctgtgcctgccattac

SEQ ID NO: 633373 - DNA, 947 bp, Homo sapiens
  misc_feature (340)..(340): n is a, c, g, or t
  misc_feature (815)..(818): n is a, c, g, or t
  misc_feature (823)..(824): n is a, c, g, or t
  misc_feature (826)..(826): n is a, c, g, or t
  misc_feature (828)..(828): n is a, c, g, or t
  misc_feature (835)..(836): n is a, c, g, or t
gtccaataaataaataattcatagagtaagccatgtggtgactacattaattaagtcttagtacatccttaatcctattcctgaaactttgacttaagtacaagagaaggcctggccaatgacttctgtcttgactagttcatttctgcatagcacctaggccaagaaaacagaccacatcagtcatcatcacccaacaccatatctgccttacctttgctggtattcttgtgcattttatattttcaaaaatgaaaattttaaaaattggttatcttttcctaaaattctgaacagttactatgttgtgattttgtaggactttggaattgtcattacnaaaatcagttatatagttttataggagtagtcaagtcggactaattgttttcttctctgagaggttactcagcagttatttcagggaaatgtgatagatgtagtgtatctaaacttctgtagggctttaccaggctatatataagagaaaaaatatggcctcgatcaggaattgttaaactttttctttaaagggccatatagtacatattttaggttctgcagactatgcagcccctgtcccaagtattcagctctgtcattgtacatccacagacaggacagaaaagaatgagcaagaatatgttccagtaaaactttatttacaaaagcagatggcagcccctgggccttagctttctgccccagatgggtaaataacaagggaaactattctatgtgttgatttttagttcagtttgggtagagtttcctagtggccacaagactctcttaacttgtgctgttttgtgttnnnnataannantnctgaggnnatatgaaaggcttgataattatatgtgagaatacataaaccaaagttatataaatagttacttacagtaaattgaagtacggttgtgatatgttggtaccgtctaaaggga

SEQ ID NO: 633374 - DNA, 951 bp, Homo sapiens
gatcgtgagcgtacttcgtttacttcaaccaccaacaaggagacccgagggatcatactgtagatcatattggtcaggtaagacgtaccacgactctgaaagagaccctagtctgcattcatagtgactctacatcctactcatgagacatgtccacgccgggacaaccctgcggaaccacatcatccatgtatgtagtgctgatgcgaccaaagacgggatatatcgactcaacattgcattactccgtcaaagtggaaacttcgctaaagtagtcatactattgtcatatgacctttgtagggccagttagtatatcagtactgaagacatggaactcattgggagagagtcgcgatcctagacgtaaatagtcctgtaactggagacccaagggatgcaatgaccccgagaagggtaggccgagaccttgcgtgagagatgtttactaatcgcataggtccttcgtcgtaaaactcgaacttaagcacgcccaggtaaccctgataaagctcacacgtaatggttggttttgtttaaccagacacggaaattgggcgaaaaaaaaaaggggggacttacggggtttgcataggaaggctcgaagttttgggtaagaacgaggaacgacgtgtggccgaaaggtaatatggggaaaggaatagggggagaaagggatgagggttaacgtgtgaaagggggcgccggaattgtgggtcccttttcaagcccattgtggaatgcgacactaattgacaccccatttgtgccagaaagttcctaaggttgcaatcgcgaggggtacgaccattccttaatcggaaagacgcgggggggccacacaaattacgccgatgggcgacaacccccgtatcacacgcagatggggccacacagggaaacgaaagctctgggtttggaatatagcgcctttcccaaaaaggctttaac

SEQ ID NO: 633375 - DNA, 452 bp, Homo sapiens
  misc_feature (18)..(18): n is a, c, g, or t
  misc_feature (249)..(249): n is a, c, g, or t
ggcactagtgtgtttatncagcactattcacaatagcaaaggtatggaattaacctaagtgtccatctacggaggactggatgaagacaatgttctatatacatgtatctcacattccatgtagtatagtattttagatacatatgtgtgtgtgtgtgtgtgtgtgtgtgtgtgtgtcacggtgtatatatatactataaaagtttggaggtgggagggaggtgagggttgaaaaatcacctactgggnacaatattcactattctggtgaatattctaaaaattctaagaattctggtgaatcactaacagcccagacttcaccactatgcaatatacgcatgtaggaaatcagtacttgtgccccctaaatatctgaaaataaaaatttaataaaagaggagtttgaggctgcagcgaactatgatcatgatactgcactccagcccagg

SEQ ID NO: 633376 - DNA, 768 bp, Homo sapiens
ggcggagctcgcgcaaagggaggtgtgtctgcgctcgcgtggtcatggaggcgctgccgctgctagaccgtgacaactccggaccacgggcgtcacgcgaaggctggttctgctgccgatactgtgtgttcctgctgtcggttggagctgtgcagggctgggagacatgaggagaggcccctggactcggcgaagaggagtgcctaccttctactgctgggtggactataagtgtacctcgcgcgtgtatgacggcatctccaggcgtactcgtgtcgccgcaccacgtccctctgacaccctaaagcaaagccgaaagattctccaacgccagggctctactgggaaggaacatgctgtgatcgatgtggagaacttgtaacggagctgaatgttatacatgagtgagtctgtgtgggaatattccgtgggtttgacttgtctatcttaacgcgaggtgtgagattgaagcaatatgtgttgatccgaagctgaaacataaagatcgattatgggtagatctagaagtatgataggattctccaaatctattcaatgacatggaacgtggtgatgcatgtctcctggtcggcagttcgaccatctatataaacgcgatatgttggacctgtgcattgagtaactccgtcgcaagcacataggaaggagcttgtggcccgactcaatggattccaactatcttttcaggatttggaccgatcgaggatctgtcataaggacctaatgggtgttatcaccgtagaggga

SEQ ID NO: 633377 - DNA, 236 bp, Homo sapiens
  misc_feature (210)..(210): n is a, c, g, or t
ccctcgaaacccagtatggcaaaatgtttactacggactctgtgtgagaggttacataggtgcttactatactgttttgtttctgaatgttggaactttctctataattaataaaaatatctactgagtgagcttttctgttttaacgtggtgttttccgaggggggtatccgacgctcgatcttcgctgactcgtcgttcatagccttntttccttggtctgtaaatatcccttg

SEQ ID NO: 633378 - DNA, 134 bp, Homo sapiens
ggcgacaatccactttcttatctcaggaatcagcatatttcagaaatatgggttttgtgtattttctaaaatcaagcagcagtctgtttcaaccaagatgattttgatttggaagttagagtcaacagaagctg

SEQ ID NO: 633379 - DNA, 122 bp, Homo sapiens
ggcccggctacggggatccgggatttgctttattcagcaggaactgcaaagtctgtgtttattcttgactgggggacacacacacggacacacacacacacggatccagaggagggggggct

SEQ ID NO: 633380 - DNA, 332 bp, Homo sapiens
gagcgattaagcttgatatcgaattaacggccgattcgattacggctgcgagactcagctagaagggaataggtttggtccaagcctttctattagctcttagtaagattacgcatgcaagaatccccgttccagtgagttccccctctaaatctcatcgatccaaaggtccaagcatcaagcgcgcagcaatgcagctcaaaacgtttagcctagccattaagctatgctaaccccagggttggtcaatttcgtgccagccaccgcggtcacaggattaaccctagtcaatagaagccggcgtaaagagtgttttaaatcaccccctcccc

SEQ ID NO: 633381 - DNA, 373 bp, Homo sapiens
cggacatcacactcacattctcacagggacacacactgacgagcactcacacgcgcgaatcgcatatgtacaacacactctgaattactctctgttaggtgtcgtgcctgtacatctccagaccttgtgtgcccttccctttgtacagaagagtgttccctctcttcatgcgctaacaccacagagtgtatatcatcgcttgagagtattacacattgaaaatccccccctgagtgtgtctgaggttcccgatatgtgtgcttacatagcaccctctctgcccagagcatctctcatctcgatgtgtgagtatgtgaagattacttgttttctcctcagggactattgttcgctcccagcagagtaagccccc

SEQ ID NO: 633382 - DNA, 625 bp, Homo sapiens
accgagcggtggcaggtcatggcatctgcgatgtaacgacgacatatacaacgctcatcgtcacagccacatgcatgcgaaatcatcttcctcagagtaatctccatcataatcggaggctccgtcaactgactcacgatgccccgtaagtaatcggtgcccgcggagtatggcagtctcccacgtcatagacacaatcactgtgccgggtgatccatacatagaggtcgacactgtcaatagctactgcaaagtcttgggcatcctggctcgtcggttttacactggcacgatcggtctaggtcattcgtactctgtgaaaatatggtgatgatgatcacaaatgcagttccgttagaggagctgaaataatgtctttgagattatatgccagctggtagccatgacaattcatgggcgggtggaattgctttgatcagaagtcatctctttttgctgtctccatgccttcattatcagtctctccagattcttgtctccgtgtctctcctgtcctgtgatgttctgcatactatattggattacctgcggtatgactagctaaaatgtagtgtaactcagatagaatgcattcttctggtcctgcagcattgaaaccttttct

SEQ ID NO: 633383 - DNA, 1111 bp, Homo sapiens
ggctgggcgagcgcgagcgcaaggcaccggcaggcatggcagctgctcgccggtatggagctcatgctaatacttgagaacgacatttcatcgaagataacctctgggagaaagcagaaaaaccctttgcccagggccaccgcgaacaagcataggcagcaaggaacggttatccacgagattttttaaaacccttgttctcagcaatattaacaagcattatttttaatcagaagattcaatgtggctaatgcagggacagatttcactcaaatattgactctgacgttggagttcgtggggggttcgcccaaattttggcattctatcagccaagggtgctatggcctgccgggaaattgcctttaccagaatattccagaagtacaggcttgccaaaagactggacaccttccagaatttttgcccccttcaaaagcttgggagggcttctcatccgttgaatggcaacgacttgccaaaggaagcactcggtttgcaccaacatacagacacaaagaacccgaggtttgggcacaaacacgcccttcaaaacacttgagctgcacaccaccttgaacggcgcttcataaacttctatatccgaagaagtgtgcccttgacaacttttcttggccattgttttggaacacacggaactttacagtggggatacctgggtacatcccttgggacgcactattttaacttcctggcgctgcgcaaccctgggtggctacaccattttggccacgccccttaaagccacgcccacttgtggttactcttttcaggcattaaactttgcgctgttcggagcacttgcctcacttccactttttgcatttgcccattgtacttgcatgttccccacgggctaaggcctcatataaaaagcgccacgggtatatactttcccaaaatggtccacatgtaacgggacccagcgggtttgtacgcacgatatctatccatttgtgttctcacgagcaacagaattgctctatcaccaccgcttgtgctttgtttatatcctccaacaagaaaaaatatcactgtgttggcccacttggggcgacataatataacgccccgcagtgcatatttcacc

SEQ ID NO: 633384 - DNA, 349 bp, Homo sapiens
  misc_feature (280)..(280): n is a, c, g, or t
tccagggggaaaagggaccccgcctaaaaccccaaagggaaggaaccccaaaaaacccattacccccaaaagggaaaatttgggcccccccgggggaatttaagacaaaaaaaaaaggaaaggggacccccaaaagggaagccccagaagggggccccgtaaaaaaggggaaaaaaaaaacccccccgggggaaaacggaaaattaagatcggccccccaggggagaaaacaaccgggaccaaaaggggcccaaattgggagagggcccccccccacaanatccctccttgggagtggaaaaaacccctttccccggggggggggaacacccaaacccccccggggggg

SEQ ID NO: 633385 - DNA, 406 bp, Homo sapiens
  misc_feature (392)..(393): n is a, c, g, or t
tatgatgtaaattttgcctattcgattttcaccctcagtttcccttaaaatgcaaattcaaggctatttagctgacaaccgccttagagtagtaaaacaggttatcaagaattcgaaggtgtggctgggcacggtggctcacgtctgtaatcctagcatttgggagctgagccgcaaagatctcttgaggtcaggagttcaaaaccatcttggccaacatgttgaaaccccgtctctactaaaaatacaaaaaaaattagccaggtgtggtgcaggtgcctataatcccagctactcaggaagctgaggcaggagaatcacttgaaccaggaggcagaggttgcagtgagtcgagatcaagccattgcactccagcctgggcaacagaagtnnctctgtctcaaat

SEQ ID NO: 633386 - DNA, 533 bp, Homo sapiens
agaggatcatagtcactatctaaaaattcttcctatttttttgtaataatctgtctaaaataacgcttaggatacaatgaaacttttcatgtctatggttccatactccatatttttactgattgaaaatagtctatccacagcctttgacacttctttggtttcccttaatttttcagtgattatgaagaataatttcacgtccatcctttatattctttaaggccctgggatgtagtttccttggatctggaaatttgagctcaggtaaaattgccagctgggatctcgttactcttgagcccttcttcctaatctgtggcttttccccatatataatattaaagcaagaaagatatttaggtggactttaaggaagaaatttcaactttcctacaagtaaaatgttgagaacagcttgggagtaggctgggaaggctgtctccaaacttttgagttttcatagggactctctcagtacttgaggctggcgtgtgcatcagatagtcttccaagagtatttccagatctaa

SEQ ID NO: 633387 - DNA, 216 bp, Homo sapiens
gcaatattcccgggctgcgaaaatgcgtaccagcaaatggaagaattactcttttaaggtgaaataagggtatgctgcattaactcaatttctctaaattcagcataagttgttatggcgaaatcagcactgttcacggtgcgtaataatgagtcctgcccaaagtgcggggctgaactggttattcgatccgggaacacggtccgttcttggatg

SEQ ID NO: 633388 - DNA, 581 bp, Homo sapiens
gttctgcttaccctgattggcctgctgctgtctggagacccccgggtgaagccacctgtcatcatgtctgaccagtgtacctgtgtgctggtgagccatccaactgtgctgtgttgccatgtggccttccctgcatgtgtctgcctgcctgtctagtgctggaggtctggggagtgtgatgtgctgctggtggcgaggaggaagctgctggaactggggggaggggggcgtgcctgtgtggtgggactatgtggcagtgcgagtgggagatgtgatgcctggactactgtgccgtgatggttgcctgtgtggccgtgcttgctgtgtgtgctccctggagccctggcctgccccctctcctgtggctctgctcagtcacccccggtacacccgagaacggcacctacttgaggttgtgcagagaccttcccgctacatttgtttagtacccagcgttttctttctacacacggagtccgagctaagggtgcaagatgcacacctgatatcacaagcaatcgccttgggaaggggtcatctaggaggaaacccgatcggatctccttccagagactaatccg

SEQ ID NO: 633389 - DNA, 199 bp, Homo sapiens
tcatctagaggatcccatggtgctcatcccccactagattcagctgagcaggagcattctgaatgaaccagtagtactgctccagaagaagaggtctcctccgtgtgacacagtcccacttggccttgcaggattggatctgggatccctggatttaaactcagggccatccttcataacaggcctcacaaagggttgg

SEQ ID NO: 633390 - DNA, 692 bp, Homo sapiens
aatgtcacattcccagttccagtgaacggttagacgttccatattgctaaagtgtcactgatgcatgtcgtaagcaatcatgatcatgcattgattggtggtagtctgatcactttccttcatactgcggatgcatgctacataagcatgggtgagcaaatcgtagtgagtacacgctcgaccatctatggctagtggcatgctagtccagactcggtccgtgaccgtgatactttcattaacgttctcatggatatcttgcatcgtaatgaaacaatcatgtccttcataatgtgctaatcttgtttctgtagacgatcaggtcccagtacttcgagcacagctcatcatgcctatggacttaccgggcaatacagtggtatactctcaatcctgtacaagccagtaagccagatcttgtgataggtctagcatgttcctaatctcgattccggtatagtacaagagtgtgagaaagtcacggcggatcacctgcgatctatttccaagggggtgtatactcccaagtccttgagtcattaagttatatcctggtgtaatacctgcactagttaacaggttcccatgatcaatcaggatttccttcaaagcgtgaaagccatgattcaacgccatgggattcacgccagcatgttaggtaaagacagccccatagactctaaagaacgtgt

SEQ ID NO: 633391 - DNA, 506 bp, Homo sapiens
atgttgatttgctgcagttgactctgaccctaatttcccggcgctgactcaaactcatcaggaacactgctttcactgagtgtatgaagtggtttctccatccgtgtggtttacctgaactcacaccgtcccacggcccaggtgtggagccgagcactcccctctgcctcctccctggactgcaggacctgtgtctcgctttatgaaagagatgccatttggggaagactcgcattgtcgggagcgctgtggacgctccagaaggagatcaacacgatgatgatgatgccgggtggagggaatgtgcgcttctcgggagccagaaaagaataatctgaatgtctccagcatcaagaaaagaccagtattgaaggtgatggatgccttaattacgctgattggatctttacaaattatattaatgtattaaattattacatgtatgcagaaagtctgtacacctattatgcaccaataaaaaagaaattttttaaagtgaaaaaaaa

SEQ ID NO: 633392 - DNA, 163 bp, Homo sapiens
ttcgatgtgtgatcagagtgatgtacatcaccaaccagaacgctgtgcaacatctgtggtcatgcctggctggaccctgcacaccttacgaggtcatgctggtcctgggacaccgtgctaccccaatgcgcagcggctggcgacggccttacatgatcttgcg

SEQ ID NO: 633393 - DNA, 464 bp, Homo sapiens
tgcgaatgtccaaacttaaccttgttatagaatggttttatctagagcgagtacatgacatgcaatactatgtggatagcatgtgggactgtgctactgagctgtgaaatactgggaatgtatgaatagcttgttactaggaagagccacttagtggagaggaagcactaacagataggcaatagagtgctctgattgaaataatggtcgtaccattagcacaatcggatgaatgtcatcctcccgtgggaagagggacaggaaaaagggtgcttacgggcaaaggagaagaaagacacagttggatgataaggacaaaaatccactgagcttattgccgtggaccttcctcagttatcagcaaaatactctgtagatgcagaaaaggtgactaacttgaagacagagcctcagtacttcgatacgcaactatataccactggacgattacaaaagcatctgga

SEQ ID NO: 633394 - DNA, 896 bp, Homo sapiens
  misc_feature (612)..(612): n is a, c, g, or t
  misc_feature (896)..(896): n is a, c, g, or t
ggactgtgttttagatgttcgtgggagtttattctttctgcgttcactcaacagatatttatcgaatgcctatgtgtgccaaacatggtgccaggtatggagattcaaagagaaataagaagcagtcatgttgatgtactttcaaaaacaaaacaaaaacaaaaaaaaaaagaagaagtagccttggccttcatttggttcacagtttggatgagatggacaaggaatgttagatcagtaaattacaacattacatgtgtagtaacagatttgaacaaagcataggggacaggggtctttttttttcctaatgcaattaaggaaagttcctagaagaggtggattggagctggctcatgtgagctccatgaaagcaaggacccttggtttgggttgctcttagtgcctagaaaagggactgctctagtaggtgctcactaaatgtatcgaatgcgtaggaatcattggtgatggaggacggacagcatttctaggctcagaaccattacgtgccacggctatgtggtatctcccccatttcctcctaattaatatctattccttacccagggttcccgtaaacggcagaggctggtgtgggcagccgggatnctcaactttatgtgaggaatcctggaagtggtataagggaagtctagcctttcacaagacaattggaacaggctcagagagaagtggacggcatataaccgcggagtacaaggggcccctgggcccattgaacattcacaggggagaacaggggggagagtaggccccatagacaaggtggtgtcgcgacaaagtgtgccaccagctggaggaatagagccccctagaataacaacgtagggctgtagaaacaagaagtgctagtagtatgggttcgtcaatgn

SEQ ID NO: 633395 - DNA, 497 bp, Homo sapiens
  misc_feature (262)..(262): n is a, c, g, or t
  misc_feature (314)..(314): n is a, c, g, or t
  misc_feature (340)..(340): n is a, c, g, or t
  misc_feature (351)..(351): n is a, c, g, or t
gggacagctgcccttcctgagccggaagcctctggtaggagcaggtcaggcgtacacacctgaggcctgagggatcagacatctccatggatctgtcaaaggcaggtaggatgaagaatctggaactcaggacagtaagtggctacagacatgaatctgggtatcattcgcaccgagacaggacttaaagctttgaggctaaaggagatgtgtaagggagggagggagttcatacacatgggctttaaacaagacaaaaagnaccgtaacaaagaggaacagaaacttcaagcaaagtagaaaagaacagaatnttcttactctgacaaaaacacagcanacaccctactncacagtgaaatacggactctgacattcaccactgtgctgcaagtcccagccagcacagtaaggcaggagaaagcaagggtttaagatgggagaagtagatcgtcatgatttacaggtgatacaactgtatacgaaggaaatgcaac

SEQ ID NO: 633396 - DNA, 89 bp, Homo sapiens
  misc_feature (23)..(23): n is a, c, g, or t
  misc_feature (65)..(65): n is a, c, g, or t
acttggatgagctgaagattttnttgcaggctacaggcgagaccatcacggaggacgacatccangagctcatgaaggacggagacaag

SEQ ID NO: 633397 - DNA, 382 bp, Homo sapiens
cccttcctatcatgcagaactgtcatgaatataacaatagcgtttcgagctgatcttccatcctcaaatgactctttttgctttatatgttaacatatataaaagtggccaactgatagtcaatttagattctttattcgaggaactatcgtgaaatctgctcagcatcctcatgtgaatagactgaaactgcttgtttaaagaaaaaggttgtttaatcaggtatatctaatttaactaagttatagctacctagtctttaaagatataggtacgattttacatttatgtaacatgagtatgtcttcagataatgttaaggaagctgcgtgtaaatcatatctatcatatacgttagttaccgcagatacaggttttttgt

SEQ ID NO: 633398 - DNA, 491 bp, Homo sapiens
  misc_feature (43)..(43): n is a, c, g, or t
  misc_feature (68)..(68): n is a, c, g, or t
  misc_feature (75)..(75): n is a, c, g, or t
  misc_feature (132)..(132): n is a, c, g, or t
  misc_feature (135)..(135): n is a, c, g, or t
  misc_feature (145)..(145): n is a, c, g, or t
  misc_feature (177)..(177): n is a, c, g, or t
  misc_feature (192)..(192): n is a, c, g, or t
  misc_feature (195)..(195): n is a, c, g, or t
  misc_feature (198)..(198): n is a, c, g, or t
  misc_feature (203)..(203): n is a, c, g, or t
  misc_feature (260)..(260): n is a, c, g, or t
  misc_feature (485)..(485): n is a, c, g, or t
tggagctggttatttttggcacttttaggggttgaggattggntgggcagacaattttccaggccatntgaagantccgacaggggcttttataagaagcaggctatggcaaagaagaggacgcccagcacnttntacaggagcnccatgatgattatttagcggttcatggccganttctgttacaccaancanganctctnttggccacactggtcctgccacagcagacaggccttgtcgatcacccagccgaaganttgggccccgggatgccccctagtattctaactacaatccactggattcccagggcaaaggatctctgagggtcacggacacatctgcaatagaaaaccacagcgtcacaccccacagaagtggggttgcatgccaagtcaccccctaggccagtggcctcctggaccagtccccagccacatcatcaccccccccaagtgggaagccctcgtcaaaatcagaanagtgag

SEQ ID NO: 633399 - DNA, 531 bp, Homo sapiens
ttttttcaggagtttacaatttagtttttatttggccccattttgtttggccctgcctgccacaggaccccgggacagacactggttattctctgacttgcatcaccgccagatgtcaattgtagaaatgcataatctcctaattaccatgaccagggacaccgcagtactgtatgaacaacatatttgaacaaaacctgttcccgtcaccctgtgaaacccagaccgtgaagagtacgaattacacaaacacagtctgaaagaccccagccgcttctaaaagaaaacaggggccccggactatggggagattgcaggccgccacacttcggcaggtcttgagacactccttttcttggacagaaattgtaccgctgccaaaggcaatggccgtcctggaaacttttatttttttagcgatggcccacaccttaaggtaggggtcgcgtttccccatgcagggacccgcccattaaccccatcttggcaggaattctcttttctggggggaacttcagttaccgcgcggcg

SEQ ID NO: 633400 - DNA, 280 bp, Homo sapiens
tgactctgagtatccctccctatagacatcatgtagtcaaccatctatctccaacgggatgactatccagactatataaagaactgtaactcaaacaacaaaaacaactcaaatgaaaaacgggtaacggactagaattgacacacctccaaagaagatatatgactggctcacaagcatatgaaaagctgctcaacttcactcatcactagggaaatgcaaatcaaaaccacagtgtagtaccacttcatgcccattaggatggatgtctaatagggca

SEQ ID NO: 633401 - DNA, 912 bp, Homo sapiens
gggagctttcgggacactttgagaaccagaaggtgatgtacggcttctgcagttgtcgaaggactcccaagactgctctgccaaaatacgtgcctcatcaacatgggtgggcagaagatgtgcctgatgcccgcaatgtgcagcttgtgccagtcctcagttgacctatggcctggcaagcgggggaaggggcctccacactccagggtgagcccagggcccccacgcacagcctcgggtactgagagtcaccctggcagagtgtgccccttgctagggattgaaggtggctccggaagcccacttggttggccaagcaaggccaaaggctgtgcctacccgttctcaacatttagatgagctgcctgagcctggcagccaccttctgtgatccccagaggaagtggaaaggggagccacctgagtctgacccctcagagtcactcaactctgacccgtcaggccacttgcacggaagctgggagccaaagacgtcgagggatggccgtgaagcccaagcagctagataaaggcagatgcgcagaaggacccaagccagacaacggcagggtgaccccaggcccaacgttgaggggggtacttccaagatccaaagtctacacgtgcagggacgggacctgttgccccagatccgggaaaggagcctcttggttgccaaacggggcataccgttcgttccatggtgatacgtaacatcataaatgtcctacccatagaagcgaagtcagatgcattcatccattgccatgtgcgaactgctagaaatccccagtttaccgagtaaaaggaagggacgcagcgcgcgatacgaagggggtgcgtcagataaggcaggacatggccggccacgagccctgggcataacccgcttggcaacgggcgcgcaccacc

SEQ ID NO: 633402 - DNA, 939 bp, Homo sapiens
gtcatcctcgggagcccacccggacgagtggggagagtagacagcgagaaccagcggcggtggctaagcagagactgtagatagtcggcgacagcgactgacgcgcagcagatggctggtgaagcggggccaggaccccgaggagctccctgtggtgcagtgaggacgccgtgtgtcccgtggtcctggcgctggcatcccgggcaaccagctgcgaggaacgcttgaaggagatggaggcggagatggccctgtttgagcaggaagtactgcgggctccagtacctggaatcccaattgctgtgcctgcggtgcccacgtgtcccccacggtccccacagtaggaagcgagtccaggtccgcagcaggctccttgatgaatcgcgtcctaatttatcgctgagcaactacatacgctaggtcaggtccagctaagactctggaggcccgatgcaagctgctgcaggccacagtagttcctcccaatgtgttggtgtggcccatcctatttgtaggccctgttgtgctttggtccctgtgtgatcggagtcaccttggacagagcccataatggctcggaagacagcccagtgtttcccctgtctgcgaggcaaggccctgttgactcccgggttgctattgggcaccttaacaggtccacttactacaagcagagagcacatcaatgggtgacccaacattccgtagacacttttggggtcgcgccattggggagcctcttggcccctagcctaggaaatggctcgttacagcgctagagaaatctcgagtacaaacgaaagtagaggccgcacttcgtgtagggacgaagcgaccgggctttccaactttggtagacgcgaaactctgtttatagggcacttataggttccaccggggaaaaccgaatgaataactattaggaagcataccgcctgg

SEQ ID NO: 633403 - DNA, 176 bp, Homo sapiens
tagaggatcctcaggacttgagaaaggcagttcttttgcatttctgtgaatactccaccgcaaatgagctgggggaggactgacattgtgacacctccctgactgcagatatgcatgtgacttgttttgaaatgccaaaagccgtaatgtacaaagcaacgaaggcaagcgcagag

SEQ ID NO: 633404 - DNA, 357 bp, Homo sapiens
cacgagggaaacggtggggcctcgtgcgcacgcgccttggctggcgaggagctagggaagggagtcacggcggggcgcgaagggaactgcggatgagatagatgggggaaaacgtttgtcgggaggcgactccaacagagccccagggtgcagaacacaaggaaggctactgtcgccctcggccgcttgccagtctccctgggcgctgcggcggcgcggggcgctgggcctgcggcgcggcgtcgtgacgtcacggtggcggcagccgtggttggcgcaaggtccgcggctgcaaagtgtgaattacgccgggctcgcgccggcggcggagtgaagtcaggctccgggggaggggag

SEQ ID NO: 633405 - DNA, 1192 bp, Homo sapiens
  misc_feature (267)..(267): n is a, c, g, or t
  misc_feature (273)..(273): n is a, c, g, or t
agcgggctgggagcgggtgggcggccgggaggcctggagcaggacggccgcacgacctggagctccggctgcgtcttcacgcagacgctaaccgccatgcgcctgtctgcgccgcggccgccgctatggaggctcctgccgcttctgctgctgtctgcctggccgtgcctggacggctcggcaagaagcctgacttgcctcgtgtccatccgtgtgcctgggggcttggtggacaatgtttaactcaggggtatggtggatcaccgntacaangcaagcaactttcggcggacgcggacatcactggtcttcgtgcgtatgcgagagagatgcaacgccttgttacccatatctatcgatgctcgcactcgaggaatatcggcctggcgtggatgactacctgcggagggtgctgtcgcgatgaggcacgccggatctatcgagagtggcgaacttccatgacttgacgtaagaagggtctgccaagggtacgggaagcatcccttgtgaatgagtccattggtctagtgctttggcacgacttttgaaacgttaggctgaaagtataccatagtatgctttaatatctgagagtgcgctatctatgttgcttcgatatgaaccaactagtatacatgctggtgatcgtggccttcttaccatggtaaactctggaacgtgttcgctcgttatctgttgcttcgacctagtggaccagaggacggaaaatcccccagatagagttctctctgaaccagcggcgggtgaaacactgggctcccaacctgaggccaagtacgggagcacattgggggaaaagccatagaacttagcgggacgaaacggggaggggttcacccttgcggcgagaggttagctccaacagaaatggggggagcgatagcactaagggggagttctccgcgacgtggcgatgttcaactttgggacacttgtctccattgtggtaatccgggggttctatatctattcaacgagggttccgggctctccccgggagaaaaaccggacgggaaactctcaaactaatggccatttcattgactagccgagggcgccgtggtatggtaacctgtaagcgctcccccttgggccagaatcgtcaacgaggtgtgccttccggggggacaccacattgttaacacccagaagccaggcagagatacactgg

SEQ ID NO: 633406 - DNA, 488 bp, Homo sapiens
agacggggtctcgctctgtcaccaggcaggagtgcagccgcaatcttggctcattgcaacctctgactccctggttcaagcaattctcctgcctgagcctcccgagcaactgggactacaggcacgtgccaccacgctcggctaatttttgtctttttagtagagacagggtttcaccatgttggccaggatggtctcgatctcctgacctcgtgatcctcctgccttggcctcccaaagggctgggattacaggcgtgagccaccacgcccagccctaaaaatgcatttttttaaagaaaattaaaaaacccggaaatatttgttacggggatctgaaaaaataatgtacaaaatacaagtttttgcaaattttcagcccaccccggccgcgaatattaataaaagtggttcgaacccgggaatttcggacccggtccccgcagggggacccaaatttccctaaagggagacgcctctaatctttgg

SEQ ID NO: 633407 - DNA, 701 bp, Homo sapiens
  misc_feature (13)..(13): n is a, c, g, or t
  misc_feature (71)..(71): n is a, c, g, or t
  misc_feature (229)..(229): n is a, c, g, or t
  misc_feature (240)..(240): n is a, c, g, or t
  misc_feature (249)..(249): n is a, c, g, or t
  misc_feature (259)..(259): n is a, c, g, or t
  misc_feature (296)..(296): n is a, c, g, or t
  misc_feature (303)..(303): n is a, c, g, or t
  misc_feature (323)..(323): n is a, c, g, or t
  misc_feature (365)..(365): n is a, c, g, or t
  misc_feature (384)..(384): n is a, c, g, or t
  misc_feature (449)..(449): n is a, c, g, or t
  misc_feature (510)..(510): n is a, c, g, or t
  misc_feature (521)..(521): n is a, c, g, or t
  misc_feature (566)..(566): n is a, c, g, or t
  misc_feature (570)..(570): n is a, c, g, or t
  misc_feature (584)..(584): n is a, c, g, or t
  misc_feature (589)..(590): n is a, c, g, or t
  misc_feature (594)..(595): n is a, c, g, or t
  misc_feature (597)..(597): n is a, c, g, or t
  misc_feature (600)..(600): n is a, c, g, or t
  misc_feature (612)..(612): n is a, c, g, or t
  misc_feature (615)..(615): n is a, c, g, or t
  misc_feature (617)..(617): n is a, c, g, or t
  misc_feature (621)..(621): n is a, c, g, or t
  misc_feature (639)..(639): n is a, c, g, or t
  misc_feature (685)..(685): n is a, c, g, or t
gaccagccgagcncccctccccacccgccccgtaaaagtgctttcaatgaacagggattcttttctttatnaaagacccaaagatacgtggacaaaaaaagaaaagcttgaagtttcaatgcctaatgtgtgcacataaaacaggcacgaagaaacaaacgtgtgtttcctcttaattcctatatcacaaatatagcagaagcagcaatctgtacagtaaaatgcagtnatggaaaaacnatctctctnaagcatctgnaatacttaacaatgtttaactttaaaatgcatagtgntcagganaggatacttaggccagagangcagctgaactcccacgttcacatgaagcatccccatcgatncttaagcatatgttaagtnggacttaattgggttacaaaccacaagaataatatacaactggctaaggggctatgtgataaatnatcaggagagaatctattcatgctctagtttgatacagctaaattcttttcagttcacaanacccattaatnatgttgtatagagaccaaaatgtaaagagagatagaatacattantgangtgtggattaattnaagtnnaggnntntanttgtgttaaagnaangntgtnaaaaggagataatgagtnaatactaaaaagggtttgtttattaaaaaattattatataaatggnacaagatgggtagtga

SEQ ID NO: 633408 - DNA, 489 bp, Homo sapiens
gcgctcatccaccgttcttaaccggttgtcagactaacgtagggcggtacgcgcttcattcgctgcggcgacagcctcttcttccagcttctgagcctcggcggccgtgatgctgacggattcggtagtgcgctcagccatggcttcaagctcttggatggtagacttcgccctgctcttcctcgaggtgttcccgccaggaagagatgtgggtctccatgaccctccgttcagctagacgagactctgcctgctccagaatcgccacacctaagtcctcgagttgtgacaccacggtttggtgggccttctcggcatcgttccctacggtcatgacctcagaagtgggggagattcgcaactcgccaagcctcacccatctccatgacgagctcgccatttacccggcgctgattcgtcgtaccgatcggtacatcgaggtcggcgccgtccatgcgtagcgaaaccccgtcggcgaggtgttcgatg

SEQ ID NO: 633409 - DNA, 944 bp, Homo sapiens
  misc_feature (39)..(39): n is a, c, g, or t
atggcgtagggatcgagggccccgcggctgggtattaanttcggacgaggctcagactgcctctgagtggggctggctggccaccagatcctgccaccatgccgcagcatcgtcaggaccctccagcaggcatgagctgggcagagctttcctggccatctgtccatgcaagtgctccagcagtcctttttgcacactcttggattccttaccggatattacaaagaggctgccccctttgacaggagggctacatcacttggtcgtggtcgacccaatcgtcaccccagcagccgtggcctgtaggagtttccaaaggtgggagatatcatgctctggaattttggcatcaaggtacaagaccccaccttcatcacagggattggagctgggagggagcatcactgggctgaagtttaaccctctcaataccaaccagattttacgcctcctcaatggacgggaacaactatgctgcaagactttaaaggcaacattctacgagttttatgccagctcagacaccatcaacatctggttttagtagcctggatgtgtctgctagtagccgaatggtggtcacaggagacaacgtggggaacgtgatcctgctgaacatggacggcaaagagctttggaatctcagaatgcacaacgaagacagtgacgcatgtggttccctgaacccatgctgtgattggttcctggccacagcctccgttagatcagaccagtgcaaatttgggactctgcgccagagtttagagggaaagggcagcttcctctaacgtcgtctgccgcagcaggcatcctgtcctaacgcagcttgtttcagtcccgatggagccggtcctgaccacggaccaaagagcgaaaccgagttactctgcttccagagggactgccctgggctgatcccgacctcaacgtcttcagactgaaac

SEQ ID NO: 633410 - DNA, 619 bp, Homo sapiens
  misc_feature (68)..(68): n is a, c, g, or t
  misc_feature (207)..(207): n is a, c, g, or t
  misc_feature (549)..(549): n is a, c, g, or t
  misc_feature (592)..(592): n is a, c, g, or t
  misc_feature (609)..(609): n is a, c, g, or t
cttcgacggtctgtccagtacatactttatttcagtttccataaactaattcttggctttgagatttnttattatacatttagcaaatatttacttgtgtaaaatacagtcacaagtcacttaatgacagaaatgctttctgagaaatgcatcgttaggcaattttgcccttttgcaaacatcatagagtatacttacacaaactanttgaacagcctatgatacacctaggcaacagggtataggctattgctcctaggctacaaagctatatagcatgtgactgactatactgaacactgtaggcaactataatagtatgtatgtaactaaacacatctaaacacagaaaaagtacagcaaaaatacagtataaaatatttaaaaatggtatatctgtacagggtacttaccatgaatagaacttacaggactggaagctgttcttggtgagtgactgagtgagcagtgagaatgtgaaggacaaggacattacactactatagacttcataaacactgtatgcttaggttacacgcaatttataanaaaatttttcgtcagtaaattaaacttagcttacagtaatgtnttatttataagctttanatgtttaact

SEQ ID NO: 633411 - DNA, 122 bp, Homo sapiens
gtacgatcaggagtcgggcgtcttaaccattcgacaaggatcatggcggttgctggggccgagcagttcaaggcctgcctcatcagcctgggcctacgacgtggagaatctgaccgagcagg

SEQ ID NO: 633412 - DNA, 1119 bp, Homo sapiens
  misc_feature (251)..(251): n is a, c, g, or t
tatgatccaagaaatttgatcagaagctgtagcgtaaatcctcttactgaagccaacaatggtatatatagatataatacaaatgtgggacttcacatataacgtcgtctccttcttacctctgccgtatataaggatctctatatagaataacgaagagcttaaaacgtgtaatggattgcagttcgcacctaatatatatcgttacaccctttgttagactcaatatgagtacaaagtacggtttatcnggctatctatttactctaactcactgtgtattcgaaaatgtacctttgtcaactatacccacatgacatcaggtcgtgctcttgattgcggcaggtataacatttggcacacgttgaagcgtttccccgtctatatataataatgtaaattttgtttgctcaatggcattcatgaaatctatgtcggaggctcaagcatgtcacgggtaacatcggcacagaatgtgctggagttggacaaatatgcttgccagggtgacaccccaatttccttgtcgtgacgtaaaatttggaagcctctaaatcttggaaagttctccttaacggaaagttcctggatgcgtcgcaaacaccgtaaagtggcaagctctggagttaatccccaagcattttaccactttcacaacgcaaggcgacttttacaaactttgaaccttgactttttaaattcgagctcctttggaacatagggttcctttatcccacgagataacatgcgaagcgttatggtagttcaaggacggtcttgggaatgggtcattcgtgccactaaaaggaacgcggggagcgttatgcgaaacagttaatagggattggtttaatcgttcacttggggtaaggtaagagtaggcccggattatgttcgggtcgacctgaaatgagattccgataggcccgttttaactacggccaagacaacgatacttgggcttaacgagagtctctgagccaaattgacattagggaacaatattaaggggggtatcaccccccgtttaagcacggggcccaatcccagaaatttggcgtcctagacaaatctagggcgacaaattgtttgcggaaacacccaataggaggtaaacca

SEQ ID NO: 633413 - DNA, 914 bp, Homo sapiens
ctcctggagagcaaggtacgcgggggagcagagatgatccgcgccgcgccgacggcgctgttcctgctgctgctgctgctggtgctattgtcctgggcgtcccgaggcgatggcagcccccgagcaggacgagatccagcgctctccccgggctgtgccgaagtcacgaccgatcattgtacctggcgcagctactccggtcgtacctcatgaggctccggtctctgaagcgacctccactagctggtttgtggagctccctagaaggtatccggacgaatcagccgctgtggtgctttggcatcaagtggggtgatcccggggctgccaagcttcacttagatgaggctacgctacgatgatgagacagtaggctccccattccctggtctctagctccagtatgggattgtctaccccgtgggaagataacgagagctcgccttagtatctttgggaaagttcctgaattgaccgagaatgtggtatagtagcccttgtgaagttccccccaaagcctggggtggtgggcgctttcagtccataccttccgggaaattgaccaagggtaatataaggttgccaagcgttaaatagaccaacttggagggttcggccccaggatgccaaagttattcgaaggggccccgtgtccaaattatttgtcctttccccgccctccttgtccccgagaaggttaccaaggaaaaccaaagcaaaagcgttttcccctagaacccggggggaggaagcctaatggcctgtgccatccttacgatcccgccaaccctggggcacggtgcctgggtccatgccaggggatccccaagcaatggaaccctttcagggggggctgggctggtggggccaactggacttcctcctccctatgagccagaatggacaagctcccc

SEQ ID NO: 633414 - DNA, 347 bp, Homo sapiens
tgagagggagtcttgctctgtcgcccagtctggagtgcagtggcgcgatctcggctcactgcaagctccgcctcccgggttcatgccattctcctgcctctttctcccgagtagctgggaatacaggcatccaccaccacgcccggctaattttttgtatttttagtggagatggggtttcactgtgttggccaggatggtctcgatctcctgaccttgtgatccgcccgcctctgcctcccaaagtgctgggattacaggtgtgagccaccgtgcccggcccacttttgaaaaacagtttcagtgagtatcgaattctagggtgactacttttttcttttgctact

SEQ ID NO: 633415 - DNA, 171 bp, Homo sapiens
tgagggtgcggtcgtatatctccaagaagaactgaggttgtggagcgggcaggtaggactattgttcccgttgcgtcttggctgctgtgggatgctgttgattcctcactacgtgctgagagttgtggagctgtcagggacagtgtgcttgttgcagttcacgaccgcggg

SEQ ID NO: 633416 - DNA, 668 bp, Homo sapiens
tgtatggtgggaaggaggccaggacggagggagatgaagtggcggcacgtggtgcggacgagcatgggcatggatgcacccgatctcccccaactgtgtaccgcacgcccaccgaggctctggcgtcctttgatctaccacttgtccgcgcagggggcataggttccggcatgccggtgtgcatgcggtgccgatgagcccaaacgatacattggtgggtagcagtcggagcccaagtgtatccatcactcaagctaatgcgagactcacagcagcaggtgcactcggccgtccgagtgacacacgatgctgcggagggaccatctgtagtgaaggcttgcctgacgaagtgtggcgatggcttgccatgatgggcgagaggcacctgggccctgtgtcactggcgggcgccatgagagccagtaatctcctcatcagtgagatatctcgagcccgagcttggatggtcggcagtttgcgatgcggcctcgatgtacactggagacgggcgggtctatggaatgtgcaatgtctcggaactgtatccatctgatctgtcaacgccaacagcgggcaaacaaatcgcgaatgacaccctagtgggctaccccagtgccagggtagctgcggaccgccagggggcccgacatcaaacgcgggaaggtgcc

SEQ ID NO: 633417 - DNA, 481 bp, Homo sapiens
  misc_feature (4)..(4): n is a, c, g, or t
tcgntctagaggtcccctgtctgcgtgatcgttatacccaggacatcttttgccacataatgggaaactgcatacaatagacaaactgtcctgggctataggagggagctggaatctctgactatcttacaattgaagaattggtgaagcacttgtagagacagtttcatgtggaggaaatcttttgatgaatgttgggcccacactagatggcaccatttctgtagtttttgaggagcgactgaggcaaatggggtcctggctaaaagtcaatggagaagctatttatgaaacccatacctggcgatcccagaatgacactgtcaccccagatgtgtggtacaatccaagcctaaagaaaaattagtctatgccatttttcttaaatggcccacatcaggacagctgttccttggacatcccaaagctattctgcgggcaacagaggtgaaactactgggccatggacagccatttaggg

SEQ ID NO: 633418 - DNA, 1057 bp, Homo sapiens
gccctaaaagccaaagggggaagggaaagagactcgatgatctaacatagtcgtgcgataggacagcgtagattcgggcaagtccagcactactggccatctgatctagtaaatgcggtggcagtcgacagaaagaaccattgataaagatttgagagcggaggctgctgagatgggagaagggctccttcaagtatgcctgggtctggtgataaaggtggaagagctggagcgtgaagagtggtagtcagacattgatatctgcctggtggagaatttgagaccatgcaagtacgtatgtgagctatcagttgatgccccaggacgcagagactttatcaaaagacatgattacagggacgatctcaggctgagctgtgcggtcctgattgttggctgctggtgttggtgaatttgaagctggtatctccaaggaatgggcagacccgaggagcagtgcccgttctggcttacacactgggtgtgaaacaactaatagtcggtgttaacaaagatggattccactgaggccaccctacagccagaagagatatgaggaaatcgtgacggaagtcgaggcacttacattgagagaactggtaggaccccgaaagagtagcatatgtgccagatttctggttggaatggggacgacatgctggagccaagtgctaagatggcctggtcaagggatggcaaggtacccgtaaggatggaaggcagggggaaccacgctgcttgaaggtctggaaggggtcctaccggacaatcgtccaatgagaagccttgcgccaggcgactccaggatgtctaccaaacgcgaggccaggacggcctggtggcagaatgtgaaacggggactccaaaacgggcaggcggcgcacctgggcacaaaaagctacacgggagcaacacggcaacggcccagcaactcgagagaacccccgggaacacaggcacggcaaaggcggcaacaatcaccgacaaatgcgacaaacccacgcaatcaccgcgcggaagaacaaccaaacaccacgagcacccccacgactaaaca

SEQ ID NO: 633419 - DNA, 874 bp, Homo sapiens
cttcgtcgatccgacgtcgcgtatctctgcggtcgcaatggaagaagagatcgccgcgctggtcattgacaatggctccggcatgtgcaaagttggttttgctggggacgacgctccccgagccgtgtttaccttccatcgtcgggcagcctccgcatactactcagggcgtccatggtgggcatggtgcctagaaggactacctagcgtgggcgatgaggcccagtagtcgaagctgtggacatcctgactcctgaagtatccccacttgagtcatggcatcgtcgatcaactgggacggacatggagaagatctggctccacaagcttctacaactgagactgcgtcgtggtcctccggagtgagcaaccacaggtgctgctgaccgaggccccccgtggaacacccaaggaccagactagagagaagatgactcaggattatgtttagagaccttcaactagcccctggtgcatgtacgattgaagtcatccaggccgtgtcatgtccctactactgccgtcgtggtggcggcaccactgtggctattgtcatggaactctggtacgacaggtggtctagcctaacgatggtgcccatttacgagggctacgccctcctctaagcgattctgggtctggagctgggtggcgggagctgagcgactagctcatgaagatcctcacgtgagcgagagctagagcttcaccacctatgggcgagcgggaaatcggtgcgcgacatggatgcacacggtgtgctacggtcggcctggatgttcgaggcaggagatggccaacgtcggatccgtgctcattctctggaagaagagctatgatggtggcccgatggccaggtcatagctttggcata

SEQ ID NO: 633420 - DNA, 728 bp, Homo sapiens
ttggggaggggcgcgggatcagtaaagctcccggaacgtggtctctggttacccgatagcaatagctgggtggtgactaccgggttgaatcctccgcaatcatgatcatgacccaggggggcaaaccgcacgtctgctaaccttgaagcgacttcgcgaggaggtagtgaaggttcggaaggtcgatataactgtgtatctctttcaaaacgatgcgtggcgcaacagcgaatgacgtcagatgatcatatctttctccacccgtgcctgtgacaacacatctcaagaaactcaaagaatcatactgtcaaagacagggtgttccaatgaattcactcaggtttctctttgagggtcagagaattgctgataatcatactccaaaagaactgggactggaggacagaagatgtgcattcgacagtttatcaggaacaaacggggggtcattcaacagtttagatattctttttattttttttctttttccctcaatcctttttctatttctaacaaatagttctttcgtactgtggtgttcaaaacggaattgaaaactggcaaccccatctctttgaaacatctggtaattcgaattctagtgctcattattcattattgtcgtccccatgtgctgatatccggtgatcaagcctcagtccccttcatattaacctctcctttttaaaattaccgtgtgcccagagaggtcccctttttcaggacct

SEQ ID NO: 633421 - DNA, 242 bp, Homo sapiens
gccgccgccaatcaccgccacacgcttgcccttgaacagcggccgtcgcagtgcgggcagaagcacacgcccttggccttgtattcttgctcacccggcacgcccatctcgcgccagcgggcaccggtcgccaggatcaccgacttggccttgaggctggcgccgctttcgaactggatctcgtgcaagccgccgacttccttggccggcaccagggcgctggcccgctgcaggttcatgat

SEQ ID NO: 633422 - DNA, 351 bp, Homo sapiens
ccacatctcccttctcaaccagacacctgaaagcgcctgtgtagcggtagtatccctctatgctgctgggttcactcaggtttaggcttgacaccatcatcagcttacagagactggagtctctcttagacccaggggcacaacctgcactgaactattcgtcaaatgtccagtggttgctcttattgtagagcaggcccatgtggatgttccagccagcggttctgccatctcccgtatggcaggacttcatgcctttcagattgtcccaggtaaggtcagaagctgatttcttcccccctgctacagctgccaagacaggctccagacctcacatgcccgctatgtacg

SEQ ID NO: 633423 - DNA, 228 bp, Homo sapiens
ggagctgaagcatcctaacagtagggtcacgctcttatgagaatctaatgcttgcgactgatctgacaggaggcggagctcagtctggaatggttgctcacctccagctgtgcagccagtacctaacaggccatggactgctactggtctgttgcctgggggttggggatccctggtataaagaggagaaggggccgggctaggtggctcatgcttgtaatctcggca

SEQ ID NO: 633424 - DNA, 985 bp, Homo sapiens
tttttatggtgagaccattgggagaactaacttagattttaggctctaatatagttctgtggtaaaaataagatcatgtaacacttatgctttagaaatttccatagagaaggatcatgtcttaaagccaaaatttatttggtagacacaaggatacgggaaagtagaacatctaaatactgtgtgtgtgtgcgtgtgcgtgtgcgtgtgtgtgtacaccagtgaaaggaatcaggcagtctaagagaactagctatccatccagcatgaccactgtaagaatgaggaatgaggcaggacaacagagaactcttaattgttcagagaacccagagaactttgtcccctcccccgaaaccctgcagaatgttgagtctgaaagtatgagctggttaacatgtcaggggcccatgacctgtggaggaggaaacgatgatgtgacaagcacagaaccggctgagccactgtagatgcagggctcatctccatgaatgtcaaaggaacttaagcaacactgaagctcctccacttgaaagaagcccctgtgctgcacatatccaccaaggccaggagaaagaaaggagagagacacagcctgagaccgcacagtttcttgggaagctccccagtaaggcacgggcacaggtctgggtgcctgggtctggaaaagcagagagcactgccggttgatgacagagatcctccatcatcagcagttgttgagcatgtcagtggcaggcgcgggaagggttgcccagttggttcccaaaataggggaaatccgtaagaggtagaacctctatttgggggcgctgacttggctgcaaaggcctgtgaacagcgatggggaacatatataccgaacgtggaatgggttattatccaagagacccgaaacggagggaaccggagaggtcttatgacagtcttaagagaaaatacacgtgagcacgacagagttgggcacaaactccgtaaggttggg

SEQ ID NO: 633425 - DNA, 100 bp, Homo sapiens
acgagctagcaccatgacttcaataccctagtcaggggggaggcttcagtgagccaagatcatgccacttcactcggcaaaatagcgagattctgtctca

SEQ ID NO: 633426 - DNA, 492 bp, Homo sapiens
gtgagtatggttaaaatttgtcttaagttgtattttctgctcattttaatgttaaccaatctttgattcctccatctagtcctatgaaatagaataatagttctgcagctggtacagtaataagaaataccaaaaaagtttgtttccctacagcttatacccttgaatcaaagaactatgcagccataaaaaagaatgagatctgccaggtgtggtggctcatgcctgtaatccctgaactttgcaaggccgaggtgggcagaccacctgaggtcaggagttcaagaccagcctgaccaacatggagaaaccccatctctactaagaaatacaaaaattaaccgggcatgctggtgtgcacctgtaatcccagctatttggcaggctgagacaggagaatcgcttgaacccgggaggcagaggttgcagtgagatgagatcacaccactgcactccagcctgggcaacaagagcgaaactccatctcaaaaa

SEQ ID NO: 633427 - DNA, 117 bp, Homo sapiens
  misc_feature (50)..(50): n is a, c, g, or t
ttacaggatcttcccgactagccgacagggctgaggggagtgaggcaggnaggatgcattgggctgtgggaacagaggacaaatccctgtaccacctgactgtcgggctagtcgggg

SEQ ID NO: 633428 - DNA, 332 bp, Homo sapiens; identical to SEQ ID NO: 597440

SEQ ID NO: 633429 - DNA, 695 bp, Homo sapiens
  misc_feature (676)..(676): n is a, c, g, or t
ccatccttcatctttagcttgggtacaacactgggcatctgaagctctctctctcttttaatttaattgtaatgacactttctatcagatgttatttactctaacctacaaatgcaatatgtagtgagcaacagttcatctgggcaattatatccatattcacttatgctaaatagttgaccagggagagggtaaacagcatgatgattaagcaagcaagtgatggcttctacccgcctgggttcatgttttcactcttaaatgtgtgaccctactccataggagagctatccatccacttccagtttcagtgatctcatctgtaaaacaagaataataatagctaactatattatgcaccatgcactgctacatgcaatctacatacagcaatttatgtaatgctcactaccatgcttgaggtaggtatccgtataacatcccattctacagatgagtaaaggtgctttgagaagttacataactatcctaattcacagctagacaatggaagtctgttgtctcaagccatgctctgagctacactttatgttgtagccctacctgagagatatcggtgataactgggaagacacaagatgattaacgaggtatgcatatggtgcataaacgttgtgctaagcttataacatactaaagattggtactgtgcagntttctgtactgacctgttt

SEQ ID NO: 633430 - DNA, 385 bp, Homo sapiens
tctaaggtccgggagtagtcattggtgtgaggagtcagtatatgtgggattttaggtagtgggtgtgagcttgaacgcttcttaatggtggctgctataggcctactatgggtgttaatttttactctctctacaaggttttcctagtgtccaaagagctgttcctctttggactaacagttaaatttacaaggggtttagagggttctgtgggcaaatttaaagttgaactaagattctatctatggacaaccagctatcaccaggctcggtaggtttgacgcctctacctataaatcttcccactattttgctacatagacgggtgtgctcttttagctgttcttaggtagctcgtctggtttcgggggtcttagcttcgcgc

SEQ ID NO: 633431 - DNA, 262 bp, Homo sapiens
gctactcatagaggatcccgtgttctttgctgggactgagaggctcacgaaggccatccgcaactgttggttcactgagagctgctcctggtctcttcaccactgtagttctctcatttccaaaacatcagctgctttaaaataagatctcttttgtagccatcctgttaaatttgtaaaccaatctaattaaatggcaccagcacaagaaacacacgaggcaagaagttatcagtaccagcacaaagaaccagcacaagaa

SEQ ID NO: 633432 - DNA, 275 bp, Homo sapiens
tcccaatggcagaaatttattcaaaacttccgatttgaaaacacaatgccatgtaccagaaccccgggttagcacctgacaggagttgttccgcactaggtaggaaaaccgtccaaaaataaagccacccctcagcaaaaataaggccaatttgtacggtaagctttccaaaactgaaaacccatttgggttgaaacacatccaaatccggagacaacattggggggatccatcagcaccattggttacagctgttgggggggtacgttcttgga

SEQ ID NO: 633433 - DNA, 989 bp, Homo sapiens
gcgaagcgccccgcctgatccgtgtcgatcatgctgcgccgcgctctgctgtgcctggccgtggccgtcctggtgcgcgccgacgcccccgaggaggaggaccacgtcctggtgctgctggaaaagcaacttcgctggaggcagctgggggtccacaatgtactctgctggtggtaagttctatgccccttgcgttgttggacactgcaaaggcatcgtggcccctgagttatgccaagagcctgactggagaaacgttgaaggcagaaggttcccgagatccaggttggctcgaagggctggacgccacgggaggagtctgaccttggctccagtcgatgtacagggggtgcgcaggtttatcccacacaatcaattgtttcttcaggaatgggagacacaggcattcccccaaggcaatatacaaggtgggcagagaggctgactgacatcgtgaactggtctgaagaagcgtcacgggcccggcatgtgcagcagcctggctgacggcgcagctgcgagagatcctgggtggagtccagcgaggtggctgtcatcggcttcttcaaggacgtggagtcggactctgccaagcagattctggcaggggtagcagaggtcatcgaggacatagcatttgggatcacttccaaccaggtggacgtgttcttccaaaataccagcgtcgacaaagatggggttgtcctctttacagaacgttgatgaaggccggaacacctttgcacggggaggtcacccagagaacctggctgcacttttatccaacacaacagtgccccttgtcaccgaggttaccgagcataaagccgagaatttgggggaacccaactccctcctggtggtctgcccaacgggttgcatgcgggactggcacttcaatgcgcgagcttcggggcagctgccctcaccccgcgaccgaacagcgctctgttttcgaagagagcgcgggcaccgcgagagcacacccc

SEQ ID NO: 633434 - DNA, 666 bp, Homo sapiens
  misc_feature (16)..(16): n is a, c, g, or t
  misc_feature (62)..(62): n is a, c, g, or t
  misc_feature (75)..(75): n is a, c, g, or t
  misc_feature (79)..(79): n is a, c, g, or t
  misc_feature (89)..(90): n is a, c, g, or t
  misc_feature (99)..(100): n is a, c, g, or t
  misc_feature (104)..(105): n is a, c, g, or t
  misc_feature (108)..(108): n is a, c, g, or t
  misc_feature (131)..(131): n is a, c, g, or t
  misc_feature (143)..(143): n is a, c, g, or t
  misc_feature (161)..(161): n is a, c, g, or t
  misc_feature (167)..(167): n is a, c, g, or t
  misc_feature (187)..(188): n is a, c, g, or t
  misc_feature (190)..(190): n is a, c, g, or t
  misc_feature (194)..(194): n is a, c, g, or t
  misc_feature (210)..(210): n is a, c, g, or t
  misc_feature (232)..(233): n is a, c, g, or t
  misc_feature (235)..(235): n is a, c, g, or t
  misc_feature (253)..(253): n is a, c, g, or t
  misc_feature (261)..(261): n is a, c, g, or t
  misc_feature (284)..(284): n is a, c, g, or t
  misc_feature (301)..(301): n is a, c, g, or t
  misc_feature (321)..(321): n is a, c, g, or t
  misc_feature (324)..(324): n is a, c, g, or t
  misc_feature (328)..(328): n is a, c, g, or t
  misc_feature (339)..(339): n is a, c, g, or t
  misc_feature (343)..(344): n is a, c, g, or t
  misc_feature (359)..(359): n is a, c, g, or t
  misc_feature (366)..(366): n is a, c, g, or t
  misc_feature (379)..(379): n is a, c, g, or t
  misc_feature (410)..(410): n is a, c, g, or t
  misc_feature (435)..(435): n is a, c, g, or t
  misc_feature (502)..(502): n is a, c, g, or t
  misc_feature (504)..(504): n is a, c, g, or t
gagttggaggtctgangccctgtgtgtctgtggtgtgtagatgggctctttgggggattgtnatttctcaaggcntggngagggatagnnaggtgcagnngttnnagncttggggtgggtggggcggtctnattccggggagngctccctgtgcgcgcggntgggtncccaccgcctctacccggtnntnaggntcctctgcgctcaggnagggttggtagcgtgtagtttnntngggaaggtgttacacgcngccgccancaggggctgtaagagggaagctnatacttacaggatttgnaggttgggctggagttcgcnttnctgnactttatcttnttgnntgttgggagatatanatagaanaagaagataggantatagcgggtaggatatggatgaaagctagnagaggaagcggagggtgagggagcncaggaatgggtcgcacttactgatgatgatgaggatatccagcaggaacaagatggttgctagagtnangcccacagtctgcaccgtgttgtagtcatagtaaaatgggtcaggttcctcaggagcctttgtgggggtctgggtcggggtcgccatgctgggccggagcagggggctgctggatgctttggcggcgaaggcgcgctgcagcagctggaacagggacggacc

SEQ ID NO: 633435 - DNA, 405 bp, Homo sapiens
atatgtgcataataaaactccataatgagagctggcaagagcttagccatcttctagaccacgcttctagccagaacaaacctatgctgaagagggcttgggggatattccgagagggtggctgggcccatcctattaacaaggagcactcaagccccaccactgtccaccagtgaacagctcagattccttagaaagagctttctgttgagtaaaatctggttctcacaatttcgggcttgaattctttaattccaggatctaagattctgcaaagcttgggaaacttctgagaggctggtgcctggaaaacctctggagacagttgttaaacttcagaaagatgcagagattttagacattcagaagaccagggctggaaaagcaaatcttgactggcccaaa

SEQ ID NO: 633436 - DNA, 304 bp, Homo sapiens
tgcttggggttgggggtcgtgggcacaggggacaactctgggaacaaaggtggccctcggtgccgtcctgcccaaaatctcccgtcccacggaggcccccggggtgggggctggggggggtcccccccaccgttccgcttttccggccaggggcttttctgtcaatttttatggaaaccaaaaggaggtttttgttttattttgtttttttgtaaagcttaaaaaaaaattttccttttatacttgagcccccatccttaaaaaaagaaaagaaaaggaatccataaaaagaaactggggcgca

SEQ ID NO: 633437 - DNA, 975 bp, Homo sapiens
ctgggcatctcgggttagagttcatgtaccaaggtaactcctgcaaggtccatgcggagcctctgctgggaaattacccttgcctgtcttgtccgttcctagtccctcactttccatgcttgaaagtttgcccggctgtggcaagttgtccgttccgggtcggacgcattgacagcctgtgggtctccttcgggatgggtagtcctaggcttggacctgtgaggtagtgttgaatcagcaggatgactgtgagcttggggcgatgccctcaatggcttgtaccgagtccagtgaccacgggacttttacatagatagcatggcaccatggagcacctgggagcccggaggcctggggaaactctcgagcactgggacctataccgaacgcgagaataccagcatcggggccagactacacacgcagccagagagtggagcctcatggtgcacagccactgctcctccaaggccactccctcctaacgcacactcctcgtgctacgttgatgtaccatgggactctgtgggagcagagtaggactgtgcctggcgtcatcttgggaatcctttctgttacctgggactggctggataggggttcttggcactggggctctggagcgtccaaacctgtagaggacccaggagggcttcggcagattccacctagtgattctgtcttgctggtgtcggatagaaagccacggcaggagcagtagactccctatggttggatctcagctgggaagtctactgttttggagcccatttgtgtgagaccctgtagtttcaaatttgacagctggaaggtgctgtgtacctctgatctcaccccagagtaggagttctgtctcaaggaatcgtcgtgtaatgtgcacatctgtgtccatgtgtgacccatgtgtctgtgatagtcagggaacatgtattctctgcaatgcatgtatgtaggtgcctggggagtgttaccccc

SEQ ID NO: 633438 - DNA, 118 bp, Homo sapiens
  misc_feature (5)..(5): n is a, c, g, or t
tggtncttgcagacaactccacccctctttgatgtaaaagtgctttattgggagacttttgtcttacagcctgccaatcaaccctcctgggtgtggcaccaatatgtgttgttgctag

SEQ ID NO: 633439 - DNA, 292 bp, Homo sapiens
ccccccccaaaaatggggggggggggggataaaacccccggttttttttttttccccccccccccccgcccccccccgggggggaaaatttttggggggcccccccccccccccccggggggggggggggggggccccctttttggggtctctttttcccccccccccccttttttttttttggggggggggggggggggggcccccccggtttccctgggggggcccttggggggccccccttttttttttcccccccccccccccgggtttttttttttttttgggggga

SEQ ID NO: 633440 - DNA, 349 bp, Homo sapiens
  misc_feature (3)..(3): n is a, c, g, or t
  misc_feature (7)..(7): n is a, c, g, or t
gcngtanggcaggatctatgatagggacttctgtgtctaatttagtctgaacactaagttccacagtggaaaaaaaaaaaaagtccaaataccaccaacgtggtcaaaatccggggcttgctgcttatttaaaaagcacacggtgatgatcaggggccaagaggtgaggcaaagccggaccagctccggtgaggcccatcaggacggtgcgtgactctcaaactcccgcacacctgtgtgacccggggcaaatttaagtttatgccattcactcacacagggggagaggaacgaaaaaacctggtgcctacagggcttggtctggtacccgggccccccggcattgggg

SEQ ID NO: 633441 - DNA, 2121 bp, Homo sapiens
tgtgagttgtccacgaggatacatgcataagtatgagaatatataccccttcctcagcaattagcacagagaattgaattaagcagtacaaaggttttcagttttaggtttacctgattaccccttactatactcaaatgcatcccaatacttctgtactcttaaatcaactgacaacctttaagcatatgctcttttgctaggtcttgaagaggaggcacaactgccttcatatgagtccagtgtgtgttgtcaaaatgtaacttttgaattgttctaaagccacagtaagagaagtaagtggttcaagtttcgtgcctttacatttccaccattgtgctttcctctccctttaccccacatacaaaactgagccaggcaatgcctagtttttgtgtgctgaacacagctgtacttacatccaccatcctctggacgtgtttgctaatggtttttggatcaggtttgggagacactccagaagcccagtccactactactggtggctttgaaggtgttagtggctaaaatgaaatatttagagaaatcctcatgactacaatgcaatattataacctatagctctttcttttcccactacctgacggttacatttatggacaatcttcaattatgttcagtggcaaggagcagagaacccacaggcaattgaaatctctactaataattttggctaacaaggcattgtgcttacggtttccagagtgctcttcacatacattatctgcagctacagataatttgaaattctcaatctgcctgagttgcaattccctctccattaaaccctttgtcagagctatcaacaaagagtaaagtggatcatttatgtttcctctctattctccagtcacattttgcagtagaaatgtgaataaggaaaagcttagctaaaaggcaggaaggcacaagaaaaatcatcggaagcctggacaagctcttttctaaatacagtcatgcatcacttaatgactgggatatgttctgagaaatgtgtcatgaggtgattttgtcattgtatgagcaccacagtgtgtacttacacaaacctagatggtatagcctgctacacacctaggctatttggtatagcctactgctcctaggctacatacctatacagcaggttattatactcagtactgtaggcaattgtaatgatggtatttgtgtatcttaacatatctaaacatagaaaaggtaaaaatatggtatagaaatttttttttaatgttacacctgtatagggcacttaaccatgaatagagctttcaagattagaaattactgtggcaagtcgtgagtggtgagtgaatgtggaggcctaacattactgtatactcctatatactttataaatactgtacacttagactacactaagtttcttaaattttttcttcaatgataaattaccttattttactgtaaaagcttttaatttttttaacttttactcttttgttatgacacttagcttaaagcacacattgtatagcttatagctgtaccagttatttcctttatagccatattctataaacttttttctattttaaaaatgtttaattttttaaatctttgttataaactaaggtacaattacactcattggcctatgtctatatagagtcaagatcatcaatatcactgtcttccactccacatcttgtcctattggaaggtctttaggggcaataacatgcatggagctgtcaccttctggaggacttgcctgaggctgttttacagttaatttttctaagtagaaggaatgcactctaaaataatgataaaaagtattgtatagtaagtgcataaaccggtaatacttactatcaagtattatgtactgtacgtaagtgtataacctagactttttacagctcagtaggtttgtttacaccagtataatcacagacatagtaatgtgttgtgctacaatgttacaattgttctgtcactaggcagtagtaatttttctgctccattataatcttaagggaccactgtggtatatgaggtctatcactgaccaaaatgtcattatgtggtgcatgactgtatttgaaactcagcccaaattaaaatctctctgaa

SEQ ID NO: 633442 - DNA, 299 bp, Homo sapiens
  misc_feature (11)..(11): n is a, c, g, or t
  misc_feature (217)..(217): n is a, c, g, or t
  misc_feature (258)..(258): n is a, c, g, or t
tcagcggacanccaccagtgccatggcctgagccccagatgtcacacctgtccgcacgcacggcacatggatgcccacgcatgtgcaaaaacaactcagggaccagggacagacctgctgccaagtgagcctgatgggccacaggtgtgctcttctaaatggcctgtgagccaggctgtgggaactctagctgctgtcagcccctcctgtaggagcntggccctgcccaaggctcctgacttccctcagggaagtctnactgtctttctccattcagtctgaaaagcctttaagtttcc

SEQ ID NO: 633443 - DNA, 118 bp, Homo sapiens
cacgttaacccacagagcctgccaagctggaagttaactggggtggcttcaccttcgatttgattcacagttccatcagctctcaactcctggtttaacactttgatctttccgtttt

SEQ ID NO: 633444 - DNA, 776 bp, Homo sapiens
  misc_feature (542)..(542): n is a, c, g, or t
tatggagcccttcccgtctttgcccatcacacagaaggaaaaatggaaactcgcagcaatctttttcaaattcttcctgagaaatgtatccatcctggtcgtgatcatagttcttgaagacagaatccaccatcctctggacgtgtttgctaatggtttttggatcaggtttgggagacactccagaagcccagtccactactactggtggctttgaaggtgttagtggtggagctctgtggttccttggttcccgggcataggaaagctcatagatttcatcctcagtgtagtaaagatccagggataacgtcagcaagtgtaccaagtccttgttagcctccaagggtggggccacctcttgcagctggaccaattcactgatatgattgtatagggccagtagcttatggacgttcactttcccgtcctccagatagtcaggcatggcttcatacagggagatgaggtccttgagatgcacacccagaatggggatcttgaagtcggtgcactctccataggctcgccggtaattgtcntagtttctggaggaggacagcagctcagtcatctcaccgagaaccttattgatttcatgtgggacatgcgaacttgtctccttgctggtatttgattttatcctttgagtaagtttcctggaccagtcacgggcattgatttgagttgtgtcaatcaggcggcaatgtaactcctcacccttagctttcaccagttcctgaaactcctccatagtgtctgtcaagctggcgtcc

SEQ ID NO: 633445 - DNA, 184 bp, Homo sapiens
actcggaccccagtggcggctgcccaaagaggagaagtgacgaccgtcactaacaattactatctcacgttgtacgagggccaacgggttatcccgccggccctcctcctcttgtcaagggcgttctttgcgtcgcactgctcggatggctgctgctacagctcgccaaccgatgagggtaaga

SEQ ID NO: 633446 - DNA, 263 bp, Homo sapiens
tatgatgctgggggggtggtgtgaggagactggagaaatatgtgcggggcagagtcccaggtggtgacaggaaagtgttgaagcctggccactactgggcaggcaagacagagttgccactgtatgcacaggggatgagcagctgccggtactccagtggcaggtgccgctccactagcacgtgcagtgagacttggtcagtgaccaggccctgccgccgcgtcagcagctccaggtcctctggcttcacagtcttgtggcca

SEQ ID NO: 633447 - DNA, 1019 bp, Homo sapiens
  misc_feature (837)..(837): n is a, c, g, or t
tgtgagttgtccacgaggatacatgcataagtatgagaatatataccccttcctcagcaattagcacagagaattgaattaagcagtacaaaggttttcagttttaggtttacctgattaccccttactatactcaaatgcatcccaatacttctgtactcttaaatcaactgacaacctttaagcatatgctcttttgctaggtcttgaagaggaggcacaactgccttcatatgagtccagtgtgtgttgtcaaaatgtaacttttgaattgttctaaagccacagtaagagaagtaagtggttcaagtttcgtgcctttacatttccaccattgtgctttcctctccctttaccccacatacaaaactgagccaggcaatgcctagtttttgtgtgctgaacacagctgtacttacatccaccatcctctggacgtgtttgctaatggtttttggatcaggtttgggagacactccagaagcccagtccactactactggtggctttgaaggtgttagtggtggagctctgtggttccttggttcccgggcataggaaagctcatagatttcatcctcagtgtagtaaagatccagggataacgtcagcaagtgtaccaagtccttgttagcctccaagggtggggccacctcttgcagctggaccaattcactgatatgattgtatagggccagtagcttatggacgttcactttcccgtcctccagatagtcaggcatggcttcatacagggagatgaggtccttgagatgcacacccagaatggggatcttgaagtcggtgcactctccataggctcgccggtaattgtcntagtttctggaggaggacagcagctcagtcatctcaccgagaaccttattgatttcatgtgggacatgcgaacttgtctccttgagcctcgagattgagctgtgacacagcccacctatcacagccatcagtgtattgaagttctgtagttggtggagcttctgagccacctgggatgaact

SEQ ID NO: 633448 - DNA, 593 bp, Homo sapiens
atctcttacataggatttcgggggcaccccaaggttgatcttatcgggacctttttcttcccataggcaaccctcgcaccctcccctacttgtggagaccaattttatttcccataatttctccgcgaaggactcccaccctgctttggcgtcgcatattattcgtagatgaaaatattctgggcgatcattgatgataaacaccgcgtcccctgcatgattctttcacaacaaaaagcttctttttcgagtagatctttctcctcgcccactctttagattcttcacacaccttgggaacactatgtttgggggtttctttacaacctggtcacacaatatgtccacctttgttccactactcctcctctgaaaacaaccacttgtatacacccaaccactcacgctttcaaatgtaagagtgtgttatttcagtcacccccgcgttgtattcatgctgtctgctatgtttctgcacttctttttggcgatcaagcactcctccgtctttcaacagttttctgtctcccaacacattactgccaccctgttgtctgcctaacaatatcaacaaaaatcaagaacaataaaaa

SEQ ID NO: 633449 - DNA, 875 bp, Homo sapiens
  misc_feature (10)..(10): n is a, c, g, or t
  misc_feature (141)..(141): n is a, c, g, or t
  misc_feature (172)..(172): n is a, c, g, or t
  misc_feature (213)..(213): n is a, c, g, or t
  misc_feature (238)..(238): n is a, c, g, or t
  misc_feature (346)..(346): n is a, c, g, or t
  misc_feature (366)..(366): n is a, c, g, or t
  misc_feature (375)..(375): n is a, c, g, or t
  misc_feature (400)..(400): n is a, c, g, or t
  misc_feature (414)..(414): n is a, c, g, or t
  misc_feature (442)..(442): n is a, c, g, or t
  misc_feature (504)..(504): n is a, c, g, or t
  misc_feature (530)..(530): n is a, c, g, or t
  misc_feature (533)..(533): n is a, c, g, or t
  misc_feature (538)..(538): n is a, c, g, or t
  misc_feature (585)..(585): n is a, c, g, or t
  misc_feature (589)..(589): n is a, c, g, or t
  misc_feature (607)..(607): n is a, c, g, or t
  misc_feature (618)..(618): n is a, c, g, or t
  misc_feature (640)..(640): n is a, c, g, or t
  misc_feature (659)..(659): n is a, c, g, or t
  misc_feature (684)..(684): n is a, c, g, or t
  misc_feature (714)..(714): n is a, c, g, or t
  misc_feature (716)..(716): n is a, c, g, or t
  misc_feature (749)..(749): n is a, c, g, or t
  misc_feature (857)..(857): n is a, c, g, or t
ctggccaggnccatctcttaccggctcctggtcaacccccagggagcgggaagagtgccagccaaaccacgagggtgaggaggacgacagcgacgtccgggcccagcaggcctgcgttgaggccaagcacgtgagggtgcnccccacccacatgtgggtttgtttgtgtgcncgtggcgtgggagcgtccccgccttgtgtggggtctgtgcnccagggaggagggagggggggtgtntgccccaagcacagcactgaacttttcacaggacaagttcatggcggacatggacgagcttttttctcagggggatgagaagaggaaggtgagtgtgtgtggcttgcngccgagggctgggaggggcncgtgcagtnccccttttcagcctctaaccgtgtncacctgttccacanaagcaagacaaccccgactacctgtgtngcaagaccagctttgagctgaggcgggagcggtgcattaagcccagtggcatcacctacgancgcaagggcatcgaggagcaccttcnggngaggntgcggctgggggagcagggccagttgcatggtcctgggccccatganttcnctttgccctttttgttanttcagcgtgtnggttattttgaccccgttaccnggagccccctgacccaggnacagctcacccccaacttggctatnaaggaggttattgacgcatttatcttttanantggctgggtggaggactactgaggttccctgcnctacctggcgttctggtccaggggagcactgggcagaagcccccggcccctatacatagtttatgttcctgggcaccccgaccgctttccccaagttctgctgttggnctttggactttttgccct

SEQ ID NO: 633450 - DNA, 470 bp, Homo sapiens
cgaaataatagcacatgcgagtgtgcctcatctacagatccttcagagattcattagccatgtacaatctaatgcatacacaaaggccgtctctccgataaatacatcagcacatttactagagtgtacgaatgatataacgactatgccaacatttatttgatcttgccactatatcaaagcatcattgccaggttgctagttgaggggaaaaaaaggttggatatttgttccctcgctcagctccagatattattctacctaactaagtccccaggtttcttccaggcatgtaagaattagtggtgtctacatggatgtaggcactagtcattgggcaatatctcctgtactcagacatccctagatgccatactgagtttgaagttccttaagtcctaatgtaaggcttctagtgaagcctcctcacagtaggcttcactaggcccacagtgcccctagacctctga

SEQ ID NO: 633451 - DNA, 227 bp, Homo sapiens
aaaaacagacacctcaaatcaagagtacactaccactattgccacatattctaacaccatcttcgctctgatgggacattagttacccttattttcatagtgaaattgtgtttcgtgcttagtctgacctttctggtatcttcatttacttccattgactttggatagagtggaaactcccactacactttttctttgttgttacagtcattgctgcttccttggta

SEQ ID NO: 633452 - DNA, 661 bp, Homo sapiens
gagacttcggttgaggaaacgggtattcatgtctcagggagtaggttggtgcagttacagcttctctgtggtatgcataattaataatgggagctgcaaaggaagaattcgtgacaatgagattggcatggtcagaacgaacaaatgggaaggacacggttgtagacctcttggtgtactgagagacattaagaaagactgaagtggattgtaggtggccaagcacttagttcctgctggttttcatttggccagtactccagccattggtgacgcgtaacagccctaccatggcctgtggccctgctctctggtgacccatcagctttaggcatctccacgggtggtgatccaagctatccagacatcagatgacaggcaccattcagggcatactctgcacctctgacagtggctaatatcctgaggagttgggttccagcacgtcccagttcactgctgatctgtggccattgtgaaccttgcacgattacaagcgaactccaagggcgcatcctactagtggatgcataagttgacttctctgacgttttgcatgtttgcatgtgggtattacctatgttggtgcgttgtctaatggtcctgcacactatggctttgggtctccattaccatcttcgggtcctgtattatgaaggca

SEQ ID NO: 633453 - DNA, 190 bp, Homo sapiens
cagctgttcccaaacactcaaagctcagatggctaaacaaacaaaaggaaaaagacagtaaggagtataacactcccctgatgcaacttaatctaacactctacactttaaacttgttctaaagcatacatttgaattcagaccacatacattctgcagacacatttatactgtgtataaaagaacagcc

SEQ ID NO: 633454 - DNA, 1564 bp, Homo sapiens
ggtgagacaaaacaagtatccgagtaacagtataggcgatagaaattgaaacctgtgcgcaattagactatagtaccgcaagggaaagatgaagagagagtggatgaggcgaaggcagtaccagtagtagcacaggacggtaacccgctataccgtctctgcgatcaatggaacttgagagcgtagaagagtaacgagtagcaaggcagcagcccaagcagcgtgcagcaggcacccccgcggagagaccgagcacggcagctcacgcgtaagcacaccagcctcacacacagcacgccacaacccagatcatcatggtgaggcaaagacataaggtgcgagcaagcatggcatcacggctcagcacggccggagccagaagaacaccgtcacccagcaagaacgcgtggcgatgcactacgccactggactcgggctcaccacaagcaactaagaacagatacgtgaaagcactacacacacggcgtgcgcaacacactctcctggccaccaccacggacacaccaccctcttaaacacatcccaacactcgggctcacaacgaatacaaaaagcccatggcgtacaaggagataaccgacacaaggcaccggggcaacaaccacggagcgtcaatatagggacgcaaccagccgtcacggcacacagataccacaccccactcatgggtgacagaacgacaggcaacgctacacacaccacacataccaaaacaaacacagcagcataatgcctacagggactccactaaccacaacgagacccaaaggccccaacgcccaaaggtctgagcagggacacgaggcaggaccgccccacagacgctccaacagacaaaacaccaaggctaaagcgccgtaacgacaagacacgtcgaccacaaaaaacgacgtaagtacagcctggaacagctccgctcaaaacacgccccgacaaaaggaggaacacaaacgtcgttactgcaacgcccaataaacaggacaacgaacaccgtacaacgggcacaaggataacacacagggtacaaccagccggacaccacccacactggcgtaacccgtacacggcgaactaacaacgaacctagggagcgaacccagcagctcacaccagcagctcgaccccccaggacacaaactacacacccacgcgacccacagaccacgtcccaacccaaggtcaaacgccaaaaaagcaacgcacccagtgaacatgcaaccccagtccaacacggaagacaaacacccaaacacaacacgacactggcatgacaacatagggtcaacgggacatacaatacaaagtatacaacaggtgtatactctcggagcaaaaacgttttaccccccagtcagcgtgtctacacacccaccgacagacagttcaacagtactatagataccttaaccaagcactattacatatatgtacccctgagcatgctcacaacagtagaccacaagtagttataacagtcacagactaatcacctctaactcgatgatactagctcatgcacgacttatctacttattatatacgt

SEQ ID NO: 633455 - DNA, 199 bp, Homo sapiens
cccagtgaccctgggccccagccagcccctccagggctttcagggaagcgccatcccttttcaaagatgtccaacgtcccttcttcctgtaggggccgagtcctgcctcctatcagggcccgatcatagaaggctattttttattttgggggacgattataacttaaatgattgttttaataaaaatttttagctggga

SEQ ID NO: 633456 - DNA, 306 bp, Homo sapiens
tatatatacagactcctgacagataaacagtcaagcctgtctgcaacagggtctgacaagcaagatgctgagtgaatacttaggcttcattctaccatggacttcatgagtgaaatgtagaacctacaagaagcttctctcaccaagtaatgacaaacttacgatttccaatggacccaaaaaccactcggtcaatgaagaagagcaggaagaacaaggtgaaggaagcgaggatgaatgggaacaagtggtcccccgtgaacaagacttccgtcacccgccaggcggctctagttcagactccat

SEQ ID NO: 633457 - DNA, 119 bp, Homo sapiens
gacgaccgttatagaccaggcatgagatgagcgagtgtatgtattctacccaccctggaatgacaagggtggtgagcccaggtgccggatgcccagcccctgaggcgggccgtactcca

SEQ ID NO: 633458 - DNA, 162 bp, Homo sapiens
gttgcctcaggtaacaactacagaagtgaatttgcagataaggggattactgctcctctgctctaacttggtgtttgggtgatcagagcaggtagccactgggagagcacttctgagtgatactaagcagtttctctggtggcctttcacatctccactgtc

SEQ ID NO: 633459 - DNA, 296 bp, Homo sapiens
tttatttagggggtaaagttatgttgctatatccccatgtttgctgctgctgttgagtttctgtgctttgggagtataataagaaagttatttctttgtcttaaagaatttttaaaaaattagtcttgtgatttattcttctttccagggtacatactgtttggttttaaaagattagacagtttagttaaagttggtttgatcatccttttttttacaaaacttgaaaattgtatctggttcttgaagaattttcacttttattaaatatgtgtatgcataaataaaatataata

SEQ ID NO: 633460 - DNA, 258 bp, Homo sapiens
  misc_feature (12)..(12): n is a, c, g, or t
  misc_feature (44)..(44): n is a, c, g, or t
ttacccccccgngggggttaatccttttttttacccccccgaanggggggcccccccccctgggggggggggggggggggccctttcctttttttccccccttttttgttgtttttttttggcccccccaggggggaaaccccccccccccaaaaagcccaaaaactttggaaaaaatgggggggggggtcccccggaaaaaattttccaaggggtttttcccaaagacccggtttttaaaaaggttctttttttcca

SEQ ID NO: 633461 - DNA, 186 bp, Homo sapiens
ttctagaggtatcccccccttcacgactaccacagctttatctgtcttgtaataaatgactattgtgccgggcacggtggcttacgcctgtaatcccaacactttgagaggccgaggaggacggattacctgaggtcagaagtccaagaccagcctgatcaacacggagataaccaggctccaggt

SEQ ID NO: 633462 - DNA, 144 bp, Homo sapiens
agttccttacaaactgccgacttggctcaacaaactgcattaccttatccatgactgcctacccgatcgcacacctaaaatgccaggcacacgtagcactggagcttgctgcatagacgcccaccggtgctgtgtggaagggag

SEQ ID NO: 633463 - DNA, 183 bp, Homo sapiens
aaccttatggcgcatctcatggatgctagtcagattcgctcactgagccacaatgggaacttcgtagatctgcattttaaaatcactgctgtggccacgggaatggagaatggattggagaggaagcctggaggtggagagattagggaaggctgttacggtcgtttgttttgagatagtgct

SEQ ID NO: 633464 - DNA, 368 bp, Homo sapiens
gccgcagtgtgcctggattcgtggggcccagggccagagggccctggtaagatgcaagaagggtggggattcagaccccaaggaagagtctgaaggaggatttgtgggctgggcctggcactttgggaggctgaggtgggcggatcacttgagcaggagttcgagaccagcctgggcaacatagcaagacctcatctctactaaaacaaaactttaaaaataaatttagcctcacagtggcacatatttgtggtcctagctacttgggagcctgaggtggatcacttgagcacagtttgagggtgcagaaagttatgactgcaccactgcacttcagcctgggcaatagagtgagaccctgtctcaaa

SEQ ID NO: 633465 - DNA, 91 bp, Homo sapiens
gccatccaggacttagggaaggaccccggaaacttaggggcccacgtgagccacggcccacggcctcattagctaagcacctgaagcatcc

SEQ ID NO: 633466 - DNA, 424 bp, Homo sapiens
cgggttcttaggagggtcaaagccagcccaagcttcaacggtggagaagtggatgactctgttatagtcagagcagaccacttggcgttcagtgtatctcagcacgcccttgaggggtccccacgacgcttgattcgcgactgtcttgatgtcatcatatttggcaggttattctaggcgtcggctcaggtccaccgctgacacgttggcagtgggtacacggagggccatctcagtcagcttcccgtacagctcagggatgcccatgcgcacagctttggcagcgccagtataggcagggatgatgttctggagagccccccggctatcacctcacagttccccgtataggccgtccacagtcttctcgctgacagtcacggcatggactgtggtcatgagtccatcctcgataccacaggtg

SEQ ID NO: 633467 - DNA, 460 bp, Homo sapiens
acagtgtcccagtgaactgagagagcctctccataaagcattgtcaaatgctcctgagaccaggcagtgacatatcaggcatttcgggaatgtacgactggagaccacagttcatgacagcggctggagtaagattttggtgcctctggtttcgctaggacaaattggtttcggaatggacaagaggtggtcaagaacctttgagcgcacgtgttgggagtgttggctgtagacattaccatggaggactagttctggcaggaagtacatcattcagcaaggtggctggggcactggtgtattagctcttgagtcaaggaaggacggagggaagtaccctggagatcactgcagaagatagcaatgacattatacatcctgcccagcgacaacgtctggacaagtcagtcccccagagtctccaactgtgagcacttcctggcagtctgagagcttaccc

SEQ ID NO: 633468 - DNA, 144 bp, Homo sapiens
cctttctgcacattccagattttggcttttatttaacattgactatacaataccctgactcccaaagttagttacagtgggttatattgtttttgtgtactgaaggatttattcagactgctgtactactgtagtgtgtaagcg

SEQ ID NO: 633469 - DNA, 606 bp, Homo sapiens
agccatgacccctaacaggagcctctcagccctcctaatgacctccggctaggcatgtgatttcacttccactccataacgctcctcatagtaggcctactaaccaacacactaaccatataccaatgatggcgcgatgtaacacgagaagagcacataccaaggcctagccacacaccactctgtcctagatagaagggccttcgatactgggagtaaatcctagtttattaccctcagtaagttttgttctcgttcgacaggactttgttcttgagtccgttttacctagctccagaccttagcacgcgcttacctccctcaacttaggatggtgcatctggtcctcccaatcgagggcatcagctccggctaatatccgcctagtaagttcccatttctctaaatcatcactcctgtattagctcggctatcaaggaggtagtcagactcaccgttgaggctcacgcataagtctaactagaagaacaatgcgaagacccaaactgattcaagcagctgggttattacaagtttatactggggtctctaattttagcccttccttacaaggcctcagaggtaacttcgaggtctcccttcacc

SEQ ID NO: 633470 - DNA, 457 bp, Homo sapiens
  misc_feature (11)..(11): n is a, c, g, or t
  misc_feature (18)..(18): n is a, c, g, or t
  misc_feature (68)..(68): n is a, c, g, or t
  misc_feature (171)..(171): n is a, c, g, or t
  misc_feature (271)..(271): n is a, c, g, or t
  misc_feature (299)..(299): n is a, c, g, or t
  misc_feature (347)..(347): n is a, c, g, or t
  misc_feature (443)..(443): n is a, c, g, or t
  misc_feature (455)..(455): n is a, c, g, or t
cccttttaaancctatantttatttatgtggggatctgtcaaaagaaaaccttcccaaaaagatttantaatttaaacccagcctctgttgccaaataagttaatgttttcttgttttgtaatcccacacattcaatgagttaaggctttgcacttgtaaggaaggagaancgttcacaacctcaaatagctaataaaccggtcttgaatatttgaagatttaaaatctgactctaggacgggcacggtggctcacgactataatcccaanactttgggaggccgaggcgggcggtcanaaggtcaggagttcaagaccagcctgaccaatatggtgaaaccccatntctactaaaaatacaaaaattagccaggcgtggtgcaggtgcctgtagtcccagcttacctgtgaggtggagattgcattgagccaagatctcaanactgcactccancc

SEQ ID NO: 633471 - DNA, 459 bp, Homo sapiens
  misc_feature (299)..(299): n is a, c, g, or t
  misc_feature (334)..(334): n is a, c, g, or t
  misc_feature (394)..(394): n is a, c, g, or t
cacccaatgtatagatatgagctggggctgtccacatgtagttttagcagctgcagaggaaactggctgagtctaaggctacatatttctgctcagggggggtatccatggtgaggactctcatggtgacggtagtcatcctgttaaccatcctggcatccttggtggtaactatggtaaccatagcctgcatactcatcttctgggcagcgcatccccagtgactgctgaatcgccatttcctgtctccgaagttgcaccgaatcaattaaatcgtacacaatcaccatggaccacanttgggaaggataccaggatttgacatttccgtctnttccgactagaagcatggaggagtactccgggctcacttgaaaatagctacgaatgtctntcaccatatgggctggtacgtcttctcgctcaacaacagagctcccattaattgggacagttcta

SEQ ID NO: 633472 - DNA, 868 bp, Homo sapiens
ctgcttctgtggtataaagatattgttgaaactgtcagaaaacgcctgcagacatccctttatcataagactaaacgagtcataagaaaaaaatggaagccatttatgtttatctatagcgaagacaggctattagtgacgaaactagacggggtgtgaagtgtgaaagtgtcttacagaagactatggtgttggagtgaccaggcatgtgtgactgaagaaactgaagcataagctattcacctgttctgtgctgaagagagatgaacatgaagttaatgacgtacatatagaaataaccctgcgatcaaagctaaaagggaatgatcttgatcacgtccttgaccagagtagatccatcagtcattgcagtgaacacatgccacatcaatggtatgcagatcatgaagcaagcaaagatttatcacaaagggaactggtgaatattcaacgaggctggttgcacgaaatttaaagaagaagacgaacaatgaaagtttttaaagatctcgtcagtgataggctgggcagcagttgactcaacgcctgtaatcccagcgactttgggaggcccgaggtgggtggatcacgaggtcacgagatcgagacattctgacgcaacatggtgaaacctcggtctctactaaaagtacgaaaacattagctgggcgtggtggcctcaccctgtaagttcccaagctactccggaacgctagaggccaggagaagttgcttgaaccccgtggaggcgagaggtttgcagtggataggagatcgtgacaattgacatccaggcctgggcacacaggaacgggagatacaatctccgcaagaaaatcacgaaactcgaaacctcagcaagacaacc

SEQ ID NO: 633473 - DNA, 322 bp, Homo sapiens
gctgtgtgtagcacaacctagggtcagttttgcaggtgttaaagcatttaccaagatagttgtaggtaaagaagggcagatttattagagaaattgtgaaaatatgttgcagtgggcagctcagcagagaaggggctacctgcaaagaggcaagggctggaggaaagttttatagggtcctgctgaagggtgctacgtgtggaatgaggtcattgtgcccgcaggttgtttgtgattagctgtctctaacaattgttcatacaataattgttcattattgttctcaacttggggctctccccaacctggggacccttcctta

SEQ ID NO: 633474 - DNA, 501 bp, Homo sapiens
tctagaggatctctgccatttactccatggctgaggcaggagaatcgcttgaacccgggaggctgaggtagcggtgggctgagatcgcaccatgcactccagcctgtgcaacaagagcgaaactctgtctcaaaaaaaaaaaagaaaaaaagacggaaggtgacatcggcagctctcagtataccgagaaatagaaaaagataaagcacatgtagcagagacggggggatctgagtgaagaacataggggaaggagtgtttctcagggtggcaggttaggggaatacctctactaggatggccacttagggccaatggatagatgctaagaaaacaaaaaaaacaatataaaagctagtctaggccgggtgctgggggctcacacctgtaatcccagcacttggggaggctgaggcggagggatcgcctgaggtcaggagttggaggccagcctgggccaacatggtgaacccctgtctctagtaaaaagacaaaatttgg

SEQ ID NO: 633475 - DNA, 887 bp, Homo sapiens
tgcccggagggacgcactgcccgacacacaatacggttgggggcccccaagaggacaaactgcgggtggtggaaaaggtgtcccccccgcaagggtggcgcaagggtgtatcctcgccccaaggtcgcccaaaaggggaatgtgcgccaaacgtgtgcgccagatagagccgaatagggcaccaccgtgggtaccaactttggccacctggaataacacctggttcctgccaggcgataccttcatacggggcggggatgtggctcccccacgacataggtgcgcaaggtcaacaacatggttacacagggaggagtgcgcagcgcaccccgggatgataaaaaggggcgcgggaaatggtcgtccagacattattcacgacacgcgcctctgagagaggagccacccaggacaggaccactcgggggcggcatacaccagacgaaaggcccgtcaacacacacagaggaggcctggggcatccccacgcagccactcttctaacgaagagagagcacaggagtattaccccgaccgggcgcttgagacggacactcggtgcggacgacacatctacaaccccttgggggaggccggcagaggcggggcggtccgcggcacccagccggtagagcgcacctacggacgcgacgactgaggaaacaccacggcggtggagccacgcaacacaatgccttcacgcccggcgttgtgtgcaagagaatactcaggaaagtacccaccttcgaactgggggggcaggaagaaggggacgacgggctatggcaaccgccgggggcgcagaacgggtccccatgccgccccgaatccgcccatatttgccaccccaccggggggcacaagggggaacccccttccccatgaca

SEQ ID NO: 633476 - DNA, 111 bp, Homo sapiens
cacgacgtgtgtagatggatcttacaatgtagcccaataaataataaagcatttacattaggatacaaaagtgctgtgaaaacaatgacatcccaaagcaagatctcaaag

SEQ ID NO: 633477 - DNA, 401 bp, Homo sapiens
gaggctctcacattgctgaagatgccgacgcaatatacagaggtggcccgtaagctggtcatccttgagagcggactggaacgtgcagagagagcgggctgagctctcagaaggcaacatgtgccgaagcttgaaaaagacttgcaccctgtgacgaccaacttgaaagtcactggaggctcagggtgagaagtactcgcagaaggacgacagatatgaggaacgagatcaaggtccttaccgacaagctgaaggaggctgagactcgggctgagttagcggcgaggtccgtaactaaaattggcgaaacagcatttgatgacttaacagagaaagttggtcatgccaaagaagaacacctaaagtcatggccatcgattgctggcatcagactttaacta

SEQ ID NO: 633478 - DNA, 96 bp, Homo sapiens
  misc_feature (28)..(28): n is a, c, g, or t
  misc_feature (42)..(42): n is a, c, g, or t
aattcaagacttctaacgaatgtacggnggacatgaataggntccaaccagcctgtacatttggaaaaataaaactttattaaatcaaaaaaaaaa

SEQ ID NO: 633479 - DNA, 402 bp, Homo sapiens
  misc_feature (19)..(19): n is a, c, g, or t
  misc_feature (401)..(401): n is a, c, g, or t
atgggccaggccagggctntgctgctttgtgcggtcttggaacttggtgccctgtgtcccagccatggctaaaaggggccaattacagctcaggtcattgcttcagagggtgcaagccccaggcccttggtggcttccacatggtgttgggcttgtggacacacagaagtcaagaattcaggtttaggaacctccacctagatttcagaggatgtagggaaatgcttggatgtctaggcagaaatttgctgcaggcatagagcctcatgttagggcagtacagggaaatgtggggtgggagccctactcacagtcttcactggggcactgcctaagtggaactgtgagaagagggccaccatcctccagaccccagaatggtagatccaccaacagcttgna

SEQ ID NO: 633480 - DNA, 245 bp, Homo sapiens
  misc_feature (4)..(4): n is a, c, g, or t
agtntctacatacattaacatatgggcaagtagctctaaatttagatatcctatcttggaggtgcatctttaaacacacaaaaacaaaaaaggtcataagaacaaaaaaaaaaagacacaaagtcagttcaataactctcctctctaaagtcaagcttaaaagaaagacccccatcttctgtctataatagacatcatgaaatccgcatctggggttctccccctctgtagaagactctaccaag

SEQ ID NO: 633481 - DNA, 126 bp, Homo sapiens
agaggatctcgagctgtggaggagctgatgttgctgggaaggacccccaagttacctcttctgcatcgtcctcgggctccggttggtgctcacgcaccaggaaagtcttcagcttctcctgcaggc

SEQ ID NO: 633482 - DNA, 171 bp, Homo sapiens
tgcatacgcaccgaaactagtgggggaagatcctggcacagcatgctggtacctgagctgtctgtcttcatacccgtgaaatggatgggtgtagtaaccgctgagggaataccccgggtaatgcacttcctcgggacacggccggacaaccggaggctacctgtgcggccg

SEQ ID NO: 633483 - DNA, 186 bp, Homo sapiens
  misc_feature (119)..(119): n is a, c, g, or t
cggcggcctcggtggaggttgccggaggtagcagtggaagctactactccagcagcaggtgggggtgtcggcctaggtagtgggctcagtgtggggggcctctggcttcagtgcaagcntgttggcctgagggctgggcggtgggccttgcgcagtcgcgggggtagcatgctccagcgttcaaat

SEQ ID NO: 633484 - DNA, 502 bp, Homo sapiens
gccgacatactgcttgtaagacgtagcagtatgtcaggcagtaggttacacaggtgaatgcacttcatcatcacaacgaccctttgaggtagaatctgtcattactgctgctttacagatgaagaagctgaggcacttttcaaagttaaataacttgcctggatttgaactccagttggataatacctgattgaactgcctcctacaacaaatatctcttaaatgaataaatgaattcccaactctgagacaaggaggagacagcagactgcagaggcagggctcatgccacagtctgttcacctggacagccatcttttaggaagaacagccctggtaatatgagctgccttatccctgttagtgacatcgtgacatgtcacaaaacctcaattactaaggaaggacatagcacgttgcctaggcttggttttttaaaccagatagatgtgaatcctgagtcccagacccatcagaagtgctcgtggtggagaatggaaac

SEQ ID NO: 633485 - DNA, 146 bp, Homo sapiens
tacaggatgccaccatgctggtaagtttttgtattttaatagagacaggttcaccatgttggccaggctggtcttgaactcctaacctcaagtgatctgcccgcctcggcctcccgaagtgctgttcttcacccagcccggcccgg

SEQ ID NO: 633486 - DNA, 428 bp, Homo sapiens
taggaccccggccattcctcctcctcctatggaacctcaaagagcaagacccactcttttccagaagccctataagtcagagttggacaggggaatgtaaatttcatgggaaaatccttgtacctgatgtctgagccactcagaactcaccaaaatgttcaacaccataacaacagctgctcaaactgtaaacaaggaaaacaagttgatgacttcacactgtggacagtttttcccaagatgtcagaataagactccccatcatgatgaggctctcacccctcttagctgtccttgcttgtgcctgcctctttcacttggcaggataatgcagtcattagaatttcacatgtagtataggagcttctgagggtaacaacagagtgtcagatatgtcatctcaacctcagacttttacataacatctc

SEQ ID NO: 633487 - DNA, 357 bp, Homo sapiens
tgatgacgaatgtacttcggtggagagctggccagtctcacctgggacaagcatagaaccagaaacgattccgtcgactccagtgaaaccgcagctcataccagttgaaccgcagtcctcaatcagaccggatctgccaccaaccgcaccgattgctgtagcgatcccagatccagatgcacagtcgtccagacggaagatcagcccggcggcagaggctgcggcactgaaagccttgggtgatgccaccccggacttcactgctttcgttcagcctcggaagaagaagaaatcggtgttgaacaatatgaaccgaattcgagacgctgtcgcacgtcaagttatacctgtgtgtgg

SEQ ID NO: 633488 - DNA, 200 bp, Homo sapiens
ctggagcttgtattccctaacatagcctggaagaccacccttgccactcggccacactcgcgctctacccacacttctacatttgtgttcacaaatatagttgacagatctctacacagaatacaaactctctctgctctaaacacacacatctctgggacatcgactctgtagagacatttaaaccttcttggtgaagg

SEQ ID NO: 633489 - DNA, 1592 bp, Homo sapiens
  misc_feature (455)..(455): n is a, c, g, or t
  misc_feature (1078)..(1078): n is a, c, g, or t
  misc_feature (1133)..(1133): n is a, c, g, or t
tacgctgtgctggttcagtcacgctgctgctctgctgtacttaagctagcggcttgcgactgctgctgtcctgcgccgagatggggtggggtgttgatttacgtacctcttcctaggaacatccccgtggttgcaataaagatacccgggctatcctctccccggtttatactgtagccccgggggcaggtaacatatgtttcaaccgcgggaaccgtttggttgcccttggcctcattttcgggaacccaaataggagaacagggtgtgaaccaaaaaacacggggtgtgttcaccgggtctcgggtaattttcccggcgggataattgtttgggaccccacgccggttccccaggaacacgcgcgtgcggctatcaggggacccgcactgctggggggttctttttagcacaggggaagactcttgcgtctgcccccgtgtataaacccgcgngttgagaagattaagaccttcgcccaccttctcgggtggccgtgaagaaaacttgtgccccattaaggttccttgttttgtttcctggctatatatctggcccccgctcaacgttcggaaaatttcctgtgtcaacatccttgaaggggaggggcccaaagaagaattttggataaggtttgttcctgcgccaacgagaaccgcgccccctgcgggggggagtttttcagccccgcgacaccaaaggtgaacacacatctgggggagggtgataagacccaccttggggggggaagccacaacacacgggggtgttggccgcttctttatggaagagagcttttgtccccaccagtgaagaaacaattttgggggggtttatacaacccacaaaagggggtggcgcccacacctcgggtgtctttgaaaacctttctctgaaagggtggaaaaggccacaaattccgccgccccacactcttcaaggcccttccccccgcagaagtggcgctcgagggagattacacacagagacgcgggagagcccacttcggcgctccctatagccctctgcacaaaagtgttggtgtgttgtttgttgtgagaacacagagaagataagnctcattatgtcacacagaaatatgtgtccacggagactctctcgtgtgaagtgtnatattccaagcaaaggctgaaacaaaagccactatctttggagtttgagctcgagtttctcttgagcacatagagctatatcttggagtgaaccacacggagaaggaatgcacaatttcttggcgccttggagagaggagaaaaccttgcacaaggaaaaagggaacacatggtttgaaatttcaaagatggtggttctcctccaatgagaatcaccgagatctttcacagggaaatgtttcacggtggaaggaaaggggctcttggtcaaatgaggcctgacaagactgcacatggcaaacctttgccacgcttttggcctgaaaaactcaaactttttcacatttgaagagtaaattcctgttttaaaaaactttcatttgagaaaattcctggtgtatcaactggaaccaaatttatgaaatatcagattcaccaaaactaccttttgaatattga

SEQ ID NO: 633490 - DNA, 126 bp, Homo sapiens
tcgaccccataccttttaaaaaaaataattttctttcaaaaaatttttatttgagaccaggtctcgctctgttacccaggctggtgtgcagtggcacaatcacagatcactgcagcctctacttcc

SEQ ID NO: 633491 - DNA, 873 bp, Homo sapiens
cacctataaagcaagaacaggccaccatgaaaaagaatcagctaaaggacaagaaagaattcatggaaagaaaaaaaactgtatgcttgccaacaaatttgtttattaaagaactagtgaaaaacattaaggagcttctctaaacatggaacaagaacaacaaaaaagcatatggagcaataaggataaggcaggaaaatatgagacacaaaagtcaatccagaaagggcaacatctatcaaaagaaaggaccagagcaaatagcaggaggaataacataaaaataataagaaaaatctttcccataacatagtggagaatacaagtttcctgaatgaaaggcttcactgagcatcactaagaacagaaggacaacggtccacaccatcagttcatttcggtcaatttcagaacattaaaaaaaatcctaagaaaagggtacatcctttcaaataacgatatcaaccacataatataccacaagtagataattaagaccaaatagatcattataacttgcaaccagaaatatgagggctgcatgcttacctttgtgtgtatttgtgccctcacaagaaaacaggacatccgattcccaacatattcggagcaattcagtctgagcaaacagaatgtgtctcaaacatgtgacttccatatttcgcatctgttcagaaaccgaataaactatgagaaattgccagatataaagtaattccaagaagagcgtttctatcacagctggaataccagccttttggggtgcgcctcaccatggaactcagggtacaatgccctttaagccggaattagtacaaaaccccggctggaaaatctcagagacctgacggggcaaacaaaccctaggaaccc

SEQ ID NO: 633492 - DNA, 120 bp, Homo sapiens
tacgctagtgtcacagcgcatcctattctagagtccatatcatcaactagggtttacgacctcgagtgttggagtcaggacgatcccgatggtgctgccgctatagctgagcacggtggg

SEQ ID NO: 633493 - DNA, 430 bp, Homo sapiens
cagtggtatcaacgcagagtggccattacggctggggggggacaaaaaaaaaaaaaaaaaaaaaaaaaaattgttggttgggccggccactgggccctgaggaaaaacgctttcgaagacacaactccgggttggggcggcggcgggccccaggagggtttaggagtgacaccggtggggccaatagcgggctccctgaaggagaaagatcccgggcgtcatgtaggacttcagtgtggtcgaggagttttctctcccacccaatttaaaaaaaagcgcgccggggggaaaaccacggaggctgtttctgagaacaagatttccacaagagtgggagtcccagaggggcacataacaggggattcttattacaaaggggtggtcacaagggaagcttccaatattccaatttaaggcccggtcttgtgcg

SEQ ID NO: 633494 - DNA, 264 bp, Homo sapiens
gggttgaccgtggttcagccccaaggatgtgctggttcgctggctgcggggtcacaggatctgcccgcgagaagtacctgacttggggcatccggcgaggagcccaggcagagctaccagcaccttcggtgtgaccagcatactgcgcgtggtagccgaggactggaagaagggggacaccttctcctgcatggtgggccacgaggccctgcctgctgggctttcacacagaagacttatcgaccgcttggcgggtaaacccag

SEQ ID NO: 633495 - DNA, 149 bp, Homo sapiens
gcggccgcctactactactactgctcgaattcaagcttctaacgatgtacggggacatgacccaggagtctgaggctgcagtgagctatgattgcaacagtgcattccagccagggtgatagactaaaactacatctctttaaaaaaaa

SEQ ID NO: 633496 - DNA, 367 bp, Homo sapiens
agctctcacagaaaatctgacctcaaccacagctaggtcctgactgtaaaaaacacgatactaagtaaactctcaaaacatagtaagtcaagccatactcaacctagtcatactccaagaactatcaattaaacgatgtgcaccattaagccaaacttttgtaaaaattatactatctagtgcaagccaagatgctgaaattggtaccttcacgcactgctggtggcatcatacactggtacaatcctataggaaagcaatttagcaatatccattgagagccaaaacaataattgtgcccttgaacccagaaatcctgctcctaggaattcaccctaaggaaaaaatccacaataagcacaaggac

SEQ ID NO: 633497 - DNA, 311 bp, Homo sapiens
tttctctgcttcactttctgacaaaggctatgtcattcggttgtaccatgaggccacaacagacacttacaaagccatcacttacagtgttgtcctttcagaaaaaagtacagtgtttcaccagaacgatgtgaaggttccgaacagcacacatgtgtttaccacattttacgctaaaacaaaatcactgttagttaatccagcgctctttccaaaccctaaagactatgaccatctaatgggctatgacaaaccattcacttttgatatggaagaagacagtgaaaagaaacagcttaaagaagacaaat

SEQ ID NO: 633498 - DNA, 430 bp, Homo sapiens
gtaggtgtttcagtgtgggggttgatgtatggcttgggctagtgctattatatgttgcagtgtgcttttactgcaattctgagcaggcgctgtatacttagccctcctaggtatatgccgagataaggcaagtagagcttctgggaacggctctgtgggacatcatggcgtggaaggtaccagcaggggaggtcaagtgatgtgttctacagggatggggatatggagagcgttggcccgaagttcatcgctggggagatgagcctccaagcggctggaatgttggtcttttgtgaatggggtttgccgatgaccaggacttacaggcaattctttctctggtgtgttctcacattgggcatcatgcacgtgagtgctctgcccctgagatggtgacaagggttgtaccatatcccctgaagattgttgg

SEQ ID NO: 633499 - DNA, 790 bp, Homo sapiens
tatgaggaagttctgctgtgtctgcagctgatctggaagcaggatttgggcatccatcaagtagaacgtttactcaactttaatttttcagtcagaattgtgtaacctgaatcaattgaggtgtctatggtgttggctatggtttctgctgttaatcattgatcttcttcagttagggcatgaagaagatgattttttttcctcacaaattgatgtgaacagtctgtcactgtgggcttcatctttaatatcgtctcatcccttcttaaactgagttatccatttgtaaactgctgatttgtttggggcattgatctcataaacttgttgtaaagtatcaatgatttcaccattcttccacccacacttcaccataaatgtgatacttgttcttgcttcagtttaattggggctcttttcaaagtgatgtcttaaccttgttaagtggcttaaactagatcctattcagagatgttataacaagtgagtatgagttagtatcagtggcaaacattttgaactacatgcatagatattttaatatacaaattttccatgaacttttgagaaccctaatttttggaattaggtcacggtacggagaaatagagctcggcccgaacctggaccttagataagtagacacttcccgcgaacccctacggccgttccagccgaacggtcaacggaaccccatttcaacacggttggatcagctcacaggaacacatcacaagggaacaatcaacgtccataagcacttagatctgcgcgcgcgacgagacctcct

SEQ ID NO: 633500 - DNA, 119 bp, Homo sapiens
tgtgatgtgaggagcgctctgctggtggaccccgtctggaggtgaggagcgtctctggctggccgcccgtctgagaagcgaggagcccctccgcccggcagccaccccgtcgggtggag

SEQ ID NO: 633501 - DNA, 122 bp, Homo sapiens
gatacgacttttttttttttgaactgatgaattcacatagatcacaaagatttgcatgggcttgaacaagctgtggggcctcaataaaattggaggcctcctttcccttctgtcgtcttctc

SEQ ID NO: 633502 - DNA, 111 bp, Homo sapiens
atgacaaagtccaccatttgtcaggttgacagttgggcagaagctctggttctcttctacgtggtaatgcttcataccacactttcccaaagtagcctgaatggtccgtcg

SEQ ID NO: 633503 - DNA, 120 bp, Homo sapiens
aagccctggcatccccggagggggccgtgaattactcctaggtcggctcttttagggtggcccttgtgttctgtcaaaacacttggttccattttccggggttaaaatccttggtttcca

SEQ ID NO: 633504 - DNA, 240 bp, Homo sapiens
gtggcttcctcactagagagggacgacatcctgttgccccgactgtgggaaagacatctgaattcaacacagagaaggttgctgcttgtgatctcacacacaggtttttatggtttcttctacccagggaatcttgcctcttggttcttccgcacaattaggcttttctctaggtctttcaggtaatctctacgcgtttcttaaacccctagggtgctttgaatgtaacgccccgggatg

SEQ ID NO: 633505 - DNA, 179 bp, Homo sapiens
gggtctgcaaagatgaaaatatttaccatttggtcctttaagaaaaagtttaggctgggcgcggtggctcaagcctgtaatcccagcactttgggaggccgaggtgggtggatcacaaggtcaggagatcaagaccatcctggctaacacagtgaaaccccgtctctactaaaaataca

SEQ ID NO: 633506 - DNA, 120 bp, Homo sapiens
cacacacctgagtccacacatcacctgagtcacaccactgagtccacaccacctgagtcccggccttcctggagtccctgaaagaggaagaagtagggtggtgtagactcaggtggtgtg

SEQ ID NO: 633507 - DNA, 949 bp, Homo sapiens
tggctgccagctgcatttatggtagcttgtacaaaccactcacagccagcgcctggtcaggggcccaggacacgtggccaggggggccaaggagccacatttgcggggcacatgccccatacccgtggccacccggcagcagtgcccagcatccctcaagtgacagagcagccaggaccccaggcggtgactgtcccagagggacctacaggggcagtggggccaaagcgtgggctccgtgccaccttgtttgggccgtgcagaattgtgattctcgtgaatttaatttcgtgccaacaactttagaaaaatcgaggacattctcacattacaaatcgtgtattctcgtggctttctccagaatttcgtgtcattgaggcctgaatttcccacagccaggaagcaatatagtctaccaccgtgaattagtggcaggcggcccacgtgtcagaagcggggaacccggtgctctccgccccaatccccacgcgagactctctgaggtctcaaggaaaagtgggtcttgttacaccgactagattggggcagaacttatctcgtcatcacgatgtcttggtgctccagcaacagtgggaaaatgtcaaagtgaagcaggtctcccaatctcaaggggcctgtttcatccatttaccccaacatacgttggccccaggggcactcgcgagttggaaatctcgggaacaagcccagggaggggggcggcaaggaatcactcccagaagagacccctttcacaatagctgaatgaggagacaacttgagggacagcagcacaggcttcccaaggcttgagccattgggtctctgagaaattcccaaatcttcgaaaccccaaagcgctaatagggcaggcacagggctctaatagagctgaggctgcgggaaagacatacaacacccgaggagtttgaggactaggatatcccgt

SEQ ID NO: 633508 - DNA, 615 bp, Homo sapiens
  misc_feature (545)..(545): n is a, c, g, or t
  misc_feature (555)..(555): n is a, c, g, or t
  misc_feature (557)..(557): n is a, c, g, or t
  misc_feature (594)..(594): n is a, c, g, or t
  misc_feature (597)..(597): n is a, c, g, or t
tcccagacacagtctcactctgtctcccatgctggagtgcagtggtgcagtcttagctcactgcagcctcctccttccaggttcaagcaattctgcctcagcctcccaagtagctgggatgacaggtgcatgccaccatgcctggctaatttttgtattttttatttttagtagagaccgagttttcactgtgttggccaggctggtctcgaactcctgacctcaggtgagctgcctgccttggtctcccaggagcttcatttcctttcctgtgagaatctggatgactccaatgctttggcagtagtagcagaggcattccgaccttttgaatagctttctttgaaactaaaataaattgttccttagatctatttcttatccagagaaatccaaagcctgccctgccagccctgaatcttacaaccgaaaatgagcacataacatgtttctttgtttgcttattgtttttaacaggctccaagcctatgccgtcctgaagagcattatccaggccggatgcacagtggcgataaatttatcanaaagattatnanagtgtgtccaagttttgcctgtctataaaagatgatnggnatttaccaaagtgacatt

SEQ ID NO: 633509 - DNA, 183 bp, Homo sapiens
ccccccccgccccaggggccctttgcccccagtttgtttttttaaacccccccccccccccccggtccaatttttggcctcccccccataaatttaaattcccctggccccccccctttttttcttgggttgggttggggcccctttttttttcccgggggcatttaaaaccccccccgggga

SEQ ID NO: 633510 - DNA, 177 bp, Homo sapiens
taagaagctataaggctctgaggaacatacttagaaaaacatactttaccaagtcaggtaagaaaagacgaggaaaaagatgcattcaacatatgcagtctgtgctggcttagattaaattagatcaggtgtggtggctcaggcctgtaatcccagcacttggggaagccgaggcag

SEQ ID NO: 633511 - DNA, 112 bp, Homo sapiens
cttcaaatggtccacttcttcactggaaatgttgcgggcggctgtggcaggtctttgctgtgctctaatactgggtctctgggtggtcctcgaagtccaacctgacagcccg

SEQ ID NO: 633512 - DNA, 114 bp, Homo sapiens
gatttcttccttaaactgctggacggagctattctcgggcacggcgaatccctcctttctcttcggggtcttcacggtgactttcatgattttggctccgcggagcagcggtcc

SEQ ID NO: 633513 - DNA, 150 bp, Homo sapiens
accccaggctctggtaagggtctacgggggggaggtggagggtcgggcctgagagcaggagtactcccttagagaacccaatcccatctagccacctctggactagtaccctatctttcaggcctgagagagagcaggccgtgcaacgag

SEQ ID NO: 633514 - DNA, 974 bp, Homo sapiens
  misc_feature (43)..(43): n is a, c, g, or t
  misc_feature (91)..(92): n is a, c, g, or t
  misc_feature (111)..(112): n is a, c, g, or t
  misc_feature (114)..(114): n is a, c, g, or t
  misc_feature (126)..(126): n is a, c, g, or t
  misc_feature (148)..(148): n is a, c, g, or t
  misc_feature (158)..(158): n is a, c, g, or t
  misc_feature (212)..(212): n is a, c, g, or t
  misc_feature (230)..(230): n is a, c, g, or t
  misc_feature (239)..(239): n is a, c, g, or t
  misc_feature (242)..(242): n is a, c, g, or t
  misc_feature (248)..(248): n is a, c, g, or t
  misc_feature (259)..(259): n is a, c, g, or t
  misc_feature (261)..(261): n is a, c, g, or t
  misc_feature (281)..(281): n is a, c, g, or t
  misc_feature (288)..(288): n is a, c, g, or t
  misc_feature (291)..(291): n is a, c, g, or t
  misc_feature (300)..(300): n is a, c, g, or t
  misc_feature (302)..(302): n is a, c, g, or t
  misc_feature (322)..(322): n is a, c, g, or t
tgagcggggtgggagggatggagaggggaggggggagcggagngagcggagacagccgcggcgctgcagagcggctggggcggcggcgcgnntcccggtgctccccccggnngngcgccccgagtnggtgagggcccggctctgcggnccccggagcnatgggctgcatcggctcccggactgtggggaatgaggtgattgcagtggattgnaagggcctgaaggatgtngatcaaatnaanatgganagcaccagctnantgcacgggagcagctccatnggccatngantgagcaaantngaactgatttctcctggganggcatcaacctctaccatggaggacagcatatccattctttccgaagcttaatgcgaaactctaacgcctatggcattggggccctgggcaatgtcatcaattctcagggatctcactggagcatgaaggaccatgtgacaaatgccacagccatgcggcaaggcctggtaggcccaacatgattgagtggcaagggcatgcgggaaagacaccagctgtacagccacgaagcacaggcatgagtccgtgcgcagggatacggatgcgtactccgacctcagcgaatggcgagacaaggaggcacgtatctaacaggcgtcatggcaccagttcgctactctcttgagggccacagctcattgacctgggctatccatggactggtgaggaccatggagggtgaaggtcggacctagtaagcccctcgggcgagcaactacagtgacacacgtaccagtgcaccatgattggacaggtccagagatgcgccatgaggtcagaggcagccccaggtcgcatgcgcaggcccgcagcttcatatagatgtaccccgggtgactggaacgtggcaagggggccagacaggaatcgccttggatagagcagagagccagatccccacgtagacaccaccgcacggagcgaatcata

SEQ ID NO: 633515 - DNA, 408 bp, Homo sapiens
gaccctgaatactcagggctccccctatttctttttgctggataaaggattcttttcaaagctctcagcagatctgtatagttgcttacctgatataaatgcatatcaatgcctttaaagtatgaatctatgccaaagatcattttttgtcttactaaagatttcttagaggaactaagaagaatcatgtttattctccaagttccttcagttctggagacacatgtccaccagatgtgctttctagtgtcagtgcttacagtacaaggaggcaaaaggaaacagtccctgaatgacgtgttagagatgccaccactaaaaactatgtttataagctaggacttatatgtaaatgtttctgcctcttcttttgttctgtttaaaacaataaagtacatttatatgaaa

SEQ ID NO: 633516 - DNA, 422 bp, Homo sapiens
  misc_feature (43)..(43): n is a, c, g, or t
  misc_feature (91)..(92): n is a, c, g, or t
  misc_feature (111)..(112): n is a, c, g, or t
  misc_feature (114)..(114): n is a, c, g, or t
  misc_feature (126)..(126): n is a, c, g, or t
  misc_feature (148)..(148): n is a, c, g, or t
  misc_feature (158)..(158): n is a, c, g, or t
  misc_feature (212)..(212): n is a, c, g, or t
  misc_feature (230)..(230): n is a, c, g, or t
  misc_feature (239)..(239): n is a, c, g, or t
  misc_feature (242)..(242): n is a, c, g, or t
  misc_feature (248)..(248): n is a, c, g, or t
  misc_feature (259)..(259): n is a, c, g, or t
  misc_feature (261)..(261): n is a, c, g, or t
  misc_feature (281)..(281): n is a, c, g, or t
  misc_feature (288)..(288): n is a, c, g, or t
  misc_feature (291)..(291): n is a, c, g, or t
  misc_feature (300)..(300): n is a, c, g, or t
  misc_feature (302)..(302): n is a, c, g, or t
  misc_feature (322)..(322): n is a, c, g, or t
  misc_feature (346)..(346): n is a, c, g, or t
  misc_feature (356)..(356): n is a, c, g, or t
  misc_feature (381)..(381): n is a, c, g, or t
  misc_feature (384)..(384): n is a, c, g, or t
  misc_feature (386)..(387): n is a, c, g, or t
  misc_feature (389)..(389): n is a, c, g, or t
  misc_feature (392)..(394): n is a, c, g, or t
  misc_feature (396)..(396): n is a, c, g, or t
  misc_feature (400)..(402): n is a, c, g, or t
  misc_feature (417)..(417): n is a, c, g, or t
  misc_feature (419)..(422): n is a, c, g, or t
tgagcggggtgggagggatggagaggggaggggggagcggagngagcggagacagccgcggcgctgcagagcggctggggcggcggcgcgnntcccggtgctccccccggnngngcgccccgagtnggtgagggcccggctctgcggnccccggagcnatgggctgcatcggctcccggactgtggggaatgaggtgattgcagtggattgnaagggcctgaaggatgtngatcaaatnaanatgganagcaccagctnantgcacgggagcagctccatnggccatngantgagcaaantngaactgatttctcctggganggcatcaacgtgagttcagctgcncccagaattncccattctcccgaactcctcctccncancnncnccnnngnaaannnaaaaaagaaagcgcnannnn

SEQ ID NO: 633517 - DNA, 207 bp, Homo sapiens
  misc_feature (81)..(81): n is a, c, g, or t
  misc_feature (99)..(99): n is a, c, g, or t
  misc_feature (116)..(116): n is a, c, g, or t
  misc_feature (125)..(125): n is a, c, g, or t
  misc_feature (162)..(162): n is a, c, g, or t
gggctgtgtgggtaatccgcaaccagtggggagagggtgagtacgacccgaggacagtggcaggtgaagagtacttcggantatggactctgaactccnttggagatgttggcagncagccacgnacactaaataccacagtgtcatcctcagataaagatncctgcggtaaagcatcctggacgtggtgtgggctgggtcacaatc

SEQ ID NO: 633518 - DNA, 488 bp, Homo sapiens
gacaaattttgtacatgaaaccccagatagactataaataattctaacccaacaagtaggtagctgtgtatgacactgctttaaatcattcaaatgcctttgtttttggactgtgcaaaggttggaagtggatttgcatttctaaaatggtgacttttattctgcaagagttcttagtaacttcttgagtgtggtagactttggaacatgtacattttttgcttgtaatgttatcctgtggtagggttttgccctattttattttgagtctaagttaaatgttttctgaagagatacatgcactgaactgtttccactacaaatcaagatgtggttaaaaaatgaaaggaccaggaccagtgagatctaatactactgtcagtttaatgtccactgtgttttatacagtatctttttttttggtggtcaatttgggaatttttacttaaaccttgcaaaaaataaagtattgtgcaaagaaaaaaaaa

SEQ ID NO: 633519 - DNA, 535 bp, Homo sapiens
  misc_feature (45)..(45): n is a, c, g, or t
  misc_feature (178)..(178): n is a, c, g, or t
  misc_feature (209)..(209): n is a, c, g, or t
  misc_feature (263)..(263): n is a, c, g, or t
  misc_feature (284)..(284): n is a, c, g, or t
  misc_feature (289)..(289): n is a, c, g, or t
  misc_feature (295)..(295): n is a, c, g, or t
aatgaacaatggttaaaagcaattgttgcctgggaaaatcactantatcagtgttctgttatcacatagcagaaaacaagcccttcagttagcgaaactgggttgagggagagcaaggcaagcagcaagagaaggtgctagggaaagagaaccggagaatggtgcaggcactgcctgngagcttgtcagaaatgcagagtcttgggctnctccccagacccactgaatcagggcatgtattttaacaagaccctcaggtgatncttgcacaggctaaaacttgngaagnactgcncaaaggcaggaggcagtaattccaaggaataaaccctgccagagtgtcatgcttggagccctgacagctacctgggagcagtctcagctgaggtgagagggacgtaaggcatgtggaacaggcaagcataggtgccaaaagggtaatagtggtaattgtggttacagtcagtttaaacgaaacattgacagtgtgacaggcactactgtactactttccatgcatggtttcatggtggtg

SEQ ID NO: 633520 - DNA, 372 bp, Homo sapiens
ttctcaagacgcaaagagctgatatgatcacagaatatctagtgtgacggcgctgctgcctaatgatcctgagtacaacacggtggcaagcaggtgtacagtcagacctgctcacacatcagaatagagaagatagcgaggatccagaatccagatctctggaatagctaccaggcaaaaaaacaaactatggatgccaagaatggccagacactgcatgcagaagcaactcttccatgggacagatgccggatccgtgccacacgtcactcgaactggctttacccgcagctatgccggaaagacatgctgtggcatatggaaagggcacctatttagctgtcaatgccaattatactgccaatgatacgt

SEQ ID NO: 633521 - DNA, 222 bp, Homo sapiens
  misc_feature (30)..(30): n is a, c, g, or t
  misc_feature (47)..(47): n is a, c, g, or t
  misc_feature (120)..(120): n is a, c, g, or t
  misc_feature (133)..(134): n is a, c, g, or t
  misc_feature (167)..(167): n is a, c, g, or t
tatgtattggatgaatgacttattaatggnttataccgtttctgagnaccatcattttttttttcaggacacggaggatgtcttggacatgtgagatgtaacgtgacagggttttgcatnttaaactgcaggnnatttacatgtccttattttccacctcccccagngaaaatgctttctaaatcattttcacaggttatatacttcggatctgtttaggga

SEQ ID NO: 633522 - DNA, 257 bp, Homo sapiens
tttgaaaaacccatacccacaggcttttgcatgaactgtacacctccacacaacagatgttaaaagtaatgtaagttaatagtggtctatttcacataaggtaaatataacaaatgtctgtaatctaaagtattcttagaaaatattagccctttttggtcagtggtaatagtgtatccacagtgtctggtcttgcttttctaagggtaactgatgtacagttgctacgttgaggatgtaaatttgtgcattgcaga

SEQ ID NO: 633523 - DNA, 204 bp, Homo sapiens
tatagacatgtagtctatataccctatatataagtattctctataaaacaactaggttataaaaatacagtaggaacaagggcaggttgaatcaatggtgaatcaatctgaaattagagcacacctgcctgccatcgctgttccttcaaatgagtgctgcacatcatgggctctgtctgtgagagacactcccggtgttggtgt

SEQ ID NO: 633524 - DNA, 237 bp, Homo sapiens
tatgttgagccgaagatccggcaggcacgtggtgaagggagactcgaagatactctgaggcttgtaggagggtagaatagatacccagtaaaagtgtagatagcagttgatatgacattattaggttacgtgatgtatctacttagagtatggtgagactcaagtgattgatactcctgatgcgagtgatacggatgtgctaagggagtgggacttctacggcaacgtcgggtcata

SEQ ID NO: 633525 - DNA, 304 bp, Homo sapiens
tgactcgtgcagccattcgaccgtgacgctatagtgttaagcggctgttgccctcggcggggatctcgatctcgtaggagccctggaggagcagggccttctggaggtagccagactgctggtccatgttggccacgctgttcttgcagtggtatgtgatgttctgggaggcctcggtggacatcaggcgcaggcaggtcagctggatggccacatcggcagggtcggagccttggccgccatactcgaactggaatccatcggtcatgctctcgccgaaccagacattcctcttgccgccgtt

SEQ ID NO: 633526 - DNA, 269 bp, Homo sapiens
ggtccctgcttgtttgtgatgtgtgggatcttagtcaaagtgtgtggagtaggcaggtatcagaaggtgatgtcatcctcgtacagtgacagcagcagcagtgactggtccagcctgcccagcagtgcccaccgttgtgcagcagtgaagaggatgccagtgcctgcgggtccctgtactttcaacatctgccgggagcatgtcgcagagtgctacgtagaggaacaggccggtggccactgccagaaaccagaagcccctatagaggc

SEQ ID NO: 633527 - DNA, 771 bp, Homo sapiens
  misc_feature (10)..(10): n is a, c, g, or t
  misc_feature (12)..(12): n is a, c, g, or t
  misc_feature (31)..(31): n is a, c, g, or t
  misc_feature (36)..(36): n is a, c, g, or t
  misc_feature (39)..(39): n is a, c, g, or t
  misc_feature (60)..(60): n is a, c, g, or t
  misc_feature (66)..(66): n is a, c, g, or t
  misc_feature (70)..(70): n is a, c, g, or t
  misc_feature (78)..(78): n is a, c, g, or t
  misc_feature (88)..(88): n is a, c, g, or t
  misc_feature (118)..(118): n is a, c, g, or t
  misc_feature (130)..(130): n is a, c, g, or t
  misc_feature (145)..(145): n is a, c, g, or t
  misc_feature (177)..(177): n is a, c, g, or t
  misc_feature (179)..(179): n is a, c, g, or t
  misc_feature (191)..(191): n is a, c, g, or t
  misc_feature (207)..(207): n is a, c, g, or t
  misc_feature (227)..(227): n is a, c, g, or t
  misc_feature (244)..(244): n is a, c, g, or t
  misc_feature (284)..(284): n is a, c, g, or t
  misc_feature (299)..(299): n is a, c, g, or t
  misc_feature (329)..(329): n is a, c, g, or t
  misc_feature (344)..(344): n is a, c, g, or t
  misc_feature (350)..(350): n is a, c, g, or t
  misc_feature (361)..(361): n is a, c, g, or t
  misc_feature (363)..(363): n is a, c, g, or t
  misc_feature (377)..(377): n is a, c, g, or t
  misc_feature (395)..(395): n is a, c, g, or t
  misc_feature (590)..(590): n is a, c, g, or t
ccctgggcancncgggctcaattttttttanccaantanctggtcccactggagcggganaaaganaaanctcgaaanatagaggatntctctctcagactggcaccttgcggttaancttgcttaccanccacttactccaaantctattcttcggttgccaaatacaaaacttgnanaatactcgctanggggctatattatttnatttcttaagcagcttattnctggcaaactccaggantcttttccagaccctgagctgatttatcttatctactttngtcggaaactaaaanatgaccagacactttacttctatggcattnaacctgggtccactntccatnttctgcgaaantnctggcctgaacctnatcagaaaccggaacctntggacaaagtggctgccatgagagatattccgggtgttgcacactgccctgcacagcagctcctcttacagggaggcggtctttaagatgctcagcaataaggagtctctggatcagatcattgtggccaccccaggcctcagcagttaccctattgctcttggggttctccaggacaaggacctcttctctgtnttcgctgatcccaatatgcttgatacgttggtgcctgctcacccagccctcgtcaatgccattgtcctggttctgcactccgtagcaggcagtgccccaatgcctgggactgactcctcttcccggagcatgccctccagctcataccgggatatgccaggtggcttcctgtttgaagggc

SEQ ID NO: 633528 - DNA, 464 bp, Homo sapiens
ggcaactgcttatgatggggagaaggtgaagcacaatacgttccggggcagaggccgtgctgattgagaatggggcttccatctgaggcacaaccacccgggacttcacccaactcaacgagctgcaatgccgctttcccaggcccctggagggccttggcttcccttgcaaccaatttggacatcacgagaactgtcacaatgaggagatcctgaacagtctcaagtttgtccgtcctgggggtggataccagaccaccttcacccttgtccaaaaatgtgaggtgaatggccaaaacgagcatcctgtcttcgcctacctgaaggacaagctcccctacccttatgatgacccattttccctcatgaccgatcccaagctcatcatttggagccctgtgcgccgctcagatgtggcctggaactttgagaagttcctcatagggccggagggagagcccttc

SEQ ID NO: 633529 - DNA, 486 bp, Homo sapiens
ctggggaaaaaaaggtgcagatgagatgacagtcaatcctagccacaaatcagtagtcattatatccagtctcttagccatgaatatgacatagaacttaataaatgaatagattgtcatattttctaggggtgaggtgtattagtctgttctcacgcttactataaagagctgccaggagactgggtaattgacttaaaaaaaaggttacactgactcatagttctgcatggctggggaggcctcaggaaacttataagtcatggtggcaaggggaagcagcacttgtcttcttcacatggcagcaggaaggaaaagtgctgatcaaagggggaaaagacccttataaaaccatcagatcgtcatgagattgcagtcactatcacaagaacggcatgggagtaactggcttcatgattcaattacctcccagcatgtccctcccatgacagtagggataatgagaactacaattcaagatgagat

SEQ ID NO: 633530 - DNA, 257 bp, Homo sapiens
tactactactaaattcgcggccgcgtcgacgtatttttagtagaggcggggtttcaccatgttggccaggctggtctcgaactcctgacctcaagtgatctgcccgccccttggcctcccaaagtgatgggattactggtgtgagccactgtgcctggcccacttggggatcttaaaaggaagaaaaacccagaggtgtctgtctgcttcagacacattaattagactctttagagggacatttgaggcttgtgttt

SEQ ID NO: 633531 - DNA, 155 bp, Homo sapiens
gagagcttccctaggatgaacccatccaagccggttccaccttcacagcctttcctgggaattcaaggctgcatgattacatcgtgcgggagtgacaggccgggatcaaggtgacagaggaggtgtgaggctgtaccattgtgagacacaccatg

SEQ ID NO: 633532 - DNA, 229 bp, Homo sapiens
catgtgggcttatctctacacaagaacatctggttgagcgggatgcaccccacagggatgagcctggtttgaagatacttacagcctcaagaacaccatacacatgatagtaccacaaatattagctagttaattaagaaatcaaagggatgtgggggctctaattgtgtttacccgctgaataatggaatatactctggattctaatgtgtacatcagccaccctgaa

SEQ ID NO: 633533 - DNA, 323 bp, Homo sapiens
acaggatcctaagatctgagatcatataagtcagtggagagtgagccagagaaaacctggcagcagagccgttactctaggaaagttccagtgctatggaacctgttaggcatcatcggtcaagtgatgatgtgactcacagaggtgttgggtggagcgaaacaggagttgaacccgttttctaatacttcttggcagggtaacttattacttcccaggacagggaccccaaaattaaggtcttggtaaaatctctttaaagctccccaaaaggcatgaggaaattaggacattggagaaatgaggcaagtaacttagggaca

SEQ ID NO: 633534 - DNA, 381 bp, Homo sapiens
  misc_feature (35)..(35): n is a, c, g, or t
gtactgttggcttacctgtttttttttaacggggngtgggtttttgatccccaggactgctactggggcagcatggctggactcaggaaaagcataagaaggaaccggtcagggaggagttcagggaactttcaaaaccataaacaccattatctaacttcatgaaccagaatgaatcagatctttttgtttggccaaaatgtaatacattccagtctacactttgtttttgtattgttgctcctgaacaacctgtttcaaattggttttaaggcgaccagttttcgttgtattgttgttcaaataaatggggatatagggaaaagagaacaacattggaatttgaataataaaaagggtaattttcccaaaaaaaaaaaa

SEQ ID NO: 633535 - DNA, 1036 bp, Homo sapiens
  misc_feature (250)..(250): n is a, c, g, or t
  misc_feature (1036)..(1036): n is a, c, g, or t
agcggagtcgacgtaggggtttggcgaacgcatccgtatgcaggcctgggcactcatgcgacttggaggtgcgactgcttctcggcgcgcccgcgcagggagatacccaggtgtagctgcccaaggtcgcacgatctacggcactgacgaatcgcgaccagtaatgggatctgtgctgtgccaggcaacctgtcattcattcaggcgtcactatgaccctgtatgtcatgtggcggccgacgatccaagncaggactagctcgactctgcgttcctgcggacgtttgccactttgtcgttgtcttcgtcgtccttgtacctccgccgtgggaccccactaggctctcctaggcggcttggggtagaacggcagctcccgttggagccacgtaaactcgttgtgggctttcgtcggggcgcagtctgatcatacatacgacgttcctattaccactcctacgcaattttacctgaaactccgtatcataagctccatttggttcctcagccaaagggccatgggggactacgcacaaatcccccgaaccagatattggacacaatcgctccgtttttgcgaaaaggggccacctaaagccttgtgggggtaatggcttgtagtatgcatattcaataccccttctctacatacaaggtgcagtcaacaagttgctacgaagaagatcaccaacggggggcatcgtgggcactttgggcgattgattgcattagctgattcgaagatcgagggcaaacttagtttataagaacggggaaaccttgattagcgaaatgagttctgtccttatttcaccatttgaagtgtctcgaggggaaccacatgtcgtgtgtgagaattgtcacgtccttgacttgacaatagtgtggcttaattgtgcaccttgccacttgtctgggggacccgtcacctcgaaactcactagactgattttgaggagcgaacgttcattcttttgccatgaagtggcgttcgccgtgaagaatacaatttagatttgtgcatttcatattgagn

SEQ ID NO: 633536 - DNA, 382 bp, Homo sapiens
ggtctgccacggaaaacaggctctcaggaggaaaaaaaagacagagaaataattccttaattaaatgaggatatacaagattctaattaaatgattatattaaacatgaaattgatgtaacagaataaaggttaaactagaataactttgtatccgtaagacataaccgcggcagggcacctctactcatccagtgcttaagacagaagttagagaatctttttcgtttgctctcttttctgcttctcgcatacaatccaccaaaagtgccagccaatgcttttgtttccacattgcacaggaggtcttcgaggaatgaccagggagactggctattacatatgaagtctactacacaatgaagcgtatgacataacctcgg

SEQ ID NO: 633537 - DNA, 868 bp, Homo sapiens
ggacacatcctgcccactccgacgcccatccagccctcctccagcctctccttcggccacccccacccgtccagcatggtgaccgccatgggctagggaacagatggacgtcgaggaccgggcactcccgggatgggtggaccaaacccttagcagcccagcatttcccgaaggccgacaccactcctgccagcccggctcggcccagcaccccctctcctggagggcgcccagcagcctgccagcagttactgtgaatgttccccaccgctgagaggctgcctccgcacctgaccgctgcccaggtggggtttcctgcatggacagttgttgggagaacaacaaggacaactttatgtagagacaaggaggggacgggacagacgaaggcaaccactttttagacacggacaccaggcttacggcaaaaataatttactttggctcttgatttctaacaaggacttggagacttggtggtctgagctgtcccaagtcctccgggttcttacctcgcgattggacgggatccactagcaccgggcctctgaggagcagatacgtgagggacctcagcctgcacccatctacatcactctgggcatcgcctctactgacatagccgaactccaggctgggcctcagcccaacagccacagtggacacggaccagggagggtgagctggtgccctgcatagacggggcaccaggcccctagacggggcacgacgccaaaccaacggcgcgcccgtgcagaagaatcccccaggccaacggcctggagacacaccggcaaggcacacaaacaatcaaccttgacacggggacacacgtgtcccccgcatcggcgccatacggcactcgacg

SEQ ID NO: 633538 - DNA, 917 bp, Homo sapiens
gtggtcggtaggggagcttatccttttctttccttggttggagtccctgtgcagtgtcggttttcggtagcatgtaggagttcatgttgcccagagtagtccacatcttcactcttctgaagacacatgaatcaggaccgatgtatctgtgacaagcatgccagaagtggcaggggccatcagggttaaccatcttcacacctaccatcgtcccatggggatccaagaccttgagataaagacagacgcgcctgccctagatccctctgctgcatcctatcccttccaatgttggtccagtgcccaatcataatcctctgggcatcagacatcagcgaggtctgtgtgcctcagccctgttaaggggcaggtgtctcttgtagccctcttgcctgcacttgggagcgaaggcgaactaccagtgagacgcaaggtgccatccagtcccgtgccccagactggaccccctggggctcagatagaggtgctgagcccctgtgtcaaagttgttacctgtttttgttttgtgccatctgtagctctttctgtagttgtttgtgtcccctttcctggagcgagtggatttagctgaaagacagtgagctgtttacaaaggccctgtgctcgggaatcggccgcgacgtactgcgctctaggactgatgcctccatgacggagggctgacgggtgtgtttttcgtcacaaaacgcgcctggtgacgaggtgatccctgagatgatctgccgcccttcttgattggtgccccgagagtccgctccctgttgtcgggaaggctccctggattttaccttaacacccagttgctcccttccccttttttcttgccggagctagattcggggccgttgtcctgggggggacacttgcccctgcttgcgggaaagcccccgagccct

SEQ ID NO: 633539 - DNA, 1010 bp, Homo sapiens
gcacaatgcaagttatctccagtgacaagagtgccttctgaagcaaccatcgcatcttcatctagattgacactctactaggctgactactgtaggtaatacaccactaatcttcaatccacctcacagagcaactatcaaacgcttaaatcctctttacatcatagactttcagctacttgaagatagccatcagccgctacgatgactcttttctcccggatctccctaatactatgaacgcggcatgagataacggacaagctcggcctccattccctccgcatacagaacactggtcgacattcaggctacttgtgccactactggacagtggagtcttatacgaaggcctgacactggctcgccaaccagttccagaaccagaactgatcagaaggatctattctttgtgccttgtggccacatcagctagcctctgctgtgtgcacagtgtaacgatgtgtgctgggagtgtgaggcagcattatctcacagtgccttatccatgccataagaaaagcaggtgttacactactaaggaaacccaggagttaatttttaaaaccaccactcttccatttcagtcaggctttagactgatcatattagcaattgatggagaagtccacaagggcttgcttggtgctcgaaggccatatgcgtgcttcatggcaggctagttggagcgcgagactgagttcagctgttgcaatcctggtcatgacgatctggagccctgtcacatcttatgcattcctatccgtaacaaggaaggaattgtccctcctttcttttaccaccatacttttacgtgtccctttgcatgttaataaattgttgataaaaaaatctaatatatgagccccatacggtcccaacttgaggtaggatcgaattaacaaagaaccttcgctctagggtcagaacacacactagccctaatatacattggtgcaccacataaattatttaggacatatcacatcccgatatcagaagaactccca

SEQ ID NO: 633540 - DNA, 145 bp, Homo sapiens
tagtaaggtgagatgacatcagagctggggctggtcaccagacagactgaccatgtgattagaggttagaaggctttgagatcagactgaccctatggaggcgaggagactgagaggcatgagatttaactcactctaggccagc

SEQ ID NO: 633541 - DNA, 957 bp, Homo sapiens
  misc_feature (283)..(283): n is a, c, g, or t
atcgctcagacaccatggggaaggtgaatggtcgcgaagtccacggatttggtcgtattgggcgcctggatcaccagggctgcttttaatctctggtgaagtggatattgttgccatcaatgaccccttcattgtacctcaacgacactggttcttacatgttccccagctatgaatatccgacctcaatgtgcaaattccgatgggcgacgcagtcatcacggcgtgagaacgcgtgacagctagtccttcaatgggatagatcccatcacgcatctctccnagagcatgccgatggatcccgaccaacatatctaagcttgcgtgcgcgagttgcgtaggcagcatagaaggtacgcgctcgagttgtgacgtccaacgatcggcagtcgtatcaccaactcgagttggcaatgacatgtgctgcgggcatcagattttgcgattgtggagggcgcatgccctgagggcgtcgctcgattcgtcttgcgccctcgtcttggcgttgatagcccccgattgttccagtcgatcggtgtgtggaaaccgattgtcagaaggtaattgaacgatacgagtcacttgcataggtattcgatgctacgctaacttgtccctgccatgggcgacctacctcgaaattgttgcctataaggacagcccccgtgggcccgaaggttgcagtcccatgacgagagctttgggtattcgtgagaaaagtgacctcaattggaccagcaggttctcattgcccagtcgacttcggccaccgccaatggaatgaacttgttcgcgtggttggccccccctccccggtgaagactcgttgggcgtggatcggccggcgagggccttcgcccttgaagagatttcactccgcttggcctcctaagttggggcggcttgcccacagggcttgtttgtgttcattgggccttctccctctaccttgacctg

SEQ ID NO: 633542 - DNA, 395 bp, Homo sapiens
gaaatattttggttggttgaaggttcccagccccccgagaccccattttgatagaatcaaagtaggggacagggctgttttttaaaaagccccgacatgaaaatgacaatccctttggtttccttcctccggtgtttccacctaaagcagcctccggcccccgcctttgtttcatagtaaggattttattttgccgggggccctccctttaaaaacctaccctaaatgatttcatccggcccctcacttcttaacatattcctgggtttttgtaagggccaaatttctccttccactcgtccgcccggtaggttttcatgggagtcattttattccttacagcttccttgtaaccccagccctaaatccatgataaagctacttttgtcctccta

SEQ ID NO: 633543 - DNA, 910 bp, Homo sapiens
  misc_feature (1)..(1): n is a, c, g, or t
ncggtcgtgacgtgcgggagcgccagccgagcttcatgtctgcggcatgtcacacctctgggtgtgggcacgtgcgtggccctcactgtgggactttttcagcggtgcggtttcccggggcctctgagtccgacatgtgcgcataagcccacgtggccggggcctcccccagagtgccggctcccacagcacattgttcgggcccgggaacccatttttccggcgttggtttcccctattttccggggccccttgaatcttgggtgatggcgcggtctccaccttgggacccaatggtggcgcgccgacccccgcttcgcacagcaacaccatcccccccccttcccctctggggggccaatccccgaacgagggttcgaccacactgggcagccacttttcacgccctcagtggttgacttcccccgaggcgacttcccccttatctgcctcctcgggggtgttccccccatggtgcccccgttcttgtttggccgacagtggtgacgcccccagcgtgcgcgcggacaggatacaccccccttttttcactctcccacggggtcccccaccggttgcctgcgccctttctttgggacaccgtggtatccccctccccccttgtctgcatagcgccacaggcccccatttgtgggaaacactcatccccttttttggactgatcgcccccgtgtgggtagcttgcccccccccggtggcctctgtcgtccctgcgaccgcccccggctgtaagggtgcagccccagggcaagcggctcctggaggggagtctcgcgcgaggtcaatattgggagtggtgcttgtctcttttgacgtaagctcccacccccccctttcccctttttttctctccccaccaggaaaaaaaaggtaatttttttaacaaaaa

SEQ ID NO: 633544 - DNA, 254 bp, Homo sapiens
ttccccccctcccaagaagattcagctcaagaggaagaaggttaagctggccgtccctaaaatatttataaggtggatgagaatggccatattagtcgccttcgtcgagagtgcccttttgatgaatgtggtgctggggtgtttatggcaagtcactttgaccgacattattgtggcaaatgttgtctaacttactgtttcaacaaaccgaaaaacaagtaactgtataagttaataaaaaacataaactaaca

SEQ ID NO: 633545 - DNA, 140 bp, Homo sapiens
tgttgactggctactggcatctcgtggggaggcatgacttcatcgtacagagcagcctgtgttcacgttgagcttgaccccctgattggaatcggcgtgataaccattgagagggcttatccactcaggctgggctccaa

SEQ ID NO: 633546 - DNA, 777 bp, Homo sapiens
  misc_feature (10)..(10): n is a, c, g, or t
  misc_feature (64)..(64): n is a, c, g, or t
  misc_feature (87)..(88): n is a, c, g, or t
  misc_feature (106)..(107): n is a, c, g, or t
  misc_feature (112)..(112): n is a, c, g, or t
  misc_feature (123)..(123): n is a, c, g, or t
  misc_feature (178)..(178): n is a, c, g, or t
  misc_feature (185)..(185): n is a, c, g, or t
  misc_feature (189)..(189): n is a, c, g, or t
  misc_feature (203)..(203): n is a, c, g, or t
  misc_feature (219)..(219): n is a, c, g, or t
  misc_feature (234)..(234): n is a, c, g, or t
  misc_feature (241)..(241): n is a, c, g, or t
  misc_feature (245)..(245): n is a, c, g, or t
  misc_feature (252)..(253): n is a, c, g, or t
  misc_feature (270)..(270): n is a, c, g, or t
  misc_feature (274)..(275): n is a, c, g, or t
  misc_feature (277)..(277): n is a, c, g, or t
  misc_feature (294)..(294): n is a, c, g, or t
  misc_feature (324)..(324): n is a, c, g, or t
  misc_feature (336)..(336): n is a, c, g, or t
  misc_feature (380)..(380): n is a, c, g, or t
  misc_feature (386)..(386): n is a, c, g, or t
  misc_feature (394)..(395): n is a, c, g, or t
  misc_feature (401)..(401): n is a, c, g, or t
  misc_feature (404)..(404): n is a, c, g, or t
  misc_feature (406)..(406): n is a, c, g, or t
  misc_feature (416)..(416): n is a, c, g, or t
  misc_feature (425)..(425): n is a, c, g, or t
  misc_feature (436)..(436): n is a, c, g, or t
  misc_feature (443)..(443): n is a, c, g, or t
  misc_feature (458)..(458): n is a, c, g, or t
  misc_feature (469)..(469): n is a, c, g, or t
  misc_feature (477)..(477): n is a, c, g, or t
  misc_feature (485)..(485): n is a, c, g, or t
  misc_feature (502)..(502): n is a, c, g, or t
  misc_feature (513)..(513): n is a, c, g, or t
  misc_feature (525)..(525): n is a, c, g, or t
  misc_feature (542)..(542): n is a, c, g, or t
  misc_feature (547)..(547): n is a, c, g, or t
  misc_feature (561)..(561): n is a, c, g, or t
  misc_feature (570)..(570): n is a, c, g, or t
  misc_feature (575)..(575): n is a, c, g, or t
  misc_feature (601)..(601): n is a, c, g, or t
  misc_feature (623)..(623): n is a, c, g, or t
  misc_feature (657)..(657): n is a, c, g, or t
  misc_feature (696)..(696): n is a, c, g, or t
  misc_feature (707)..(707): n is a, c, g, or t
  misc_feature (763)..(763): n is a, c, g, or t
tcagcccttncctactcccagacctgccgggaaggctgtggggcccagattcatggcgggtctntggggtggggctgggtgtctganntgtgcgcctgtgctcctnnggtgngtagtagggcntgcgtcctgaggcatcccgagatatcgagggagatggctggcatgagagaagatnatgcagnggcnaagccaggagcccngacagggagatccccngtgtgtcagggatgnaggtggncgcngttgcannctcccggtgctcatcantggnntncagggcgttgttgtggngggtgttcacgtagggtgcgcctcccaggngcccctcatgcngaatggtcaggaagacgaggtagatgctctgtgcagaaagccgnaccacncgtctgcnngcaggnacncnaggttggggnactgcagcnggggcagggcncaggtgnaacgggtgggacagnggcggggagangggcgggnggcaaagncgcgcagcctggtagcngcgatctggtnggagcggtattngctgaagcgtgactcanggaantgttccagaaaaanaggagttcnaaaantccctggttaatgaaatactcggcanagtaaactacgaccaagggaanaatgtaccacagcagacccttgaacactgtccanctttcccgaagagaatggctggagctggagcctggcttngactccggggnctcggttcttatgaggggctgccgggctgcgctctctgcttcttcttcccctccanggtcctgggcctca

SEQ ID NO: 633547 - DNA, 585 bp, Homo sapiens
tgcatatagttcgcagtgtggtgagggagtgtttaaccggagagtgcagccgcatgttgcgccagattgaccgggctcgcgacgctggtttcctagattccggtgcgaggcaaaattccgcacggcagtgatgattgcggtcagtctggcgctgaccggggctgtgtgtggctcacgcctattacctcaaacagcaattctactccagtgtggtgttcctgattcaatattcagtgcccagtcatggcagtccttgttatccttgtctttccgtctatgtcttccttctgagcaaggtgatgggcaaggtgttctttgggcaactgagggcagcagagatggagcaccttctggaacgttcctggtacgccgtcacagagactagtctggccttcaccgtttttcgggatgacttcagcccccgctttgttgcactcttcactcttcttctcttcctcaaatgtttccactggcttgctgaggaccgtgtggactttatggaacgcaggcccaacatctcctggctctttcactgccgcattgtctctcttatgttcctcctgggcattctggacttcctcttcg

SEQ ID NO: 633548 - DNA, 1777 bp, Homo sapiens
tgtgcaaatgggtatgtattttttcatactcatctttactgttagcccttcatccctctacaaaatgtttaatgttttaaacagatttactccctacagtctgcttgggttagtagtttatatagatttaatttagcattttctcaagtactgggctttttttctggcagaatttttcaaatagccaaaacataattttccctctgaatattaaaaaacaccaacaaaaaagatttttgcacgacaaataatttttacacatgcaaaaaagtaattttcaaaagtaagcacttctgccagatgatgcttaataagtctgtcctaatggtatttatcttaatgcttactttcaggaacagtggataataccatattcagtccccctgacaaacccctgaaacaggtaatgtcattagtcctactttctggaggaaatgaaggcacagagaagataagtaacttgcctgaggttgcacagccaatatgcagctgagtgggagttgagtgctaggctgttggatttcagagcctgccctcttaaattgctacgtgacactgactctcatatgtatttatgttttatcaagcttaatataggataaattgtcgtgcttagggatgtagtctcaaagagtggaaattcagacattagtagaaattcaggtatcaggacagttggggaccaggaggccaaaagggggtatggtttagggagtcattcacagatgtgggattctggatatcaggacaactggagttgaggagaatgtcttcccagcatcccaaaccactcattcgcctaacaattagactggcccttgggagcactattcttcttcattggtctcattgccacaaccattctcacaaactcccattgccctcagctcagcccaaggctttgtattgttcaggctgtgctgtgggccctgctctaaaaatagcatatggcaaagaggcctgtcttgtagttgcaaaagtggtgtaggatttgaattccccatgatgagctaatttgggggcccactacaaagattttcagaaaacttttcaaaataatctcaactactgtgactacggaacacaatggcaaggggctgggagcaggaaataataccttcattatccaaactaatgtgcatacatttgaaatgtacaaaaaagtagatgtgttgcatgtgacaactcgacctggtaatgaggttttggggcatcacatcaatgctagttgtaaatactgtatttgccatgtactgcctttggattaattagcatccataacataaaataagttgtttcctgaaatgtaaacctagcaattagcgcttcatcaagtccctatcagatgttagaaaaaaaaattggttttgcagttgtttttttcacccaaaacaagtctgacagtacatattggtggcattcacagcaacataacggtaataaacttcagctactgttgggctctttgtaagcggtacagttactaaagcgagagtttggaagtatggttttcttttaggcaccctcaccagcatggtgagggtgcctacattctagttaaagtcagtaacacaaattaactcatgtaaatgtttttaatcagtgtttcttacagctgattattcagctcattaactctgatcataaatctggactttggaaaacttaacatttgttctatgttaccttttagaacaaaatggtggctgaggtagagaaatgacttgttctctgactggtgactttggtccctgcatcaaggagtggcagaggtctc

SEQ ID NO: 633549 - DNA, 257 bp, Homo sapiens
gagatcgtcatgctgctatcatatttcaccccaaaactgaatggaaacagaaaacctacagaggacatacatgtaactatgaaaatgaagaacagatgcatttaaaaggaactatcagtctagaaactgacttaagagaaaaagctgattgagttagacaccaagaagtacaaaacaaagtcaatattatagtaggagccacaacagtaactacaagtaaatatctaaaatgtattgagcactagcaagtgctggca

SEQ ID NO: 633550 - DNA, 471 bp, Homo sapiens
attactccctatgctcatataggtaagttgtgaaaattatctcccttgttgtacgtcgccctgatactactctgatgagttgtttcttttgctgttcagaaactctttaattttattagatcccattatgtcaatatctggcttatgttgccattgcttttggtgttttggacattaacgtccttgcccacgcctatgtcctgaatggtactgcctttgtgttcttctagggtttttatggttttaggtctaatgtttaaatctttaatccatcttgaattgatttttgtataaggtgtaaggaagggatccagtttcagctttctacatatggctagccagttttcccagcaccatttattaaatagggaatcctttccccattgcttgtttttctcaggtttgtcaaagatcagatagttgtagatatgcggcgttatttctgagggctctgttctgttccattgatct

SEQ ID NO: 633551 - DNA, 1113 bp, Homo sapiens
  misc_feature (1113)..(1113): n is a, c, g, or t
ggaagcttgacccttgtgtcttcgtcaataagaacagaggaatgagaagcattcttagggcaacatttgccctgcatcccccctcctctgcctgagtgtgtctagtaatgtcagctggtcatacagagcggaagcacaccaaatctttggggtcagagatcctaggttgcctctcccatccatgcctctgtgctatgatgttggcgaacgctatgaggactctggaacgcaaatggggagggagggcagggagaaatgttgcccataatgaaatgcattctcaatacctcatgattctatatcgacgttctagttcaaacaggcaagggatgcaaagtatgacgggacagcattaacacaagctgtgttagtaaaaatagacgtaacatacacgcaaacacaagtaataaaatgaaacaagaagcaaagacataatcaaccacgacaggcgacgacacagacgcagacagacacacgacgacgacgagcccaggacagacgaagacgaagagcagagccgcacagacacgagagaacactgagaagagccacacagggcagccaaagggaaagcaagagacgggcgaaagcgacacagaagaaaggagacaactagccgacagcgaacgcgaggaagcccgcaaagacgcagcgctcagacggcgcgcctgcaaagagcagagaaccacaactacagagatggacaacgacgcgtgactgaaagcgaaacgcagaaagaccagaagcaagcaataagcaaacagacgacaagcacagcgaagacaacatgaagacaaagtaaagagaaacaaagaaacagacatacaacgagcaaagaagcagaacgctgagaaaaagaaacaaaagagaagacacaaaacagaaaacaacaacaaagcaagaacaaagtacaacaagaaaagagacggcaaatgcggcatagcaggagaagaaaacaaagaacaaacgaaaagtaaagaaagagaaaagagcaacaaaagacacagaacaactgacaaacgagaacgagaataagacgaagcagaagcaaatcgaaacagataccgacttgagagcgcaacaaactaatagaaacagaaccatccagtggan

SEQ ID NO: 633552 - DNA, 90 bp, Homo sapiens
gagcggggttcgcgtccgctgcagcagcgcgggccgggccaggtggcgcctcgcgcggcatcgactctggcaggcgctgcagctgaagct

SEQ ID NO: 633553 - DNA, 153 bp, Homo sapiens
cccagatacgagatggagacgtggaagatctccagtaatggtcatggtgattggtcccggggcactctcacaaaccaggtgagccgggtgacaacgacattgggggctttcggatctgtcaccacaggaccatctcccagcagcgttttcttg

SEQ ID NO: 633554 - DNA, 111 bp, Homo sapiens
ttctgcttctgccgcttctgcttctctgcttcctgcttctgccgcttcctgcttctgccatggaccagggtctggtgagggggtacccgacgctcgacacttcgtacactc

SEQ ID NO: 633555 - DNA, 121 bp, Homo sapiens
tgatgccagccactccaggaggaagtcgggaggcgtggagggtgccacaccttggcttctgtgactctcctttgtgtggtgcccacctgcagatgtccctccttactacccacagcaccta

SEQ ID NO: 633556 - DNA, 179 bp, Homo sapiens
  misc_feature (1)..(3): n is a, c, g, or t
nnnccacccgcgctttccctcctcaccatcccctcattgctgttgattaccaactcactggacagccagtgctcaattggtggcaccaatgggaacctgtagttatgttcttactggcactgacagggcaatgctgagcctttggacacctgtcatggagcgggccagtgcaattgtcc

SEQ ID NO: 633557 - DNA, 244 bp, Homo sapiens
ctcactgcaacctcaaactcctgggctcaagcaattcttcccacctcaacctctctgagtagtctggaactacaggtgtgtgccaccatccccagttatctttaataataaaattcactatgtagagacagagtctccctattttgcccaggcgtggtctgaacctcctgggcacaagcagtcttcctgcctcggccctcccaaaggtctgaattcacaggcatgacccaccaaactcagcctt

SEQ ID NO: 633558 - DNA, 297 bp, Homo sapiens
ctatagcataatatagacttacactgaatatatgtcattagaagtgctgtggtccacttcatttataaggaacaaatattttgacagtacatatatagcaacagcaaaagccctgtctcaccctgataggaatgggtttgctgggtgtctagaagttagattcctgctgaatagaattagccatccttaaaagattttaatccaatactgaactgtttataaaatgctttctctatggtaatgtactgtaagtagtgcaattctgtatatactgctattgaaacttctaaaactagg

SEQ ID NO: 633559 - DNA, 173 bp, Homo sapiens
gggggggggaaaaaaggttttttaaaggggttcctttcccccccaaagcccaatttaatttttttttttggggggggggaaaccccccaggggttttcccccttgggggggggttcccccggttttttccccccccggggggggggtttaagggcccccttttttttttttta

SEQ ID NO: 633560 - DNA, 842 bp, Homo sapiens
tatgtctctgaagttgctcctgaaaaactactgtgtgagcactgaaacgttacaaatgcctaataggcatttgatcaactgagcaaggcttacttgttatctcatgaaatgcctgttgccgagttatttgaatagaaatatttgaaagtatcggaaagcagatcttagtttaagggagttggaaaaggaattatatttctctttttccgtgattctgtactcaacaagtcttgatggaattaaaatactggctgcttattctggggagcctgtagctaatatgagtatgggacaggtaataattgtcgatctttaatattgagttgaaatgaattaagatattataggatttaggcataaatttttatacggtggagtactttatgtggtcgagctagaatttatagcgggtggaattgggaaaatgagaaacagggccgcattttgatggattaccatttatatggtcattgggtctgaatccttaaaggttgtaagcgctacactatttggacacttattattctttagctagaatagtaattgttggagtcactataatcattagataaattattttttggggaagcgaaaatggagcaggcagagggttcgcaattcgggcgtttcgtagagaataaggcggtcacggttattagggagggcagtaaggggaagaattcattggtcacaagggggggggagaggaggtttaaaccccgaggggatagtgtggaagcaatgggtgacgggccggaaatgaaatagcattttttgggcggacgagaagtgttacgaaagaggagaaaatataagggaagggacaggatatatagtattta

SEQ ID NO: 633561 - DNA, 535 bp, Homo sapiens
cacgctggagtgtaaacggttattgaagcaggtaggggcagattttacgaagggactgcagatctggaataatgggtatggggtagatctgcccatagagctcactttagaccggcctatactcctacaaggaattggggtaggatcttctactcagccttgccacaatagaatggccaatgcccttctagtatgtttggtgaaggtcttgaaggcaccatttcccccatccaccctggggagaaattgagtccctaaagtcaacgacaaggcttattgaggctgagtttgcaacagatccgatctgggaggtagaaacaaaaatgactgaacatctttttatcccccaatcgttacaaagcctaaataactctaaacgggatgggagggcaaattttaggtcagttgacatcctggagaagatatcctaggtcctgtctcattccctagaccgcataacactccaaccgtgtaaatctcaggaccctgaagaagacagtggtaggggagaggaggggagctagcttccacccta

SEQ ID NO: 633562 - DNA, 168 bp, Homo sapiens
gcacttgaccagtgtctgagtttcagaaggtttactcagggatctctacttcaaacggacatataggtggttagaaagggcatttacacccccttcctcaacctatatctgttctgtgatgactactactaaaggttatatatacatgaggccaataatcatcatgct

SEQ ID NO: 633563 - DNA, 175 bp, Homo sapiens
agatagaatcgagctcgggtaccaaatactcggatctaccctagcatcacacacgcacaatcccctatccacccagcccattctctctccggtccaacctaacccctttccggcgggcttttccccggtcccttgagacctcagccatgagggagtggctgttggtttgggccaa

SEQ ID NO: 633564 - DNA, 133 bp, Homo sapiens
accggaatatgtttgttagaagccaagctaccaattacgggaagatctcacaaaaaatcatgatgagctttgatagacacccaccagaatatggcagactgtcataggcattctgttattgtccggggttgtt

SEQ ID NO: 633565 - DNA, 123 bp, Homo sapiens
caaatccaaaagaacaatagctgtaaccacagctgtcattgactagaatgctctgtcatactttatattaaaaaatgctttgcatttcttccagtgccatgcacattccatatggtgtcccac

SEQ ID NO: 633566 - DNA, 108 bp, Homo sapiens
cctcaacaagtgcgagacctgggcgtccaacctgcctacaaccacagccgcgaaagaagaagacctgctgcttcaatacaacacgggaggacctggccatcaacatca

SEQ ID NO: 633567 - DNA, 338 bp, Homo sapiens
ttacctgccacagcccgagttatggtggcagcagcagttccctcccaaccagtctggcaagccatttgttggcctgtgagtccacaccagcactgatgagtcaggtttttcccttctttgtgcccagagcagctggggagggagttgggggtttctaggaaacaggacctcctccttctgtctctcccactcatccccttgtcttggagctgctcattttctatctggagcctctgtctcaccctggaaaaagagccttcatgtcctactaaagagagtctcctatggccacactggcaggaaagtctggtcccatgctgagtttagtcaggagccga

SEQ ID NO: 633568 - DNA, 175 bp, Homo sapiens
cggagtcgagaccacccgggcacgatggtgagactcgactctactaaaaatctttcaattggtaaccacatgcacacaaactttggtccctagcccagtcgtctccattctccagaggacgatttcacaccttggcctctctctttactctcagcggctttccacctaggggtac

SEQ ID NO: 633569 - DNA, 549 bp, Homo sapiens
ccgaaggtcttatcgatggtaatatacttaattaataggaataacaagttaatatagttctaaaactactgtattgcaatctatgccaggaacctgatgacggaaaccacgagataactggaaattcccaaattgcgccaaagaaaaatactacgagacttgagaatcatttaacgtaacttcctaagtgtaagatgacaaaatatgactatcgggatattctggcgttaattttcccgtccgcctaaatgtgggcaaaaattcacagctacgttatattaagcaaatattaacagtgcctattatatgctgggtagtgaaatttgataaaaaacttaaaagttaaaaaaaattgtttcgatctttaatgtcacattgacttatctgggacatcgataaatttaatcctaacatgaagatctggctaagtatatttttaaaaatctgtaaatctcacaaaaactacagctgttaagcacagtttaaacccattctgcagggttagaaattcttctgtcaggcaaactatttgataggaagtaaaataag

SEQ ID NO: 633570 - DNA, 312 bp, Homo sapiens
ggtagcagcgctcaggaatgtgtatgcccagtggggacgggcgagtacagacaggctctcgctgcacttgtgaatccatcacgtaagaggcatgagtcacggagcctatcctattcatctatgctccggtccctcactactgggtccgcagtgatcctccggcttgccgcctcctgtctagatctgatcctgccaggcgattcgaccaggctgaacggggtgatctggagctcggatacagagatcagaggtggttcatggtctcagctctgtgaccttgggcagcttcttggtgtcaaagaacaggctgtc

SEQ ID NO: 633571 - DNA, 197 bp, Homo sapiens
  misc_feature (196)..(196): n is a, c, g, or t
gggaccacatgccatcatgcctggctaagttttaattttttgtagagatggggtcttgccatgttacccaggctggtcttggacttctgggcttgggcagtcctcccgccttagcctcccaaagaaatagggattataggtcggagccaccaggcctcgctcttattatatgagtatatatgaaatctttctgtgna

SEQ ID NO: 633572 - DNA, 287 bp, Homo sapiens
ccgccctctttttttggccatccttcctttccccccccttgacccagggaggagaagggagaacatcccccccccaagtcccccccccatcttttccctttttgtatattaagggcaaaaaaccccatcatttgggaactttttttctatttattgaacgggggattacaggtccttttccttttttttttttcaaagattgaacagaaatttttctttttaattttattttgagactggggggcatctccagagcccctccccccctcaacctcgtttcctccgca

SEQ ID NO: 633573 - DNA, 187 bp, Homo sapiens
agaccctgtctcacaaacattcacatagaattcatacaagagagaatggggttctcaagtgggaaagcctgttttctagaaacgtgtggaactgggaaggacgactacggctcgtgatcactgtctagaaaagcatgtatcctaacggacatgcttctttttggcgatgtccgagaagctgtggcgg

SEQ ID NO: 633574 - DNA, 208 bp, Homo sapiens
gcgaattgcccccacagaacagcgtcattgtgtgacacgtcgttggactgctgtttagataaccaacaagagtctatgtatagaaatccgctgatgggagaagatggtcttcgtcccatcagtcttgctcccatcaaaccagcgtcattgtttgacacgtcgttggactgctgttttgataacaacatgagtcaatgtataaaatccg

SEQ ID NO: 633575 - DNA, 958 bp, Homo sapiens
ttctagcggcgccgattattgcataataaaatacagttttgaaaaaaatggatgaagaacctgacagaactaagcgatgggaaggaggctcatgcaaagcaccatgggcagcattcttcaaagcaagcatgcaatctggcatcccgttcaacagcttacaaatcagcaagcaccattcctcattccaagggccaacagcagcaacacaaagcagtcatttgcagcacccatggcacaagttcgacttgggacatgatgccgccacctttcatgtggtccagtaacctggcatccacagcaaccaatggcaagcaccccagatttcaccagcctcaatagactgcacgtggtaactttaccaagtcgtcggcactactctgtacgaggaactattccgatcaaaatcctattagctcagatcggaataactctgtcacctaagagtacccagagctgcacacacttgcctgaactttcaggaacacccacgacacaacctcataacgtctttgcaggcaggctgtggcatactgacctggccatggacgagccatctctttataattccctaagcatggctatggcagactctaaacaacagcatgcctgggaatacaaggtcgagcaagtcctactccatttttcggccaggcctttaccaactgcgatcccatctcagtcattcatggctctcactccaagaactcttacaggacgcaccacctcaccagtctccgactcggcatcgccttgcaccacgtcgagctggcgtggtactagcccggaaacgagggccgttcccaggtatcgacagataacgccatacagtgagtcgtcaccgctcatctcagcgccccggcagtcagcgaagcccacaacgcagcgacgactacgttacaaaatcaggccacatcgcagataactcattaaacacttgacgcgccgaccaaaacaaacg

SEQ ID NO: 633576 - DNA, 1721 bp, Homo sapiens
tggaaactattgttctttttaggtattcagctggttcaacctttgcacacatctgtgtcattcaagccatcagccaacatcatcaaactccagtgcaatttctgcacattcaagccagtgtgtgttctccatttgcattcatggttcaggcacacaccagtttcaacacatcattcagttgcacacaggtcaagcatctcacgttcacatggcatccctattagtatattgcacagctcagcttcactcatcctggtcagcacacactcatcacatcccacccatgcatgcgcacatcttcacatcaacacagctatggcagcagcacaccggcatattatcatcttactacaagctagtgccacaacatgtgtacatacaagtggccacatatatcatcatctagctcatagtcctcacaggcccatctccagcgctcatcggtcgtcaaacttctcacatagcaacttcgaacggcacaacaccctatcaaggtcacttaacttagccaaaagcaacatcgcagacaacactctttcaacgcaacagggtccggggctacaccaccaccttgggcgtgtcaccggacagtcggccaaaactctggcgtaccccttacgcatccacacttcatgtacaccccatcacagcacggctcctggggctccattgcatttgccttacattgtccttggacacagagtgcacgccttagaggcaaaccatcaggacttgagtacacactcggcgcaacgactcgttaaagcacggcggaacagggacactacgtcaagctgccggcaccacggcatataccaaacaagacggaccaagcggaggcacgtacacatacacaaccgagcctccaacagcatcacccaagccccaaccgagcgcccacgcatcgtccagacaccttacacacatcgcatcggagccacagcaacgacacactgggtataccccgccaggcaaaccagcagcaggcaacagactaaccacaaagaacactaggcaggctaacactgaccagcaaccgcgaacagcacaccacagcgggtcacacaacagcacaccacccagtcacgcaagacacacaaccagacaagcgcacaacaacacacacacgtccaacaacacacccgagcaacacacgataagacaagcacacacgaacaagactagagacacgacaaccagcaagcagcagagcacaacacaacactcacgaacaaccgcacgcccaccaacggattagcgccaagcgatacccaggcaacagccacgatacctcatcgtgcacctccacaccaccaacacccgagcacgagcgaaagacaccgacagcacacacacgcgcacgcacgagccaagaaccacacccacgcgcactggacccaaggacagacagccgcaaaaccaagacacaagcaggagaccacacaggccccggccaacgcgcagcaaccgacacacacgaacgagaacgcagcgacccaaccacgcggaacctaacacacaaggcacacacctcgacgacaagcgcgaaagatagagacaacacacagagcaggacgcagatatacaatcacgaaggccaggcaagccgacagacccacaaccacgagaaaagcacactgcgccacacccgaccgaacacagacacagcacccgacaacgcaccaaccaagcgcacggcgcaccacacccaccgaagcagc

SEQ ID NO: 633577 - DNA, 415 bp, Homo sapiens
accgaatcagtactaggttaatactaaatacaaatattaaacagaaatacagtgttgttacttttatgtctatcctatacctgtcctataaacaaaaaaaagtttcaaaaataaagtaaacgtagtttaccaagtagagtttacttgtacacagatgtactctctctgtgacgaatgccccatcttttcaattcttagagtgaccctgcttggggtggaaaatgttcagtcacgttcagctgtgagatctctgtcacatatttgaaagggaaactgcaagccacaccctgtcagttctcctctctggaaacatcagtctgtggtagtattgagagtagaacatatcactctgaatctctcctgtgtccaatcaaaaacgatgagaatttaatgctatggacctcggaaaatattt

SEQ ID NO: 633578 - DNA, 151 bp, Homo sapiens
gacctgagccagctgacgaagctccacagctttctgggtgatgaagtcttcctccgggaactcgccaagacgaagcaggagaataagctgaagttttctcagttcctggagacggagcacaaagacgaagatcaacccatcctccatggtt

SEQ ID NO: 633579 - DNA, 1127 bp, Homo sapiens
  misc_feature (600)..(600): n is a, c, g, or t
cctgtctgcagctggtggatgcctgtgggcatggctttctctggggaccccattcctgtcagtagcaaccctggcagtgtccggagcggctctagacaactttggtcataggaactctggaggtgggttctggtcatctgaggtggctactcaacaggtttgaggccccacagcaacagaagtccaggacccactaggttgcctcagaagccctaagactgatgagctggagcgcgcatttgagagaagcctcgcacccactgtgtactggccccgctcaggccggcctggcacaccgttgcctgctggcggctctcatggggaagcgcctgggcactggggattgcttgtggcccactcaactcttggggcagtggcccgtaaccctagtttgcctgaggcccttatgtccccttatgttcctggtactggagcttgagctcttgcctggaacgctgcagctgcacccaccctgcttgatcccacctgggaggccaggacactgaggagctctgaacccagcccacagggaagcagaggaaggtgagcccccgccgacccccaagccttcccatcccttccctgtccctggtggtctanggacccaagctccctagattctcttccaccgtctgtacgtttcaaattacactggtgtaggcctgtactgctggtggggctgggcccctaaacgccagaaagtgaatcttaagaagctctgccctaaactgagaaccacatgctgagggaagggctgaaaggtgaaggctcagcctccctcacatgggtcctgggttacattaggtaccgggctgattgataggcatttggccatggttccttttcgtctacctttgggggccttctcaggcccagaacaaggctgttgttactatgtggaaaagctgaccagtgctgcacactaggggcacacacctttccatgagcagctcctgccctgtggcgacagccagcgtgcacccagacgctggtgccatggcgaagcaggcgttcaagaccatggagaagacaactcctcatctagaaaatgaggacacctcagtgacaaacacacctttttataccaatcagtatcctctgttcattaaaactggctatccattaca

SEQ ID NO: 633580 - DNA, 146 bp, Homo sapiens
  misc_feature (8)..(8): n is a, c, g, or t
  misc_feature (45)..(45): n is a, c, g, or t
  misc_feature (64)..(64): n is a, c, g, or t
  misc_feature (116)..(116): n is a, c, g, or t
aaacactntgcaacgcaaaattatctcacacaaggagtgctcaanaatctgaaggctaggaatnacaagcaatctcaaaagcagaaactcacagtcataaaactttatacatcatntgaacgaaaatacatttatactactaaaac

SEQ ID NO: 633581 - DNA, 926 bp, Homo sapiens
  misc_feature (41)..(41): n is a, c, g, or t
  misc_feature (117)..(117): n is a, c, g, or t
  misc_feature (119)..(119): n is a, c, g, or t
  misc_feature (121)..(121): n is a, c, g, or t
  misc_feature (399)..(399): n is a, c, g, or t
gtctttatacttcctcaacgctttatacttcagttcttctnactggggggtgtgaggaacagggggaccatggacttcatcagcattcagcagttggtaagtggagaaagagttgangngngaagcgcctgggcactggggattgcttgtggcccactcaactcttggggcagtggcccgtaaccctagtttgcctgaggcccttatgtccccttatgttcctggtactggagcttgagctcttgcctggaacgctgcagctgcacccaccctgcttgatcccacctgggaggccaggacactgaggagctctgaacccagcccacagggaagcagaggaaggtgagcccccgccgacccccaagccttcccatcccttccctgtccctggtggtctanggacccaagctccctagattctcttccaccgtctgtacgtttcaaattacactggtgtaggcctgtactgctggtggggctgggcccctaaacgccagaaagtgaatcttaagaagctctgccctaaactgagaaccacatgctgagggaagggctgaaaggtgaaggctcagcctccctcacatgggtcctgggttacattaggtaccgggctgattgataggcatttggccatggttccttttcgtctacctttgggggccttctcaggcccagaacaaggctgttgttactatgtggaaaagctgaccagtgctgcacactaggggcacacacctttccatgagcagctcctgccctgtggcgacagccagcgtgcacccagacgctggtgccatggcgaagcaggcgttcaagaccatggagaagacaactcctcatctagaaaatgaggacacctcagtgacaaacacacctttttataccaatcagtatcctctgttcattaaaactggctatccattaca

SEQ ID NO: 633582 - DNA, 115 bp, Homo sapiens
  misc_feature (81)..(81): n is a, c, g, or t
tactcggtcctggaattctccggggtcgacatcgatcatcatggaatttgcgtggtgcatgtaccaactaggcttaatagnctcgaattcgagctcgaattcgaggcttctaacg

SEQ ID NO: 633583 - DNA, 1599 bp, Homo sapiens
  misc_feature (600)..(600): n is a, c, g, or t
cctgtctgcagctggtggatgcctgtgggcatggctttctctggggaccccattcctgtcagtagcaaccctggcagtgtccggagcggctctagacaactttggtcataggaactctggaggtgggttctggtcatctgaggtggctactcaacaggtttgaggccccacagcaacagaagtccaggacccactaggttgcctcagaagccctaagactgatgagctggagcgcgcatttgagagaagcctcgcacccactgtgtactggccccgctcaggccggcctggcacaccgttgcctgctggcggctctcatggggaagcgcctgggcactggggattgcttgtggcccactcaactcttggggcagtggcccgtaaccctagtttgcctgaggcccttatgtccccttatgttcctggtactggagcttgagctcttgcctggaacgctgcagctgcacccaccctgcttgatcccacctgggaggccaggacactgaggagctctgaacccagcccacagggaagcagaggaaggtgagcccccgccgacccccaagccttcccatcccttccctgtccctggtggtctanggacccaagctccctagattctcttccaccgtctgtacgtttcaaattacactggtgtaggcctgtactgctggtggggctgggcccctaaacgccagaaagtgaatcttaagaagctctgccctaaactgagaaccacatgctgagggaagggctgaaaggtgaaggctcagcctccctcacatgggtcctgggttacattaggtaccgggctgattgataggcatttggccatggttccttttcgtctacctttgggggccttctcaggcccagaacaaggctgttgttactatgtggaaaagctgaccagtgctgcacactaggggcacacacctttccatgagcagctcctgccctgtggcgacagccagcgtgcacccagacgctggtgccatggcgaagcaggcgttcaagaccatggagaagacaactcctcatctagaaaatgaggacacctcagtgacaaacacacctttttataccaatcagtatcctctgttcattaaaactggctatccattacagcctagccgtctttcctgggccgagaggagcccatgcttcagtcaccagggactgtctgatagggcccacgcctgttagccatgccggccgacagcaagataggccgagtgcagagtgggcgggatgcggggtcctggcactaggcttttgtgcttaaggcacctctgctcactgacgacaaggtcaaagacagtggttctccacctcagctgcttatcagaatcaccaggaaggtttaaaagtctgatgtccagaccctaagtcagaagccctgaggggaggatccaggtattctcatgcagaggccatgcttgtctatgtgggaaatcctaggaatctacagaaagcagacaactagggagtccagcaaaatctcgggtgcaagataaacacacaaaaacctgtttctacctcctagaaatgaacatgtagacacaaaagttaaaaatatgtactgtttacaattgctga

SEQ ID NO: 633584 - DNA, 983 bp, Homo sapiens
gggctcactgtggcctcaaccttctgagctcaagggatcctcccacctcagcttctgagtagctgggaccataggtacatgctaccacaccccgctaatttttgtatttttttgtagagatgagatttcaccatgttgcccaggctggtcttgaagtcctgagctcaaggtgggaggatcacctgagcccaggagttcgagaccagcctgggaaacacagcatctctactaaaaatttaaaaaatcagctgggcttggtggcctccgtctgtggtcctagctacttgagaggttgaggtgggtgaatcacttgagcccaggaggtcgaggctgtagtgagctgtgatcataccactgcattccagcctgagtgacagagcaagagcctgtctaaaagatagataaaataatctttgtattacaaagataaatgttcatttagaaatactttacaaattaagattagcagccaggcatgttggctcacacctgtaaacgccagtacttcaggaggctgaggcaggaggatcgcttgagcccaggagttcaagaccagcctgggcaatataatgagaccttgtctctataaaaaattaaacaatcagtcaggtgtggtggtgtgcatctgtagtctcagcctcttgagtagctgggactacaagcactgccaccatgcccggctaatctgtatattagtagagatggggttcaccatgtggcagctggtctaaatctggacctcagtgatttgcctgctcaactcagctccaaggtgtggatccaggtttgagcaagtgcctctttggtagagtctaattaggcataacgacaatagcgttacctgtatgcgccgtgtctgaaagcatacttgggcagggaggggtaagtataacaggaccgttgggtcggactgccacgtgttaggaaagcgcccacgaattttgggagacagcacgggaacaaagatccaaaacagacaaagg

SEQ ID NO: 633585 - DNA, 993 bp, Homo sapiens
  misc_feature (600)..(600): n is a, c, g, or t
cctgtctgcagctggtggatgcctgtgggcatggctttctctggggaccccattcctgtcagtagcaaccctggcagtgtccggagcggctctagacaactttggtcataggaactctggaggtgggttctggtcatctgaggtggctactcaacaggtttgaggccccacagcaacagaagtccaggacccactaggttgcctcagaagccctaagactgatgagctggagcgcgcatttgagagaagcctcgcacccactgtgtactggccccgctcaggccggcctggcacaccgttgcctgctggcggctctcatggggaagcgcctgggcactggggattgcttgtggcccactcaactcttggggcagtggcccgtaaccctagtttgcctgaggcccttatgtccccttatgttcctggtactggagcttgagctcttgcctggaacgctgcagctgcacccaccctgcttgatcccacctgggaggccaggacactgaggagctctgaacccagcccacagggaagcagaggaaggtgagcccccgccgacccccaagccttcccatcccttccctgtccctggtggtctanggacccaagctccctagattctcttccaccgtctgtacgtttcaaattacactggtgtaggcctgtactgctggtggggctgggcccctaaacgccagaaagtgaatcttaagaagctctgccctaaactgagaacgcccagaacaaggctgttgttactatgtggaaaagctgaccagtgctgcacactaggggcacacacctttccatgagcagctcctgccctgtggcgacagccagcgtgcacccagacgctggtgccatggcgaagcaggcgttcaagaccatggagaagacaactcctcatctagaaaatgaggacacctcagtgacaaacacacctttttataccaatcagtatcctctgttcattaaaactggctatccattaca

SEQ ID NO: 633586 - DNA, 720 bp, Homo sapiens
cctgtctgcagctggtggatgcctgtgggcatggctttctctggggaccccattcctgtcagtagcaaccctggcagtgtccggagcggctctagacaactttggtcataggaactctggaggtgggttctggtcatctgaggtggctactcaacaggtttgaggccccacagcaacagaagtccaggacccactaggttgcctcagaagccctaagactgatgagctggagcgcgcatttgagagaagcctcgcacccactgtgtactggccccgctcaggccggcctggcacaccgttgcctgctggcggctctcatggggaagcgcctgggcactggggattgcttgtggcccactcaactcttggggcagtggcccgtaaccctagtttgcctgaggcccttatgtccccttatgttcctggtactggagcttgagctcttgcctggaacgctgcagctgcacccaccctgcttgatcccacctgggaggccaggacactgaggagctctgaacccagcccacagggaagcagaggaagctcctgccctgtggcgacagccagcgtgcacccagacgctggtgccatggcgaagcaggcgttcaagaccatggagaagacaactcctcatctagaaaatgaggacacctcagtgacaaacacacctttttataccaatcagtatcctctgttcattaaaactggctatccattaca

SEQ ID NO: 633587 - DNA, 816 bp, Homo sapiens
  misc_feature (733)..(733): n is a, c, g, or t
cctgtctgcagctggtggatgcctgtgggcatggctttctctggggaccccattcctgtcagtagcaaccctggcagtgtccggagcggctctagacaactttggtcataggaactctggaggtgggttctggtcatctgaggtggctactcaacaggtttgaggccccacagcaacagaagtccaggacccactaggttgcctcagaagccctaagactgatgagctggagcgcgcatttgagagaagcctcgcacccactgtgtactggccccgctcaggccggcctggcacaccgttgcctgctggcggctctcatggggaagcgcctgggcactggggattgcttgtggcccactcaactcttggggcagtggcccgtaaccctagtttgcctgaggcccttatgtccccttatgttcctggtactggagcttgagctcttgcctggaacgctgcagctgcacccaccctgcttgatcccacctgggaggccaggacactgaggagctctgaacccagcccacagggaagcagaggaagctcctgccctgtggcgacagccagcgtgcacccagacgctggtgccatggcgaagcaggcgttcaagaccatggagaagacaactcctcatctagaaaatgaggacacctcagtgacaaacacacctttttataccaatcagtatcctctgttcattaaaactggctatccattacaaaaaaaaaacganagaaaaaaaagggggggcctctgggacagccctttgggggcccaatcccgcctaaagggggggggttaaaaataacgggcggg

SEQ ID NO: 633588 - DNA, 740 bp, Homo sapiens
  misc_feature (41)..(41): n is a, c, g, or t
  misc_feature (117)..(117): n is a, c, g, or t
  misc_feature (119)..(119): n is a, c, g, or t
  misc_feature (121)..(121): n is a, c, g, or t
  misc_feature (313)..(313): n is a, c, g, or t
  misc_feature (315)..(315): n is a, c, g, or t
  misc_feature (317)..(317): n is a, c, g, or t
  misc_feature (344)..(344): n is a, c, g, or t
  misc_feature (353)..(353): n is a, c, g, or t
gtctttatacttcctcaacgctttatacttcagttcttctnactggggggtgtgaggaacagggggaccatggacttcatcagcattcagcagttggtaagtggagaaagagttgangngnaagtgttgggatttggacatggagttcctgaccctggagcctggcctagtgactggaggaggggcccccaagaggctgttgcccgggagaagctgaaattggaagaagagaagaagaagaaacttgaaagatttaacagtaccagatttaatctggataacctggctgacttggaaaacttggttcaaagangnanaaagcgactgagacacagagtcccccncaggaaacntgagcccctggttaagccgcagtcccaggcccaggtggagcctgtgggcctggagatgttcctgaaggcagctgctgagaaccaggagtacctgattgacaagtacttgacagacggaggggaccccaatgcccagaacaaggctgttgttactatgtggaaaagctgaccagtgctgcacactaggggcacacacctttccatgagcagctcctgccctgtggcgacagccagcgtgcacccagacgctggtgccatggcgaagcaggcgttcaagaccatggagaagacaactcctcatctagaaaatgaggacacctcagtgacaaacacacctttttataccaatcagtatcctctgttcattaaaactggctatccattaca

SEQ ID NO: 633589 - DNA, 790 bp, Homo sapiens
gcggaggtcccggcgcagaagcgcgcccgggccaggcgcagatccgcatgctcgaggccgtatgccgtgaacccggactggttcgtgttcactgcgaggctgcacgggtcgcaacgatccggcagatcagcctggactgtgcggcgggtcatggagccgctcagctgtcagccgtcgtgcacggttcgtaatgaagaactcgctgaaggactgctgtggcagtggctgggcccctcggggatcgatgaccacgtttctgatcctgagcaaatgagagaccaatgtctactttaagctgatgcgcctcccaggaggccccaccgttgaccttccaggtgaagaagtactcgctggtgcgtgatgtggtctcctcgactgcgccggcacggtagtgcgaggagcaggcatgttgctcaatcatctcctcctggtactcacatcagctttggcccaccgagtggtatgcatgtgataggctcatggccacctatgttccagaaatctgtgcccctcctattgacgtgcacgagaggtgaacccttgaacacgcatcaaggcgcatgtctcctcatcgactacggacccgactcccaggagcgtggagcttccggcatgtataggcagtcaaagttgtgcctgtgcggcgctgagtcgcgggaatgaacgaaagctgcgtccgaggcagaacgtactgccagacatgagccggcatgcagggacatgagggaagcttgcatggcccatgggcgcggggctgtcggagaggcgaggaagagcctgacggggaaca

SEQ ID NO: 633590 - DNA, 178 bp, Homo sapiens
tggggttgggcaggttgggccccgacagcccagaaggcttggggagtggctactcacagactctggtccgcctctgcattaactagaagaggcttctttagagctcatctcgaagctctgaaggcagaaacttgtactgctgctgccggatctgggccagattcttccgcgcctcttc

SEQ ID NO: 633591 - DNA, 935 bp, Homo sapiens
cagctcaatagagcacacccgtctatgtagcaaaatagctgggcatggattgataggtagaggcgacgaccctaaacgagcctgttgcattagctggtggtccacggatagtacatcttagttcaactttaaattggcccacgagaaatcctcatatagatcccctatggtcagtttgactgttgggccaacacgagggatcgagctcttgggacgactaggaagaaagcgttgtagagagagtcagagatttagcacccatagtgaaggcctaagaagccagccacgcaattaagaaagcgttcaagctcaaaacctatactaaaaaatcccaaatatataatctgaactcgtcatggccaattggaccaatctatgagcctatagaagaacgtaatgtgtagagatcatgtacacgatgaaagacattgctcctccgcattagagcctgcgtcagattaaaagcactgaactgtcgaattacacagccaatatctacaatcaaaacaccaagtcattattaccctcattgttataccagtcagaggccatgctccattgcggaaaggtccctcagaagtgaaagtgacactcggggaaatcttacccgcctgtgaccagagaactatcactctagcattcaccaggtatcacaggaccgacctgccaacggacacatgtttcaaacggcgcggtaaccttaaccggtgaggggtgataatcactggtccctgataagggacccgatgaatgggccacgaggtcaggggccctaaagtgtaaccggacacatgccggccggaaaagggcttgcaccagggggagaacctaaggttataaataggcaagagcaaaccaggcaaaaaaagcataaacgggcgacgaacacccaagtgtgacccacacaaaccctagcaaacacacacacccacagc

SEQ ID NO: 633592 - DNA, 250 bp, Homo sapiens
cagatatggcttgtatatataaatgggctgatctatgtaatcacagaggccagtatgtacatgacaaagttgggaggttttatttctgggtctcttcctcctttgaataacgtcttgatgatctcctccttcttggccgggaggcgctcttcacgggcgcttgcgtgcttccttggtcttagacctgcgggcctcagccgggtcagccaggagcttctggcgggcctttatctgcgcaggggtaccgagc

SEQ ID NO: 633593 - DNA, 639 bp, Homo sapiens
  misc_feature (13)..(13): n is a, c, g, or t
  misc_feature (63)..(63): n is a, c, g, or t
  misc_feature (67)..(67): n is a, c, g, or t
  misc_feature (69)..(69): n is a, c, g, or t
  misc_feature (71)..(71): n is a, c, g, or t
  misc_feature (104)..(104): n is a, c, g, or t
  misc_feature (122)..(122): n is a, c, g, or t
  misc_feature (148)..(148): n is a, c, g, or t
  misc_feature (153)..(154): n is a, c, g, or t
  misc_feature (157)..(157): n is a, c, g, or t
  misc_feature (166)..(166): n is a, c, g, or t
  misc_feature (168)..(168): n is a, c, g, or t
  misc_feature (197)..(197): n is a, c, g, or t
  misc_feature (201)..(201): n is a, c, g, or t
  misc_feature (233)..(233): n is a, c, g, or t
  misc_feature (257)..(257): n is a, c, g, or t
  misc_feature (279)..(279): n is a, c, g, or t
  misc_feature (307)..(307): n is a, c, g, or t
  misc_feature (318)..(318): n is a, c, g, or t
  misc_feature (330)..(330): n is a, c, g, or t
  misc_feature (355)..(355): n is a, c, g, or t
  misc_feature (378)..(378): n is a, c, g, or t
  misc_feature (390)..(390): n is a, c, g, or t
  misc_feature (393)..(393): n is a, c, g, or t
  misc_feature (404)..(404): n is a, c, g, or t
  misc_feature (462)..(462): n is a, c, g, or t
  misc_feature (473)..(473): n is a, c, g, or t
  misc_feature (476)..(476): n is a, c, g, or t
  misc_feature (479)..(480): n is a, c, g, or t
  misc_feature (482)..(482): n is a, c, g, or t
  misc_feature (488)..(488): n is a, c, g, or t
  misc_feature (509)..(509): n is a, c, g, or t
  misc_feature (516)..(516): n is a, c, g, or t
  misc_feature (522)..(523): n is a, c, g, or t
  misc_feature (525)..(525): n is a, c, g, or t
  misc_feature (537)..(537): n is a, c, g, or t
  misc_feature (610)..(610): n is a, c, g, or t
gtatgtgcggatnacaccagggcttgctctgcaccctcagctggctaccggccatcctctgcntgcntntntgtccgcagcccttcccagctggaatatttgtnaggctggaatttaagctncggcaaacaaactgccggaagagggnctgannganacccaagtncnaagtcaggcccaatggggtgagtgaaagngtgngagagcaataggcgcatgctgaggtgtgagtncatggacttggggtttggggtgtnggacaaatgcctgggatagtgnatgcatgaaatatagggaggtacattangaaagggtganagttcgaaaccnccctagggaagacgcataccttagnaggtaggagtaggatacagcctngagcacacaagnttngtagagcagtnggctcggttggagaagactaggaggcctaagacacgaccaggaccaatcggttttggntttaccccctnggnccnnanttcttncattcagaagacacggggctncaacctncgcgtnntngcagtgtgcctncttcttcaaaggcatacagagagacctgggagttgggaaagggaggacgaggctagtagtgagtgttgttgtnctgaggtggcgcccccctaaaacctaagg

SEQ ID NO: 633594 - DNA, 361 bp, Homo sapiens
tactggcggtgcctctactgtatgaattgtaaccagtgacgaaagaccgtatggaagacattaaaatattgagtgcatctccatctcctacccacatacgtggagaaactgctagtgccacatcatcaccatgtagagattctcaagagtcggacgggcgcaccaaccagagcaggaaaaggagtcatagaacagacagaaaaatctcatccaagaagccgtaacgtgctatctgtcgctttgagtcaaagaactacagttcctgaggaagaactaaatccaaagatactagctttgcagaatgctcagagaaagcgaaaaatggaacatgatggttcactttttcaagcagtagaggcaa

SEQ ID NO: 633595 - DNA, 308 bp, Homo sapiens
gatctgcttgccttggcctcccaaagtgctgggagtacaggcgtgagccaccacgccctgcctacagtggcttttatgtttacttatgtagttacccttaccagtgttctatattttttctttttctttttagctactgtctggtgtcccttcattttagcctgaaggactccctttagcatttcttgtagatctggtctagtagttagcaactcccttagtctttatctggaaatgtcttaatttctctctcattccttgatagtattttcagatgtagaattcttggctgacagtattttccttag

SEQ ID NO: 633596 - DNA, 669 bp, Homo sapiens
accatgctgccccccactggtggatgcagatccgtggaggatgtgcggggtgcgccggcagaggatccacgtgttcaccatcctggccccgtgaagaacccccagttcccgttcaggatgatggacgtgatgcggaggcccctgtggagagcgagctctaccagacaaagccggtgcctacgtggcatgccaaccagctgggctgcagcaaggcgtggcaactgtgctgatggcagcaggttgtgatgctccatgcatgctgatgcctggctgaggaccctggatgctgggatggtggccccagatgacagcagtgcatgcgattacctggcatgcctgagtgcttgcctccctcgagtgctgacgctcctctggggcctagcaagtgcttgtggcaggctggcacaaggggtgtgccttgcagccaccagtgcgttctcccctgtggtggggtcctgtcagtggccgcacgacttggacactttccaccgtggtggtccccaggccacacggtgaggtgtatgacgacgagtgacgccaccctacctcgatgtcttgggtgcttgccggcttcactcccgtctgttctacacttcattgcccgagattggatggtgacccaccacatgttgggctcacgtcactgcagtgacactgcaggtgacccaa

SEQ ID NO: 633597 - DNA, 884 bp, Homo sapiens
  misc_feature (162)..(162): n is a, c, g, or t
gctcgaggtgaggatacagcagaagtactggggagtcgaccttccctcgggcgtctggttaccaacaactgtgctaatcactgtgaaagcagacatgaaattacgatcaagtccagtctgacaatcaagagaagaactgaggtacctcttatgaatcttctngtgggcgataagaggcttaccttatgaggcattagatagtacatgtgtattaactctactaggggtgctaggaatgcggtgtggtatgagtcaaaaaggagatgacgcgaatattgcaagaggcgtgttagaatgtttctctgtgggcgcgataaagattccgtgtaactggtgttgagagactttgggattttatgtctgtcttggtcccgagggtacggtctgtcgttgctttatcatattaattagggtttctattgatagaaagaattgacgaacgttggaatatgatcacggcttgaggaggcgaacgtctcgctctaaaacatgacaaagtctcgtgcagggcataaggtcaggttttctctcaacaggactcgcagacggtcgcacaaaggctcctgggaggggctgactggcgggatggccagaacattggttagtgccaaaggtgtgccatgatggttccatggagctagaacaatgttttgaattttttacacttgtgtttgccatttggattggctcgttgaaacgcttgatgacggcttctggaagttcccgtgtctgcgcccaggagaaagttggggaagtgaaaatgggggggcgggaagggaaagcaacgtgtttgccaagattaatgtgagttgccataaaaatgtaagcggcatgggatagaagggtggtgactcgtgggagttgtttatcaatttataaccttg

SEQ ID NO: 633598 - DNA, 276 bp, Homo sapiens
  misc_feature (59)..(60): n is a, c, g, or t
  misc_feature (175)..(175): n is a, c, g, or t
  misc_feature (273)..(273): n is a, c, g, or t
ttggctcactgcagcctctgcctcctggattcatggcacgtcctccttgcctcagcctnncaaatatgctaggactacaggcccccacgcccagctgattttttgtatttttagtggagatggggtttcatcatgttggccaggatggtctcgatcttttgaccttgtgatccgnctgcctcggtctctgagagtgctgggattacaggcttgagccaccgtgtccggccagttttccatttttaaggtgttccaaaggccattttgtgttanaaa

SEQ ID NO: 633599 - DNA, 316 bp, Homo sapiens
gtgtacggtcacacgcacggagaggatcaaaagaataaatacctaggttgtaaactacctaaggaggcaaagacctgtactctgaaagctataagaaactgatgaaagaaatcaaagatgacacaaacagatggaaagacataccatgctcttggcttggaagagtccatatgatcaaaatgactatacgaaccaaggcaatctacagattcaatgcaatccctatcaaattaccgaggacatttttcactgaacttaaacaaaagattttaaagtttgtttggaagcacaagagacccttctccggtggcgtggt

SEQ ID NO: 633600 - DNA, 287 bp, Homo sapiens
actttgcgtgctgcacattttggatatggtggagggaaactgatgctggcagaccccaggtgtgtcagcacatggccaagcaatgcctgtgggtcataggcgtatgtttaagatttttcatttttgaggggagacagagcctctctctgtcccccaagctgagattgcatcattgcattccagcctgggcaacagagcgagactccatctcaaaacaaacaaactaacaaacaacaacgaaacaaacacagagagccctgccactcttgtccaagaactgaagttgg

SEQ ID NO: 633601 - DNA, 903 bp, Homo sapiens
gggaaccgggtagcttgtgccaggttgtgaggaacctgcagcgcgccgcagtgaccggtgccgctgagcctgcagcctgccccgcgccgtgacctgcgaccctagaccccgactccctttggctcagcccgcgcgccccagtgccggccctgggcctggcgctgactgcggaggatgagcggcggagcgcgggaaggaggagcctgccatcagttctgctagcctggccaaaccggggccctcaaaagtctccgtctggacgctacgggtgctgcggagctgacgcgggcctgggcaggctacacggactgacactttattaggacatgtcgatctacctcggttcccccacgcgaatcacttagccatggagagaccctgcgggcattgtcaccttccgcgggcagtccagccacgagtcacacggacgggggctcccccgcagcgcacattacggccacgcggctcacctgggcccactggagtccgcaagccagggaaggctaccctgcgcaccgccgcacctcaccgtgtcccaggcgccaaattcacaccaaagcgagcagcaggcatgacggcgcacaggcacacctactggcagcgcagacgccgcgcgcgccctccagcaccacaaccgacacaacggcgcacacggaccacaaccctcacggcgcccaacgcgccacaaactgcaccgaactcggagcaccagctcacggcacgacgccgcccgagaccgccagcgactagcacgggagtgggcaaggaccaaaagccccgcaaggaggccaccacacagcacccaggcgcaacacggcacacgaccagccgaaaggcacgcggcacggagccaccacgaccaccgaagcgccgaacccggacacaccgaccgcgcactagcaa

SEQ ID NO: 633602 - DNA, 1112 bp, Homo sapiens
  misc_feature (633)..(633): n is a, c, g, or t
ctaaaacataaccacataactccaaatatcaaataaaataaataacagcaataaaaataaccataatcctaaacctaaaaccccagaaatgtactccaacccccccacaagaagacccaataccacaaatacccaaatcccatatgatcgtctaaacttcagaaccgatgacagtcgccacaccaacacaagacgacacatcatgggcgaaacttcacaaccaataactaacacatcaccacacagctccaaatatcacaaaaacccaataacaccaataacaaaaaatccccccgaagccccaaacaccacaaacacccaaatcccaaaacaaccaacaagaaacccaaaaaccacaaataccaaaatcccacatcataggcgaacttcagaaccaccgcacccgggctgacaacaacattagatgacatatcatggacgaaacttaagaaacaataactaaagcacaaccacataactccaaatatcaaataaaataaataacaccaataaaataaacataatccaaaacctaaacctaaccccccccctcaaaaggtaccctaaccaccccacaagaagcccaaacaccacaaatacccaaatcccacatgacggtctaaacttcacaancggtgccagccgcgcccacaccaacaaaagaccgcacaccacgcggaaaaattttgaaaaaaattctaatcaacccccacccggatgcccaacattcaacaccagccgcgcccccggccggaagaaaaacacataaatcaacataatcaggcaccaaatgcttaaacaaaaaccagccgaggcccccctgagcccccctttgcacaccaccgaaaaaacttcagaaccaataactaacacataaccacataactccaaatatcacacaaacccaaaaacaacaaaccaaacataatccaaaaccctaaactccacaaccactgctctctagcgcattacatatcagagaccgatttatggcctattgtaggccgacacccccacgagaaagccaataaccccacctcaaccaacacaaccccaaaacaaaatacatgcagtctccaacacaagaatcctcatactaaatataaaaataa

SEQ ID NO: 633603 - DNA, 123 bp, Homo sapiens
gatcaggaggagtaccgcgacttgacgacgtggcgcaacatcatcgagaagtagttcggaaaatcaccatcgagcagccacagcaaggtgtgccaggtcgcgacgatcaatccaagcgccgca

SEQ ID NO: 633604 - DNA, 223 bp, Homo sapiens
gcctaccaggttatcaggcggcggttcaagcaaagtgatgttggagtgtaagtgaaatattatgttggcggataagcagatagtgaggaaagttgagccacataatgtactgctgaagtcagttggaagcctgtgtcctacaaacaaatgttgacgccgtagcataccgctcggaacatggtgacagggagactcgacagtactctgtaggcttgtacggagg

SEQ ID NO: 633605 - DNA, 213 bp, Homo sapiens
gtggctctggctcgtgtgagggcacggatgcacttcccaatgccgcgcgggagacgaaaagtatggccagctaaggaaagaaagttgggtatgttctcacccaaaaactccttcacctccttcaatgtggcaaggcttctgacgaccaggacgtgggcttgcgattgtgaccaccacttctttccggagtctatggtactagctgtaatcccg

SEQ ID NO: 633606 - DNA, 538 bp, Homo sapiens
  misc_feature (528)..(528): n is a, c, g, or t
  misc_feature (531)..(532): n is a, c, g, or t
cgtttccccgccctttttttccccgcggcctgtcgggaagaaggtccgcgtgccagggctatcgggaggtcggccggagggccgcgcgcatgcgccccgcgcctgctttcaaactccggctaggaagggcctggagctattttcagaacctgttagggtggggagctacggcccaggaagttacctagcagcgtttctgtcacttggaagatctcttcattacctagttagtcctagaaacaaaatgtttacatattcattgcttgttaggctcgctcaaagcactttattggcagtgaaaccgcaagtaacccggagccctcggcgcgaccacggctagaatcagagcctaaggcgtgtgagctcggccatcccacgtctgtcttcacgctcatccgcaagcccgacacaccggggctcccacttaatgaatactgaagagtagggctgtccctaccgcttctcacttccttgttttcatcttttcgttattattaagcgacctaacacaataaacatattaccttnttnntaaaaa

SEQ ID NO: 633607 - DNA, 400 bp, Homo sapiens
  misc_feature (390)..(390): n is a, c, g, or t
  misc_feature (393)..(394): n is a, c, g, or t
tcctaggtgaaggaagatgatttcccccccatcttgaccaccccccagtcttcgccgccaaaaacggactccgccggctatcctcggcccggtaccagttgttggatccaagagaattccggaacccaaacggctcgctcaaagcactttattggcagtgaaaccgcaagtaacccggagccctcggcgcgaccacggctagaatcagagcctaaggcgtgtgagctcggccatcccacgtctgtcttcacgctcatccgcaagcccgacacaccggggctcccacttaatgaatactgaagagtagggctgtccctaccgcttctcacttccttgttttcatcttttcgttattattaagcgacctaacacaataaacatattaccttnttnntaaaaa

SEQ ID NO: 633608 - DNA, 189 bp, Homo sapiens
tcctaggtgaaggaagatgatttcccccccatcttgaccaccccccagtcttcgccgccaaaaacggactccgccggctatcctcggcccggtaccagttgttggatccaagagaattccggaacccaaacggtccattaccgcggctctgggctcgctcaaagcacttattgggtacgagctgattca

SEQ ID NO: 633609 - DNA, 210 bp, Homo sapiens
tggactctgagcactggggaggaactcaggctcagcgatatcgctgtggaggaactctagagctcagtgataatctgctgggaggaacatcagcgctcagggattatcgctgaggtagcgaactcaggctcaaggataacgctgggaaggactcaagctcagggataacgctgggaggaattcacgctcagggaattacgctgggaataa

SEQ ID NO: 633610 - DNA, 844 bp, Homo sapiens
tgtataatactaacagggttcgtcgcgtcattgaaagaacggccctgaaagcacattattgtagatcacggcgttatgttagtcatcagtcattactaacgtcgactcgtcagctcctacttatcaacgaaagacgactagtatgagtgagttcattctgttcgacgacagtcttaatacgtgcgtgcatcgcagacgaagacgacagtctgtcaggcagatggatcgctcctaagtcatccctctactctatctagttgggtcgaggctacgtacaggcatacattcgatcgcatacatggagccagccttctatatctagctggcaaagacagccaacgtgctagcaagaaaggaagaaagcgaacgaaacgagcgctaggtagctggcaagcgagcgatcgctctgcgtgtacgtaccccacacgccgggcgtaatgaatgcgtccaggcagcgtgcctttcgtcattcagtctgcgcgcctgttggtaaggaagatcggtccgggcctgcctgttagtacgccagccggctaaagaaagatgtatgtcaagccagttaagttaggtggctacaggcttttttcagtcagtccgttgtttgtcaacggccggtcagttgattgtaggtagctctctctataagctatctattcgcatgcatgcgtgcgtaagttagcatggtttatatagaccgcctgctacttctatccgtctgcgagaaagcggccgaagggtcggtcagctacagcccagacagcaagtgcttgaaaggcatgcgtcaggcaagcatgcgtgactgtcattcatagtaattaaggttggttctgaccggccatatgag

SEQ ID NO: 633611 - DNA, 232 bp, Homo sapiens
  misc_feature (19)..(19): n is a, c, g, or t
  misc_feature (149)..(149): n is a, c, g, or t
  misc_feature (215)..(215): n is a, c, g, or t
cgtactggctgctcaccanccctggtcccgcggggtgggtactgcgtggccctgtgtacccgaggagggctactggcgtcgagcccactgcctcagaagacttcctttcatctgttcctactgagtggtcccagccagcagttcaggantgccctctcctgggcagctgcctcccctcctctgcttgccatccctccctccacctccctgcaatnaaaaaagttttactgaa

SEQ ID NO: 633612 - DNA, 796 bp, Homo sapiens
  misc_feature (1)..(1): n is a, c, g, or t
naaaatttgtgttgggaaaagccccccattaagcttttcttgtgaaaaaatttcttttccttggttaaaaccggtccgggttaaaacccacccaagttttccgggtggaaacccggccctttttttaaaaaaaaggggtaggccaaacgggggcccctttgaagaattttatcaacgtgtggaattttttacaaaaaccttgggtgcccaaaatttttggaaaaaagatttcccaatatggcctgttttttaacccaagtcctgggggtgtcctaagcaaaagggagtgaacggtcaagccaccctcaaaggtccaaaaaaagtcaaaggccatcgcctttgaacctcctttaggacacaacaaaggactttgttgagaaccctccaggccatgttcttggacgtttgtattacagggtttagggaatttcaggcccccctgtgcactgtcgtgctggaaaatgttctcacccaaagggaaaacagtccacaagaaaatgttggaaatgaatggaatctaaccatccctcgcctgaaaattagggcttggagatttagcaccgggggcccccacatttgagtgcgtggaagaaaatcctctttgagtaaaaaaggctcttcaacagccccatttatcctgggcccatgaccgtggccaaaacctggttccattagcacttgaccattccttacgccccttccccatcgggcgccgtttaatgtcccccactgagaagtcatgtgataaaaacctcccaggttattgttccccaaaaaaatgtatgtcataaaaaac

SEQ ID NO: 633613 - DNA, 444 bp, Homo sapiens
  misc_feature (92)..(92): n is a, c, g, or t
  misc_feature (96)..(96): n is a, c, g, or t
  misc_feature (101)..(101): n is a, c, g, or t
  misc_feature (423)..(423): n is a, c, g, or t
tccttctggccacgccatctcagccaaggaactgtagttctgtcagagtggtcattgggttcttggtgacctctctgaccaaggtccttctngccnggttnctcagtttggtcagatggtcagctctagccagagtctgggtagttctgtattttgtaaaccaatttcccaatgatggagaccactgtgcccttgaaaattagttttatccccttcctcagatatacagtaccagtcaaaagtttgacacctactcattcaagggttttcctttattttttactatatctacatcgtagaataatagtgaagaaatcaaactatgaaataacacatggataatgtagtaaccaaaaaagtgtgaaccaaatccaaatatattttatattttctaagtagccaccctttgcacactgcgtgccngaaggagggatactctagtac

SEQ ID NO: 633614 - DNA, 1642 bp, Homo sapiens
gctgaatactggagggccttcaaaggctctcatcggctgctcagtacagcggggctcaggtccgcgtgctctccgaaccaccccagttccatttaggccagaaccggaatcgacgaccccatgtaatttctccggcagaaatttcctgtccgagcataggtcccagcatatgagggttgcatgattgcgattcctgtgatgtaacgcaggaagcagaacgccgagttgccgtacgtattgctggagcaattgaagtgcagcttagcggggagtaagatacttaccgacgacagtcagtctagccccccagcgatgagctcgccagttcggggctagcagatcttccaggctcgcattctcgcgtgatagatctagcgtgcacgcgcctagcacgagataacctgagccttggtttactcccccgaaccttttgggcgccaatgcattgagcactcatcgaaccgaatagctagggcgcaactagtgatgcagattggccatacaacgtgggacgggcacccggctgtaacgcgcgcgcgaacacattctccgtagggagggcacactgcccttgccgacatgttgcccccatctacgccgttctcgcaacacgcaccccgcaactagcgccaacccttgtgatccaccgttgagcgctgcgtcgtgccagcaccacagcctgcaacgcactgcgacaccctcactctgcgggtccccttggcacccccacaatccccacccaaccgcttcgtggtgctcccctcaggccaaacacccccctgtcgctcccggcctcggcgccacgtctcccttcgacttgacaacgccccaacgcgcactataccgctaaacgagaacgacctgccattataccgttctctatactccctgggccgcccaagtgtggtgccaccatttatcatcccacgccaacagctttaacaccaaaataccgccggtacctggcgcagtattacccattcccacaccggtggtgcctacatatcaaaaccaccagcgaccacccccacaaggagtcatcccccgaggcgcgccataggccccaatattgccgcgcgcgcgaaaatggcttgcaccacactcactgtcctggctgcgaaccgacaacgcaagttgcgcccaccccagacctctaccggaactcgcactctcacacacaaacgcttcactcggcacaagccatcgaaccccgcgcaaccactccaacacgacaacgcgacccacacaaccccccaaccgcgcccacacgcgcaccgacaacccgccgcccccccaacaccgcgagccaaccgacacgcaacaccgcgcacaccacaacagccacccaccacgcagcgcgcccatgacaccgcccgcgcgaaacaccggtcagggcgcacagccaccacaaacaccgcgccgggcaccgtgacccaccactacgaccatcccactcgccacacgccaccggcacgccacctgcgcactgccaacactgctcccaccccacgacgaccgcccatcggccctagcccgagacgcccacgcccggcaccaccaggcgaccagcccctccacgcaccccaagaccaggccacccacgtccaactaaccccctccgtggcccgctcgcgcccgcacc

SEQ ID NO: 633615 - DNA, 188 bp, Homo sapiens
gagtgcaggagcgttcattggagacttaatggcagcatacttcttctctctgcagctactcggtacctcttcctttgcttctgcagcatctatcttctcttccttcatggtaccggtcaatgcctctgtaatgggtgtcagggcctctgccatatctgccttctcatcctccactttggtttcctcta

SEQ ID NO: 633616 - DNA, 377 bp, Homo sapiens
agacggaaagcagttgtgagagccacaggaaaagcagaaggagaagacgaacacgacaacgaggaaccccaagaaagagacgacgaagaaagacaaagagcacagggggcagtgaggcacctctctccaattctgagaggccaggcaccacacatgatcgatcaatcccctggtggaagaggggacgcggggcccgggtgcaggagggccgtctgcagtgtgaagagtctgggctgtggtgctgtccggggtgggctggactccttcctgtgcctgcccgcgactgggggggccccctgctgggtgttggccctggggactgctcggcgtgaaccgggcgggggggggcgcaaggtctcccgggcgggtttttacgg

SEQ ID NO: 633617 - DNA, 250 bp, Homo sapiens
  misc_feature (206)..(206): n is a, c, g, or t
  misc_feature (212)..(212): n is a, c, g, or t
ccccccgggggggggggggtttttttttggggccccccccccccccccccgcccccttttttttttttccccccttggggggggggggggccccctttggggggcgggggggggggggccccgggggggggggggggccccccccccttgggggttttttgccccccccccccccccccttttggggggtttttcccccccctttngggganattttttcgggggggggttttttttttttttttttttt

SEQ ID NO: 633618 - DNA, 268 bp, Homo sapiens
caagtgtggggagcgtcgcgcccgcgctgccgagccttggatgtccccaagagatatctttcccacttttatatcatctcagggcggtggaagggcttccggcttgggtgccttactcaatctcggtgccggggagcaccttttccaagcgggcttcatggttggctcagaattctcggagcggcacagttccagggaggggagcgggcacggtctgcattctgagggctagtatgtctgtgacttcccagttggctcagaggggtac

SEQ ID NO: 633619 - DNA, 905 bp, Homo sapiens
cgagcctgacaaaacggccattacgctgtgactagccccgtccacgtctttccacagggcgttatcacaaaaagtcggaatgacgacctggggtgtgcactatgtccaagtgggctgtcccaagtgtcggcacgcccagaccgctggtccgcggcggcgcacacgaaagtgttccggccacgatccctgcatcgtttgtgcccgcgcctctcctagcgcgtttctgcccacacaatctcctccaggcgtccccgcgtagttccttctgttctgcgtgccccttccctccctatttgtggggggccctctttgccgcacgccgtctttttcaacaaagtccgctctcgtcgctccttcctccccctaatgctttttcccctgcaactccctgtgtctccccacggccttatttccgcctcccctggttgtcgcgcaaattgtcgtgccccccctttcgggtatccctccgaacgtcaagaaccccctttccgcgcagttagtattcttatcacatcacgtctctcttgagatacaacgcaactatgaagaatggctagccccctggcaacatgtttcctcccctcaatattagagaaaaagtctgttctgccgcactttcgtgcgtccccgcagtcccgcgtggaagcccctggtattgcagatcattctgacagggtggcatcacgccctgttcatttcctgctctttatgcgcaagtctctagacgggaggagcacccagcctctctggtgtctccgcgttcagtgcctccgccgccccttggacgcggaggcccgtcgtggttgatgcccagtacaatccctcaccccttgggtggccccagcaggggcggattcctggccccgggtttgagcccccccgggccccaaccaacccacaaaaca

SEQ ID NO: 633620 - DNA, 355 bp, Homo sapiens
ttgtttttcccttttcccaaggagggtcgtggggcggggtggggccttttttttttgtggggtgaccccgggccccagatgcctttttattggggtttttccctttttggatggctgcaaagccaggtgggggtttttttttgggggctcggtttgttttggggccttgccttttgtgggggggggggggtttctttccttggggcctgggtgtgggttgttggggggctttgggggggttctttttttttggtttcagggggggtttccggggggggggttttgggtgttttgttttttttttttaggggggcgggtgggaattttttttttaattttaacccaacccctttta

SEQ ID NO: 633621 - DNA, 243 bp, Homo sapiens
tgggcccctaattttgggggtttttttaaaccccaagggggaaaaaaaccccctcccgattttttttttggttgggtttggcggggggtttttttccaaaaccccttttttccccccccaaattttgggggccggggggaaattcgggggttttaccctttttttttcgggtcctttaaaacccccaacccccttgggttctggggccccccggcctttaaaaaaattccccggtttttttga

SEQ ID NO: 633622 - DNA, 118 bp, Homo sapiens
acccaaaataagaagaaagaaagaataaccatatctcatatcacctaaaatccataatagcttcagagccctagaaataaaagggctctgaggtcaacccaaatcctctcctgaccat

SEQ ID NO: 633623 - DNA, 174 bp, Homo sapiens
tagaggatcccctgacgcttgacatgtctgtcttcgtcaaaaaaaaagggtacctctaggacttggggtgcacgagcggttacgatcaggatgtctatagtatagggggattccttatcccctccttatcctccctgagcgaccaccccttcccccacaccagacaaaagtcca

SEQ ID NO: 633624 - DNA, 348 bp, Homo sapiens
tggctcccccttacactttgtcacagctactagatagtgctgatcggagaattgcttgaatccgggaggcggaggttgcagtgagccgagatcgtgccactgaactccaacctgccaatagagcgagactccgtctcaaaaaaaaaaaaaaaaagaaagaattagctttgaaaaaaataccgcacttcagaggaaagctttttttctgcttggtgtctttacaaagaatagaaatatttgaacctatgttttctaccgatggtgtggataagggtgagctgactgaggcatcgctcaagctggggggtggtgtgtaaaaagcacgtggagccacaagaggcacctccg

SEQ ID NO: 633625 - DNA, 171 bp, Homo sapiens
aatcccctgtgatcgtactaggcggcccctcggggcccccgcagcagcagcagcagcagcagtcggtgccagacccggccgggcggccaccagcggccctcggaggtacccaagccccacggccgagctctggccggagatcggccgccacggggggacacagcagcggcc

SEQ ID NO: 633626 - DNA, 1751 bp, Homo sapiens
  misc_feature (1733)..(1733): n is a, c, g, or t
cggtttcgtccgggcacctagtcttctcgtgtgtcgtccctcactctgtattgtggctgtgtgtgcgtcggccctgcgtgttcggctctgtgtcgcatgtgcggtgggtgcgtggtagggtgtgccccgctgttgtgcgtggctagcggaagccgatgcggggtgtgtgcggcgaaggtgttgtctggtcacgcgtgctgggtggcttcggtagttatctcgtttcgggcgtgctcggagtgggccctttaatcccttttgtagctctcctcctttgtcgttgctacaggtcgtctgctcaatggctggggttgctagagcgttgtgcttgcaagtggtgggcgtggtcagctccttcgggcgctttggcgtcagcgttcaatccaatatttgtctcctcagtcaagcttggattctaaggctcgtgctgtcgtggtgcgagacaccccctgagagggttgcttctaacaattttggcggctgatacttaactctagctgccctccaaagggctctatagagtgccgcgatgtgggagtgtggagctgtggatgttggccagtggatgactttgaaggtgcacagctctgaatcctgcagctgctcctacgttggtgcggcctgctatttgctacttgctaagttcccgctagacggctcggttctagttgctcggctgcgtgctcgtgtaaagtggggagtgtagcagctggttggtgtgtgcgtaagctggggtgtgcgtagtaaagtagagtgtcaagagtcgagtggggatgcgtcgcctacatagggggcaatctgtaattggtcgttggggcgcctgaggcaggagttcttctttgttgggaagttgggtgtctgtgagtagttagtggaatacgagatgttgttgcggttgcgtggttgtggcaaaaggggggggtttcctgcagtttgggaagttccgcacatagggaggacgagcttcgacgcagaactacggtggctttggtccgtggtaaagcccgtccgcgagagcttgttgcattgccctatgcggtagccagtatgaagcgggcgaagacgccgtcgtacacaacgggcgtgtttggcatgggcacgagccgtcggatagagcgtctgcaatgtggtttgatagacacgtcggtgtcgcgtctcattctgtgtctaggttgggcctctttcgtcactgtgttgtgtgctcggtgttacccctgtccgtgagaggatgcatacggtggaggtgtcgaagttctacagagctttcgcgttgttgaaaggcttctcattagcgctgccctatagactacataccttgacgggttctgactctctgctactccagcatggccagggtacaagctatggtcatggagcgcacaagacatctcggctgacaagtcgactcgtgtgctagacacgacgctgacaggctcttgatcatgaaggtctatcggtcttaaaggacagcacggtaacacctcgacgtgtggcgactgccaagaatgtagccaaggaagcgtagcctctcttaatcgctggcccaggcgctcaggatttcattttacttacgcagatacgctagtgtattgggttgggaacgggaagagagggataagaaaatacctttcttcctgtgctaaactcgcaatcaacaaacatattttgagtgcctttatgtgttccttggcaccctgttgggtattgggtacttggctacctgttgggtattntaaccggggtgagccaga

SEQ ID NO: 633627 - DNA, 904 bp, Homo sapiens
  misc_feature (148)..(148): n is a, c, g, or t
agcggatgctcaccattctcaagcttgaaaacccacctgcaatcatttgggcggggggggggggcatcttaaagcgcccaggtaaactgggtctgcaggcagcagctgtcctttcctcgggaatcttcggcgtgaggcttcggtaggntggattaagttgaatacgtgatttggtggcaggaacttccctttcagccaatctccgtgtctcccggggagggcctcgtggaagaacccagttatcagaaagaatctggtagtttgccgtggtggcagaagatccgacccaaacgttgagcaaaaccagtttcaaacgaatctcgggttttgaaactccccgaaggttcaggctgaaagagttcaacaaccagcaagggtgaagactctaggagttcgtgtcccccttgaaccgtggtggtggacccgtgatcaaacctcgagggaagggcggggagaacacttcccgggtcagctgtgtaggaaagccagagagcatttggagaagaggctgaagctgaattttggcaaacacacaagccctctgattttccccagagagaaggtttttcctcgtctacattcccttggaaccacctggggtgaggaaaaacctctatttggggcaagcaggaaagaaacaggaatctatggactggaaagagggtcgggtaaagaggggtcctcgccaggttaaggggagggagttttcacacctctggtgttaaaatcccaacgttggattcttgaaccctttgttagatagaagtctgggggacgcaggttcaagagacacggggtctgggcctcctgcaggcgggtgctccccaacggccggggtcaccgtctgaggcgaacacattgtctcattctggccgattggtgaagcacgagtcccttctctgag

SEQ ID NO: 633628 - DNA, 875 bp, Homo sapiens
  misc_feature (26)..(26): n is a, c, g, or t
  misc_feature (492)..(492): n is a, c, g, or t
  misc_feature (510)..(510): n is a, c, g, or t
  misc_feature (577)..(591): n is a, c, g, or t
  misc_feature (599)..(599): n is a, c, g, or t
  misc_feature (603)..(603): n is a, c, g, or t
  misc_feature (615)..(615): n is a, c, g, or t
  misc_feature (630)..(630): n is a, c, g, or t
  misc_feature (633)..(633): n is a, c, g, or t
  misc_feature (635)..(635): n is a, c, g, or t
  misc_feature (640)..(641): n is a, c, g, or t
  misc_feature (645)..(646): n is a, c, g, or t
  misc_feature (680)..(680): n is a, c, g, or t
  misc_feature (685)..(685): n is a, c, g, or t
  misc_feature (721)..(721): n is a, c, g, or t
  misc_feature (760)..(760): n is a, c, g, or t
  misc_feature (785)..(785): n is a, c, g, or t
  misc_feature (787)..(787): n is a, c, g, or t
  misc_feature (870)..(870): n is a, c, g, or t
acggagctctcagggctggcgaccancagcagggcaacgccatcctatcggaaccctgaggaccagccccagctcaggacggctggcttgccaacatccaaggtgcagtggtcatcgcctttgtggtctgctggctgccctaccacgtgcggcgcctcatgttctgctacatctcggatgagcagtggactccgttcctctatgacttctaccactacttctacatggtgaccaacgcactcttctacgtcagctccaccatcaaccccatcctgtacaacctcgtctctgccaacttccgccacatcttcctggccacactggcctgcctctgcccggtgtggcggcgcaggaggaagaggccagccttctcgaggaaggccgacagcgtgtccagcaaccacaccctctccagcaatgccacccgcgagacgctgtactaggctgtgcgccccggaacgtgtccaggaggagcctggccatgggtccttncccccgacagacagagcngcccccacccgggagccttgatgggggtcaggcagaggccagcctgcactggagtctgaggcctggnnnnnnnnnnnnnnncccctaanccangtttctcattantttttcccgggcctntancnaaatnntaannacccctcccccatctcctcttttaaaaccaaaanaaaanagcgctcctctcccaaataggaaaaaggcctctaanaaggagaaattagtgtgcggcaaaaggcagttttctttnttctcagactaatggatggttccananaagaaatgaaatgtgctgggtggggcgggcctccggcggccggctgctgttccatgtccacactctgaggctgcacccctctntctac

SEQ ID NO: 633629 - DNA, 343 bp, Homo sapiens
ttagaagaggcagaaatgatagaaattgattattttttcatagcggtattcaggatctcgatcaccttgtgcccgtgttttaaacttcgtcatggtaaatcctggctcttcataatacatgagtaggtcccttggtgcgcgtgtcacttgcgctttaatagtgttgatgtactcagtgccgtcgccgtgtactacattagagacacagaacaatgtattagaatttccagctgtgggtttgaagacttagggggacatccagaacgtgcttcctctttcagacggtgtaaagtcccctggaattacacagctttagtgctgagcttttaaaaatgggatgcag

SEQ ID NO: 633630 - DNA, 505 bp, Homo sapiens
  misc_feature (89)..(89): n is a, c, g, or t
tgtgagaggtggcgtgcgtattctggcatggacagaactggcaggagaagtgacgtctggtctgccgcacacattctcgccacttcttntgtctgagaactccagcttcactacttttctggacccgagggctggcggcgttcagctgtgaccagacctccatggatccactccagaaacggaatccagcatcgccttccaaatcttccccgatgacagctgcagagacttcccaggaaggtccagcgccctctcagccttcgtactcagaacagccgatgatgggcctcagtaacctgagccccggtcctggccccagccaggccgtgcctctcccagaggggctgctccgccagcgttacagagaggagaagaccctggaagagcggcggtgggagaggctggagttccttcagaggaagaaagcattcctgcagcatgtgaggaggagaccccgcgatcacatggccccctatgctgttgggaggaaagcagaatctcccat

SEQ ID NO: 633631 - DNA, 136 bp, Homo sapiens
cttctaaccaaaaatcacaaggtcatgaaaataccatgtacatgaaaaaagcacatgacttgattaaactctactcattatggtaagtggcaaactagtaatagaaggtccaggtatgccagaaggtccaggtatg

SEQ ID NO: 633632 - DNA, 322 bp, Homo sapiens
gtatcgttacgtgctctgtgcttgaggactgcggcttcttcgctgatttcttgtgcctatagcagtcaggaagggcgcgcaggagcagtgggcagaggtgcttacccagacccctagcccatcccactaccaggagatgcagctcgaccctttctgccgccctccacaactgtatgaaggtgctggggccggatgggagacggagggcggacccagtgtacggtcctgagttggctctgtggtgtacttggatacccaggccccattcaagatggaggaacacgccccttcactcctcatgaccagcaagtactgtgtgact

SEQ ID NO: 633633 - DNA, 700 bp, Homo sapiens
tgtcgatacctatttcaagcgatctggtttaccatggctaggatggccgacaagaccgagcgtttgctcatggacaggacgagccatttgatcgtggtcattaagatcaagtccatgcctatgaccgaactcacgtccactcgcttgtagtccaatacactctatcaatgactcgcgattcatgattgatccagagcagcagtcgacgcgaacctcagtcgtgacgcgcttccacgcagcagatgcatcagttacagccctcttccagcttacctgatcacaatggcagcgcgatactgccctcgccatagccaagtacacgagcatggtcaagctgtcaaccgactacgctggcgattcctgcggtcacaatctttttccgtgcctccctagcactatgaacgtgtctgccacttcactttcaactctatactctccgccctcccaccaattgcaccagaaccgcttaccacctctcctactatgcccttcctacaccgctccctttactcctctccctcttcccctccctcccccttcctccttgtgcccctctcactcccaccttcgcaatcttccctcggctacctctattcatcccctacttctctttctccttgtctcaaccacctcttccttcctcactccccccactcccccagcctgcctccgccctctctgtctatcccacaccctcccc

SEQ ID NO: 633634 - DNA, 521 bp, Homo sapiens
attgatcccctgtggccgatgaacgcgccccagaagtcggcctgcacgtgcacgaggtcgaccggcgggcgtcgcgtcatcgcgcgatcgaggaatcggtccgtcgctcgtcccggccagctcatcgagtactcgcggtccaccgtgatcggcagggacggcagatccacggatgacccgctggaggtgcgccggacgtgcatccgcggcgcgacgaccgtgacggtgtgccccgcgcgttcgaggaatgcgcgctgcagccgcatcgacacctgcgcgcccccgagggagtcgaggtgctgatcgccgaagaagacgatgtgcatgtcgggccgctcgctactcgggcagcggctcgtcgcggtacagcgcctcgaaggtgtcgagggtgcggttgatgtcgtggatcacgacgccgtcgagcgacgcctgctgcatccgctcgtactcggcgggctcggcggtgagcacgtccgtcaggcgggcagcgagttcgtcgacgttccccggctcgaacaggt

SEQ ID NO: 633635 - DNA, 227 bp, Homo sapiens
tcagtcggtacccctcacggattactcaaggtcatctgatcaaatggatagttcttcatcttctccatctctttctcatattctacaatcctggcctttgagagagacacccactcagcacaagatttcacatcttctttttcttcggcatccacctgggcagtatatcttccctctctcacgtcactccaactctgacactgactccattgtcacgtatccttttc

SEQ ID NO: 633636 - DNA, 576 bp, Homo sapiens
tcagagagggtctggctcagtcgacgcagagcgtgaaggcagagtgcaggggcagtgatcacagctcactggaacccgtatctggcaggctcaagagattttcccaactcggactcctgagtagctgggactacaggcacatgccaccacacctggctaattttttttatttttattagagatgaggtctcgctgtgttgcccaggctggtctcaaactcctgagcttaaacgatcctctcaccttggactctcaaattgctgggattatgggcgtgagccacaacaccctgcccatcgtgatgttttgatacatataatgtatggtgatcagagcagagcaattagcatatccatcatctcaaacatttatcatttctttgtattgtgaacattcaatatcctccttctcactatttgaaactatgtaatatattatcgttaactgtagttatcctacatagctgtagaacactagaatttattcctcctatctagctctaatttagtatacttttaaaaatctctccctattgcctcctccttcttacccttcccagcctctaatatcctcgtt

SEQ ID NO: 633637 - DNA, 166 bp, Homo sapiens
aacgggtagctgaagggatgggatgtcatgaaggaaagtgggtagctgagtgcttcaaagggcctgcatgggacaggggtttagggtgaagtggatgaggcccaataaagtcttgtggggtaaacgatgggaataaacatggagaaaggaacgacggaggcagtgt

SEQ ID NO: 633638 - DNA, 256 bp, Homo sapiens
cgcaaggctcctcagagatcacactgtagcagctggacactcaaagatgaacggatagaaacatcagcgtccattttggactgtgcctgtcttgtggctacgcgggttaggggtcccggatgtctagtgtgcagccctacagtctggactccctttgtgagcccacacatgccccttccccttgctacgcctggcaggctgtctccttcttttctgatgctgccctccatctgcatctgagaccctctcccttggc

SEQ ID NO: 633639 - DNA, 250 bp, Homo sapiens
tactgtggtgtaccgtgatccaagccaaatctgggaactacaccacagctcacagcaatgaggatccttaacccactgagtgaagccctgggatggaacccaaaacctcatggttcctaattggattcgtttctgctgtaccacaatgggaactcatccccaggagttgttaatgagctttgtgggtgaccaattcctcctgtgcctttggtcctgctcctcatttttcaggggcactgaggggcacagg

SEQ ID NO: 633640 - DNA, 131 bp, Homo sapiens
gatgcacagtcattcccttgtgatatgtcaagtgactgattggtgaagagttatactcacaaattattataatgattactaatatattttttccatgtttcattgcctgaatgaaactgtttaccacggtt

SEQ ID NO: 633641 - DNA, 353 bp, Homo sapiens
ggtaccgattgatgtgtgggagcacgcttactacttcagtataaaatgtcaggcctgattatctacaagctattctgtgcacatgttctcaactgagagtaatgtcactgataatcatacattgctgtgcaaaaagtaaaccacgatcgttatgcttgatcataccctaatgatcccagctagataatgtcctgtcttctaatatgtgcatcaatcctgatagatcctgtaaaccctatctggtcctggctaatttttgttgagacttcttgcattgaagagatcttctattttccatttgtgtgaagttgtgtgcctgttactacaagaatctgtcctgctggcgatcccct

SEQ ID NO: 633642 - DNA, 398 bp, Homo sapiens
agagatgagcgtatactagaacacatatagatgctccaaaagactcccagacagataagctacttcagtaaagtttcagggtataaaatcaggaggcaaaaatcattagcatttctatacgccagcaacgtccaactcgagaactaaatcaagaactcaatcccatttacaataatcacacacaaaacatacctaggaatacatttaaccaaggaggtgaaagatctctacagagagaagcataaaacactgatgaaagaaactgaagaagacacaaacaaatggaaaaacattccatgcccatggattggaagcattaatattaaaactaccatactgtccaaagcaatctatagattcaacacaattcctataaaactaatgtcctctgtcatcag

SEQ ID NO: 633643 - DNA, 162 bp, Homo sapiens
tacgctgcggctggccttctttcggcagctgcttgcaaatggtgcgccacacttcgcgcggcggtgacgccgtcgtcgcgcaggctgacgctggcgcagcccagcacgtactggtagccgccgcggcgcaggtattccgccaggccggaccacagcagcatg

SEQ ID NO: 633644 - DNA, 473 bp, Homo sapiens
gctgttccagaggccaaaagactactcaccttgacgccctgctcgaaagttagctagttccgggatggtgaaactgtggctttaagaaacggagtcacaactggctgcaagcagcaagggctgacagcagaggtagagtcctggccctgtgggtggcagcaagtccacatggttaggaggttaaagagttcttattggccgtcagcctagctgcttctgctgaggcagaaccctgtgctcagagcctcttggtttagacccatgtcctggttgagaattccacctatactgaagtgaggggcggaaggtacgagggagtgttggagtagcccacctgaatgagtatggggccttggctctaggcgtctggagctctcaccactgaaggttctaggatccctagtcgcaggtgatgacttccttctttctgcctgttccagatggcaagatagggaatgagcaaacgtgcaagc

SEQ ID NO: 633645 - DNA, 351 bp, Homo sapiens
tgactattccacaggggagactggcagagcatgtatgcacgttacaaatttaattcttaactgtaaaaacacttgtagtggagggggaagagaaatagtcaagagtcttaagaacgctccttaggagccataaattcaggcaagctgtagggcaaggctgctactgggaaatcaagacaataaaaaaatgaaacaaaactctaaagcaggagaaaatcccagggagcagccagctaaaggggaagtcctgagcacaagttacggctgtgaatttttaaaaggcaaaagtgaagtccctggatgtggtaacctgcgtcctgaccatctgccataacatttgctagtctgaat

SEQ ID NO: 633646 - DNA, 766 bp, Homo sapiens
cgggcttccggaaaaactggggaagggtacccaggtgccttttgaacgctcaatcttgacatcagattcgacctatagttctgaccgtactaaagagaggactactgtcgaatggacacagacacaagcgctcatgtctatgcgagttcttggcaaacctgagccacgcagctcagccgtgtcccagagagtttgccaggggaaccggagatccttcctcaagcaccctgctaagtgctcatctgaaggatcttggaccgaagaaatctctctgatgaatgatgacttgttaccaccagctccttcgagaactcatagaacggaagactcagctccttggatccttaacgatcaggtggccatgggaaggcagtggcttgcaatccagaagtgtacgaagcataaatcctacaaataaagtatgagtaggaaagccagcaaaggcaggaaacttcggtttcatgtccttagcaagctacctgacgtttcactggcacctattgaccatactacagactgaatgatgatgccaggacagaactgtaccgctctctttgttggccagctccaccctacccgagcgaaggccacggggattgacatcgcccacctccgacaccacagtgggcgacatgggctaggtgcgactgcctggtaccagataggaggaaaaccagtgactgttaatggggtatgagctagatagggaagaccctggaaagatgctagcgttccgaaccgcgcataacacacgggaggcgcgtcc

SEQ ID NO: 633647 - DNA, 501 bp, Homo sapiens
atggaagagaagtcatgagagaggagaagacgttatcccgcatcgcgtttatgcagcaggacgtgctggatcgtgcgagggagcaattgagtgccactgctgaggagatcagggtcccaagagcattgaccagatccataaggaggctgcgatggcagaacatcgagagcacatcaaagtgcagcagctcatggccgagggccgtgaccaagcgtcggggcggtcctccaggccctcccatcagccgtggacttccccttgttggatgatggtggctggaacacagttcccatcagcaaaggtagccgccccattgacacctcactgattcaccaagatcaccaagcctggttccatcgatcctaacaaccaggtctttgcacctggagggcgactgagctggggcaagggcagcagcgacggctcaggagccaagccctcagacgcagcatcagaagctgctcggccaggtactagtactttgaatcgcttctcaggcct

SEQ ID NO: 633648 - DNA, 1219 bp, Homo sapiens
ggcagctgcatgaaggaccagcagaaatgatgcctgatggcggaagggctgagctgtgtacctgaccctgctgcctgaagctgattccctccgtgtgcagtgcctgtgtgagtgtgcttggagctgtgctgcctgcgctgagcatcctggcccatggtatgcacctatcgatgtgaccatgcagctgcttctcatctgtgcccctgacaatcctgggtagagcttgtgccagacgccctctgttacgcaactgtggcatgtaactagcgcagagccacactactgtttgtatctgcttgtatacacttgtgtgaccatacatacgcttgatacttgttagttgagtagaccagtaccgtcatactagctttgccttggattgtgactacttgcgcttgatcgtatattatactgtgactgacacttgctttaccaatatacttctacatctagcttgacaaaccattatgtgacatgatacccaaagcacttattgactagccgtacctttattgaggacctggcacgagacgtggttcgcatgacacgccatgacctgaccattatccacgcttatttgccctcacattggcgccatatggcgaaagtggacaacttaccttcaccctattaaacacacatataactttaccatttggactcttagcgcctttggcgattggccatggcacgccatccgtggcaacgtggagtcatattcccttgctcgaattgcccattggcgcggtaagacccgaagaggcacatttggggtattgtgcacccaaatccgggtgacatacccacgcacagagaccattgcgcccattattacctaaatcgcacagcaacttatgggacgcggcccttgcctcggcaaccgggagcggcgaactatgccaggcactttggcacccgcattgagtcgacagccaatcacaaggttcgatacgagacgcagagtaaggacaattacacatgtattcgcgagacgacaccttatgaagactaggggccaattaccccactatgatgacgaccctacaagcactaaggaccaccagaaggcgcccctatgtaagaaacaatatatcgcaattatgtaaccatgtaggatagaagagggtatacatatggatatgcgaatcacgtgacggccccaaccaatcgtgtagcacaatgatcagcaaataacagacatattacacactgtggaggg

SEQ ID NO: 633649 - DNA, 1230 bp, Homo sapiens
  misc_feature (714)..(714): n is a, c, g, or t
ggagagagagaactagtctcgagttttcgttctttttctcttttgggggacctctgttttaatttggagggcaccaaaccagcaggagggcctccaatgtgtgtggggggtggcggccctgggcgcacggactgtggctgtggcatttggggcgcagggccaagacccggataggtggcaagaaactccacaacccctcgaaaggcatgccctttaaagtgtgcattcgcagcggtgttgccaaggccatgggggctaaccaggggacatgaggagcctcctcacagggcttgtgatggaaaacaccctctcacctatcgccacaaaaactatgtgtgcccccccagagacaagccgagcgcaagtgtgcgtctctcacctggtgacacctgtgcaacaccccacgggggtttatcaacagggcacagagcgcatacacatgatatcccctttagtgttgagacacagcgggaatgtatacccgcgtgtggagacaccccctgtgtctccaagatcatatgtctcaccagtggggaaaaccatgtgggctcgccataagagtgtgtgtgagacaccccgattagagagattctaccccacgggggaagacaaccccctcttgagtagtcccgcatctgcgacagaaaagagcacccccccccacaaagagggcgacacagagtcgtccgcaccaatttactaatcttcacaganccccccaccaaggaaaaaacgtgtagtacgtggcgacacatgtttgttgggaccccgccccaaaattgttgtggggggacgccaaagacacgtcgcccacagggtgtcgtcccatggagcagcgcaccaaagggtgtgacagaatagcgtatcgcccacacgggagacagagttgttgtggcagcccacgatgacacctcccgtcgggagcgaccccaccacaacggtggcgacgacaacgagagtaccatcagaagggagcacagcttattcgcacaggaggaaggccaaccagcaggggggggatctacatccacgcaataaataacccaccagctcggaagagaaggagaacatccccgaacagaaaaacaggggggcgcatagctcgcgcgcatcgtcttccccacccttagtcccccggtagcaacaggcagcggacagggcacaaacaatacaggagagggcgcaaaacccaacgggggccaccagttagcgagaccagagtgaatgaac

SEQ ID NO: 633650 - DNA, 975 bp, Homo sapiens
agcggggggggcttatgggctgaggcgcgatggcaggatgtctgggctgggcctcgtggcgagagcgatggggcgtgcaggtccctagcatgtcttgctcagcgctgatgctgccaacatggcgcccgcatggggacatcgtagcttaccaccattcgtgcgatgcaccggagaatgcgcgtgggggggttgcgcatggataacttccacgatggcagacacactgggtcactcgggtcgatacctagtcagtgagcacaccacgatgttgtggaataatgcacgaatggaaggttcatatccattggcccctcgtaggcgccctggggtctgagaggcagtgcatcgtgaagaaaagttgagagggaaccacaccgcatagggccaaatggatagggctcggctggtgccccggggcgacgttaccggtcttgccgggagggcgtgccgcctatactaaatgctttctagaacttctcgcaggtatctggcaccaggattggatcgactccacaagttcctgttcttgccattgtccatgatttacttacgcatggagttgtggttctgctgtgcgtgaggatgggccaaaacctagtggtgttggaggtcatcggagattacaggggtgtgggggaggcagtgcaaaacaatggtaaccctgaagatttgcttgcataagaagaatagaaggtgaccaggaggctaatagggttcccagagcttgaggctagttgctaatgagatcaggtggacatgaggactttcaagaaagggacgcaaggaattgaccagaagtgtaattcgtggaatgacgctgatgtctcggaagttgaacgaagctagaagaagcaatcagagcagaggggtacctgatgggggggtcccagtttgggtcagaattgggtgcatcctcaatcctctaactggcatatggcataatgcgtcaagctgtgaagttgtttgagggccaga

SEQ ID NO: 633651 - DNA, 670 bp, Homo sapiens
ggctgctccgcccctctctgtcttctctgcaagtgggagtcagctctcctgtccaaagatcctcacacccctgataatgttcgcctgctccatagtttgtctctcatcttcccttccttggtcaagagtcaccttcacagctgactagatgccgtaccgaatattctgctagtggttgactgataatccgatacggcagatagctgatcagatgacgatgctctaccagtcatcttggcagtctcatgtcccgcttatccttcagcttgctctcttagcctgaagcattccaaaaccatgcgccaatctttcagagtggacgatctgacatcacgctaagccaacgttcatctaggtagcctcgagcgcgcatgcgcacaggtatgcggcggatcggcatggctatcctgaagcggcatggcgatatcggaacctgtcgatttgggcgaagcactccattcacttgcgattaatgccatgagaacccatgtgctctgataggcaactacgcctctatcgtccgtaccgctcagttgctggtgcttttgccctcgtcggcaacggccattgcgggtgcttcttttgttctgtactggtaagccttttcgtcatccctcttttgcccgatgtgaaagtgagccggtttcccaacctcaccataagttcctcc

SEQ ID NO: 633652 - DNA, 143 bp, Homo sapiens
ctctggctggatgatccactttaagtactccttgtcctggctcgatgatccactttaatactgcttgtactggctggatgagtccactttgaatactgctcgctctggctcggagtagatccagcatgcatagctccgaggaa

SEQ ID NO: 633653 - DNA, 1330 bp, Homo sapiens
gcagaggtgtggacgctgtgtatgaaaatgtctttcctccaggtacccaatgtttcttcaccatggggatgtggtccattggtgcaggagccctgggggctgctgccttggcaattgcgtagcttgccaactatagacgtagtatctgtacaagccccagaaagcgtgccctggagtacctggaggactatagaccatgaaaaatcacctggagacggaacctaaggatctttcaatagacaacatgtgtagctatgtggaaaatcaatgcgtagactgtgattattgcgccgttgccgtgcaggcccagcgctagtattccctctgctcgagagcgaagctgtcgcgtaatctgatcctccctgaacaacagcatgattgtgcacctggagcttggtgcgtcccgccatcgtaatgcgagatgcgtccaagggtaggacactcatcagcgtcacgtgacaggtggcaggcattatcgcaggtccttctatttctcaactagtggaccgaaatcatttcgcatggaattggataaaagcagaaacagagctttcctagtgggataccagtaaacagggcgtgcatagcattgcattgtgtctctcactgggagaattcttaatctcggtgtcgtgggggccagattgcttgcgttgaccaaaacctctccatgtccggacagcccgtggtaacacttgggaagtgcgtatcctcagtggtcaagaacccttggccgaacacgggaggcaaacgggctcttccaaattccccttatgaggcgaagttggacaccttctaattccggcctgcggcgtaagcgagtcattcctagcggcacaacacgcacctagtgtgaattaaattatgcactttccatgtggagagtaccgaccccgtaacattgacacagccaccaggcaagacttctgctgggaagccacgcaggcaaggattcatacaaccatcaaacctgtatgccatcgctcttacctgccgccaacggactggccttaacacacaattgctactcccaaaaatccgatcaagcgaaacatgtctggcgcgccttcccatttaggaatacgatcgacactcgcaatttccggtaggcttgaacacacaccttgacgcccaaggtcgttcacaggtgctatttaaaccgcaaaggggagagcatattcgcgccccgtgaatggatcacaattggggacatagcataatttggcgtaaacccgctaatcagtaagtattgccgtctatatagtgatcacagctgtgcgtgacaaaacacccccacatctatacataccgtgcgtaagcattacatgac

SEQ ID NO: 633654 - DNA, 332 bp, Homo sapiens
cgtccctagtatgcagactgcttcgaacttcatagctgtacaatatggttatgtttgtgctgacattacaatatatttccaatgatggaacaaaataatggagaaccctggtaaggacctggtacttttgcttctcgaggaactgtaaaccctcgacgtactgggaatcgctctctgctgatcttacctggaagctaagcctgtctccaccgcccgaggcctgcgccggttggctcccgccgcagttgcgtttgcttctggaccttgcctgcgggtgacggagtgcttggtaccgagcccgctcctttctgtacacctagcgctgcccgccc

SEQ ID NO: 633655 - DNA, 140 bp, Homo sapiens
taaaggaatatccatatagtaccaaaatgcttgctcgcagtatgtcaccatcacaaatggtagcatcaaccccaccatcatctagcagcagaaacatagcagctgcatcctatctggcagcaaagtcacggtatgacacc

SEQ ID NO: 633656 - DNA, 167 bp, Homo sapiens
tgtgaaagcacacctttactggcggctttacccgtcgaaaccattggatcggcgtcatcctgtaaaacacctaccatggacatggttttatgatgcaataacacagaacatccaggctctagtaactctttatcgacaaaggataagatagatacataataatcagg

SEQ ID NO: 633657 - DNA, 902 bp, Homo sapiens
  misc_feature (5)..(5): n is a, c, g, or t
  misc_feature (66)..(66): n is a, c, g, or t
  misc_feature (70)..(70): n is a, c, g, or t
  misc_feature (78)..(78): n is a, c, g, or t
  misc_feature (81)..(83): n is a, c, g, or t
  misc_feature (85)..(85): n is a, c, g, or t
  misc_feature (88)..(88): n is a, c, g, or t
  misc_feature (91)..(92): n is a, c, g, or t
  misc_feature (115)..(115): n is a, c, g, or t
  misc_feature (124)..(124): n is a, c, g, or t
  misc_feature (126)..(126): n is a, c, g, or t
  misc_feature (136)..(136): n is a, c, g, or t
  misc_feature (140)..(140): n is a, c, g, or t
  misc_feature (163)..(163): n is a, c, g, or t
  misc_feature (165)..(166): n is a, c, g, or t
  misc_feature (184)..(184): n is a, c, g, or t
  misc_feature (231)..(231): n is a, c, g, or t
  misc_feature (254)..(254): n is a, c, g, or t
  misc_feature (268)..(268): n is a, c, g, or t
  misc_feature (336)..(336): n is a, c, g, or t
  misc_feature (356)..(356): n is a, c, g, or t
  misc_feature (373)..(373): n is a, c, g, or t
  misc_feature (384)..(384): n is a, c, g, or t
  misc_feature (391)..(391): n is a, c, g, or t
  misc_feature (393)..(393): n is a, c, g, or t
  misc_feature (403)..(403): n is a, c, g, or t
  misc_feature (466)..(466): n is a, c, g, or t
  misc_feature (475)..(475): n is a, c, g, or t
  misc_feature (645)..(645): n is a, c, g, or t
  misc_feature (666)..(666): n is a, c, g, or t
  misc_feature (712)..(712): n is a, c, g, or t
  misc_feature (744)..(744): n is a, c, g, or t
  misc_feature (753)..(753): n is a, c, g, or t
  misc_feature (800)..(800): n is a, c, g, or t
  misc_feature (835)..(835): n is a, c, g, or t
gcaanccccagtacactcttcccctctcgtacccacagcaacgttacaatcaaaaaaaaataagtntcanggggaagnatnnnanggnaannggaaaagggatatgggtaaaaanaataaaatnanaaaagaaatntttnaaaaaaggtaattccactaaatnannaacttactaccctaaaantacaagttctcattttcgcttctaaaccctttcttcttcaccaaacncttcttcatcttcctcgtaatcnacctttccatcgtnataaccttcttcatcctcctcctcctctccactaacgtcctcctcttcaccttcctcctcctcaaccncgtcctcctcgtcttccacnacctgagcatctacatnaaactcctccncaaccanancctcctcctnaaaaaccaggccctccacgtagccctaagcatccgagtaaggggcctccttgtcgtcccggtnaaagccgtngaaaaaagtaaatagcgggaggagcttgaacacattttctcggtagttgttcaggttggttacctcgcaattaaaaaggtctaagcacttgaggttttctaactatttcagtagctctattgtactgaggtctttaattttgttgccacttgaatttagatgcgtgaggntcggacacttttctgccaatncttccaggccccctgagactctgttatcgcttagttcaagcttctnaagtttgtttaactttggtaagtttgcgattnaggtgaggnctacgttgattgttcttaagaattccagttcttcaaattcatctgtnagggcttcgagtttgccttcattcgaccgactgtngttcaggacaagttctttcacatcagagggcgtcctgttccgcagctctaaatgaattcgtctgccc

SEQ ID NO: 633658 - DNA, 874 bp, Homo sapiens
cctcctgtttacctcgctccaccgtattttggcccttttttacctaagcctcccccctatccgtgctcctcccgcggtggtatgtccccccctcttttaaccctttttccccttataccgctaatatgtgtagaccaacggctcttcctaaagtgcccgactaaacccacacgaccgtcttggtcaacaagtacaattttccccctccctaacaacacccccttctgcgttaaaattatcaccgctagtattgccctgctgcttaatactgactctgttccccccctccattaccccgctcacgatcttcggaacggtttctgtaatctctccccccctacgcgtcaacacccaaacttccctcggcctatttccccaccccgaactttctctggataatattttaaccctcccaaaattccggaaaagttcttcacccgtaaaatgatggcccacaaaccaccaacaaatagaagccttattataaccggttgacaccacaatacaccacccccgtgcctaatcttgcccccctctccatccccacgacttcatttaatataatgtcaccactaataataaggtacgccattgtttattattttcacggtccaaactatatagcaccgaaatgtatggcttaaacactcttttatggtaggggaaagaaaaagtaacactcactattcccacaaaagttttatttcaataaaaaataaaaactgctccttgccttctaacaaaaatgcggcccacataacatcataatttacattagccccgttcccccaactttacaaactttactaggtttctctttcttgtttatgaagaggccccaaacattttcaaaaaaaaagcaccccacaaaaca

SEQ ID NO: 633659 - DNA, 214 bp, Homo sapiens
gcacatgttcctgctgcatattcagcgttgccagtgtttcctgcgtgtcgagatcatgcttggcctgatctgcctcatatcgcgtcgatatatgatgcggatggtggcacccagatgtgccactgccggaaagacgcaaaacgacacgcgcaccgtcttcaaaatagatacggatgccctgatgttcgcttaccgaatggtcgatcggatcacg

SEQ ID NO: 633660 - DNA, 324 bp, Homo sapiens
  misc_feature (245)..(249): n is a, c, g, or t
  misc_feature (271)..(271): n is a, c, g, or t
  misc_feature (296)..(296): n is a, c, g, or t
ttttttttaaaaaaacccccctgtgaaacacccccaggcagggccttcaggaggtccccaaaaacacccattgttatccctgggagacgacagccccatggtcatttttgcccctaaaaagcttccagtgggccaaaatgtgggggtggaaaacggtgaaactaatggttccccccctgggtaggccaaggttttagcttttaccaaaaaaatttaaaaagtaaaaaccaagtaccaatgctttnnnnnaagagaaaaccccccccaaaantaaggactgttttctctaaattatnggcgtatttcttctactgaaaaaaaaaa

SEQ ID NO: 633661 - DNA, 843 bp, Homo sapiens
  misc_feature (52)..(52): n is a, c, g, or t
  misc_feature (63)..(63): n is a, c, g, or t
  misc_feature (83)..(83): n is a, c, g, or t
  misc_feature (94)..(94): n is a, c, g, or t
  misc_feature (108)..(108): n is a, c, g, or t
  misc_feature (125)..(125): n is a, c, g, or t
  misc_feature (175)..(175): n is a, c, g, or t
  misc_feature (184)..(184): n is a, c, g, or t
  misc_feature (214)..(214): n is a, c, g, or t
  misc_feature (236)..(236): n is a, c, g, or t
  misc_feature (251)..(251): n is a, c, g, or t
  misc_feature (267)..(272): n is a, c, g, or t
  misc_feature (275)..(275): n is a, c, g, or t
  misc_feature (284)..(284): n is a, c, g, or t
  misc_feature (289)..(289): n is a, c, g, or t
  misc_feature (291)..(291): n is a, c, g, or t
  misc_feature (298)..(299): n is a, c, g, or t
  misc_feature (303)..(303): n is a, c, g, or t
  misc_feature (307)..(307): n is a, c, g, or t
  misc_feature (309)..(309): n is a, c, g, or t
  misc_feature (324)..(324): n is a, c, g, or t
  misc_feature (338)..(338): n is a, c, g, or t
  misc_feature (364)..(364): n is a, c, g, or t
  misc_feature (381)..(382): n is a, c, g, or t
  misc_feature (399)..(399): n is a, c, g, or t
  misc_feature (452)..(452): n is a, c, g, or t
  misc_feature (458)..(458): n is a, c, g, or t
  misc_feature (467)..(467): n is a, c, g, or t
  misc_feature (492)..(495): n is a, c, g, or t
  misc_feature (500)..(500): n is a, c, g, or t
  misc_feature (503)..(503): n is a, c, g, or t
  misc_feature (527)..(527): n is a, c, g, or t
  misc_feature (543)..(543): n is a, c, g, or t
  misc_feature (566)..(566): n is a, c, g, or t
ttttattcaacttgtctcaattcagtctacaggtatcccctggccgcctccncccactcccanggagaccaaaagccttcatncatctcaagtngggggtttataaanggggaagggggggtagnaggttcatcattcaaaataaaacaaaataaaaaagtattgaaggcgaagnttataaaanattttgcattacataattttctcgaaagcnatgctatcacctcccctgtgtngacttgggagaggantgggccattctccttnnnnnnaantggggtggnttttngnttggctnnggtnttcntntaacatacgcatctnatatttggaatgtntattattatatatcaacaatgtgcantcaaagtcctcggccannttgtgaactttgggggntgctcgctccaaccggcgtgctgttaccttcatccgttccagtttttaaatcntgagtnaagccaatnaaaaaaaaaaaaacctttttttttnnnngtggncgntttaggccttgcctttctcatctngttttctgcgcaagtnaggttttgtcaagaaagggtgtnacgcaactaagtcatagtccgcctagaagcatttgcggtggacgatggaggggccggactcgtcatactcctgcttgctgatccacatctgctggaaggtggacagcgaggccaggatggagccgccgatccacacggagtacttgcgctcaggaggagcaatgatcttgatcttcattgtgctgggtgccagggcagtgatctccttctgcatcctgtcggcaatgccagggtacatggtggtgccgccagacagcactgtgttggcgtacaggtc

SEQ ID NO: 633662 - DNA, 145 bp, Homo sapiens
gattgtgactgacgaacatggtttgcttctgaagctacgagcctatgggccatctggattctcgtggaatttagagaaggactgcagtagacatgctgagaacgacatgactggctcgggaaactctgaggatctgggatggaaa

SEQ ID NO: 633663 - DNA, 967 bp, Homo sapiens
agcgggatcatctgtgtgagcaacaggttgctggattgtgtccgtacatggacatttcttatgccatctgtggctcttaccagatagtgaagtcccctatagaggatcttgtcccccataataaatgttcgtcggaggtttggtttatccgagacagtcttgtctctgttgcacatgctggagtacagtgcagtaccgattcttttctacaatacaacgttatagattgtcgatataacaatatgcaaaagtggcgcgggcttggaaggctcatgcctgtgatcccagcctctttgggagcccgaggtagggggctcacctgaggtcagggagttaaaagaccagcctggccaacatggtaaaacccccgactctactaaaaatacaaaagttagccaggtgtcgtgatgggtgcctgtaatcccagctacttgggaggctgaggcaggagaatcacttgaacccgggaggcggaagttgcagtgagccgagatcgcaccattgcactccagcctgggcgacagagccagactgtctcaaaaataaattaacaccacaataacaatacaataaatagaacacaacaggacaaagaacattattaaactgtcttagttttgattcttggtttaatccagttcaaactggtctaagtcaaactaaaggaatttataattaggacacaagaggtttgtgtttttgcttttgtctttttcacaggactccggagtggaccttaccacggccaggctctccccctgtcaagcatccgaacgcccctttagaaaaggcaaggcagcacctctctggttttcttgccttctgctcttctctgtgcttcctgtttcctttctttcagggacctctgctttgcccaaagggtggcttttccacccgaagaactctgtggggggcaggttggttttcccccaatttttgtgcctgggttaaacgccccccgttcttc

SEQ ID NO: 633664 - DNA, 137 bp, Homo sapiens
  misc_feature (6)..(6): n is a, c, g, or t
  misc_feature (113)..(113): n is a, c, g, or t
ccatgnttgggctacccatggctggccaaggacaggcttcttagaatgtgagttgggctggtttccgcccagccctcaggtccaggatgcccaacatggcagtgatgcccaancatgggtgtgactgcccaacatgg

SEQ ID NO: 633665 - DNA, 391 bp, Homo sapiens
  misc_feature (142)..(142): n is a, c, g, or t
ccgggggggggtctctgttatacacccttttcccccgcgaaaatttgggttaaaaccaaagggggggggggggaatcccgggccccccccgggggggccccccccaatttttttcccccctgttccctgggggggccctttntggggggggcccccctccccaaaattacccccggttttaaggggttcccccccccggccccctttgggtgggggggccctttggggggccccaaaatttaaaatttttttggggccccccccaggaaaacctttggcgggggggccccccccctggcccccccgggggggggcccccccccccccgggggggtttttttaaacctttttttttttttttttttcaaaaaaggtttaaccccccccccca

SEQ ID NO: 633666 - DNA, 87 bp, Homo sapiens
tggctggggtcgcgtgcttgggaaaagctgccgacgcagtgaatggtgcgacacgtcctgggctccctgggtacggacgcagcggcc

SEQ ID NO: 633667 - DNA, 507 bp, Homo sapiens
gcctcgggggaagatatgtagcgatccaatggaacgtggagatcaacgttgtgttttcttcgcgcccacccgaagttgaagggaggtggcgcggcgggtctcagccgccgtcccggacggcgaggcgccgggaccgcggccggtcggagaccgcgggccacggagtgcggaggggctctctgggaggccacggctctaggagcgggccgggaaatggagcgtggccatgggacggtggtggacgctagggacacgcacccggaagccgccggagaatccgtcgagacagaccatgtgggcccgatggccacggaggattgaagccggggacaggcatgggagtcaggctccgcggctccgggtagggcctcgcgcactgagagtgcgggggggaccgcggtgcctcaagaagtcataaggcgtggggaggaacgcgaacgaccgcaagcaggcgcgtgggtcgtcgcggacaaggaagtgcaggcattgtctcaagcaagggattcg

SEQ ID NO: 633668 - DNA, 517 bp, Homo sapiens
  misc_feature (142)..(142): n is a, c, g, or t
  misc_feature (149)..(149): n is a, c, g, or t
tctccttgaagtgattctcaaagcctgattctcagcccagctgcattggcatcacgtatgggcctgttagaaatgcagattcatgagccatgttctactgagtcagcatctctaagaatggggcccaggaaactgggtttcnttgcttnttttttcagagatagggtcttgctctattgcccaggctggagtgcagtggcctcccaaaattctgggactacaggtgtgagccaccatgcccagactgttggccctcttaagtctttctcaatctagagcaaatcatttcttttttttcccaacaataagtatttaatctagcacgttctaggtactgttgtttaccatgaaataaatttagctaaggagtcaaattcagaaaatgtaataatagtttttttttgttttttaagtgtaaggcattataattgaagtagtcaaaaaaggtttaattagggggattgagtgttaagagtagaagtaatcatgaactgggtattgtataaaattttttaaa

SEQ ID NO: 633669 - DNA, 1003 bp, Homo sapiens
gcaagcgcgggatcccactgggtagagccttggaccgaatgagtttgcttagtcctatccgatccgatggcccggacgtaccttaagtcgtgactggggcgccgacaggtgctagacccgagacaagagctctcttgtggaccagtactaccagaggtggctgactaataaacgaaccacgagaagtagggtctgaatatcggatgactagcagaagctttcaggcgatgcgtcctcgtcgcgaaacgtggttgagctggtgcccgagttggagcaacttgtcgtctccgggaccgagagacaggccagtgagcctagcccttggttcacgaggtggggataacgttgtctgaaggttcgtatttccaagggacagaaggaagtcattaggacaacatttggttaatacgtgcattcctggttggagatgctttcttgggatttaatcttatggcagcatacccgcaatgcttcacatgcattggaggttgcccatcacccgaagacacaacggaatgacagggcccccagacaccgcaccgttcaggggactgatccaataccgtttgcggccaaacatgtcggtggaagaacccccgttgttaggtacctagcaaccacacttagaacagaagggtgtaaaggtggggtagcacacgggcgcgtggtaattcacgcaaagggtagcttctgtgggacgggcttggagcacttgggcaacgaaatcacgcatttgaagcccatggggaagaggatacggacagcatggccaactaaggcagccgaaaaggaaatcagagggcccagccggggccaacagtcacaaggacccatgcggcacgcaccgagccggcggaagaccgcccgccaatactcaagaccacaacgactagaaagcgaagaagagggcaatggggctgcaatggcagcccactgcgccgtataggcaatcatgtcggaaaaacataaagcccacacaccagaacaacagtggccataaccg

SEQ ID NO: 633670 - DNA, 166 bp, Homo sapiens
  misc_feature (48)..(48): n is a, c, g, or t
  misc_feature (102)..(102): n is a, c, g, or t
  misc_feature (135)..(135): n is a, c, g, or t
cggttcccagcagcactggctgatgctgccccagctgggggctgaggnggaggggacaggagaagggaccattggctccaccctgaggaccaggaaggagtntccagagggcgatggggtttgaggtcgaggagnttgggacctgtgacttggtttgctccaaagg

SEQ ID NO: 633671 - DNA, 373 bp, Homo sapiens
agggtgagtggagcgtggcggagcagctggccagcttcgctgcgagatggagcagcagaaccaggactacaccatcctgctagatgtgaatggcgcggctggagcaggagattgccacctaccgccgcctgctggagggagaggatgcccacctgactcagtacaagaaagaacctggtgaccacccgtcaggtgcgtaccattgtggactagtgtccaggatggcaaggtcatctcctccctgctgatgcagtgtccaccagaccacccgctgaggactcagctacccctgtgcctggccacccagtgaggcagtggagtgcatgcctgccccatctgccccaaagtctccgtcctctccagcaggtacgca

SEQ ID NO: 633672 - DNA, 403 bp, Homo sapiens
tctcttggtaacactcgtttttatataaatatccgcaagtcttgttacaaaaaaagccccaccggggaaaaaggtcaacgttggggtttggttaaatggaccccgtgcctttcatagggtggggccccagcctgtggaggcgcctgtgcgtgcttgggagaagggctggggttgctgccgttgaggctgccgaaaaagctgcctgtgtcgcccacccctgtgggccagaccccctttcttgggtgtgtggtacattggtgacctttcttcgtggccacccttatagccgtggggcagggtttgggaagaacaggggttcaaggaaagcaggggcccagagagtccgtggggcgcacttgtggaaattggggtagaaggggacttgagccagtaaagaggtaga

SEQ ID NO: 633673 - DNA, 128 bp, Homo sapiens
tgctgggattacaggcgtgagccactgtgcccagccatttttttatgagtacaagttgagtgccccttgatccaaaatgctggggaccagaaatatttcagattttggattttttttttcagattttg

SEQ ID NO: 633674 - DNA, 751 bp, Homo sapiens
gctgagacagacggtaactcctggggatcttatttctagtatggataagaaacgagaaaaggttttcccccagatgttatatcacaggagttctgagaggcggtgcacctcaagatttacgccccggtctttcccttgtgggttttaagcccacctgcacgagcttgtcccgaggtcaaacgcccacaggaggtgctttttgtgctaccaccagtttttcgcccacatgggcctaagttttctcgaggggatccctcggagaaaccacagaagagagaaaagagggagtcccccgcggaatgtaaccttcggaatgaaggaggcctcgggtctatatctatgggaaaattcgtttgttctcggtcgtggctcatatattggctcggtcccacaacacacagcctgtagacgtgtcatagcccccctgcgcctctttcttctcgtgaaggtgttcttggcgacccacactgagagcacgacttgtccacactcacgtggagcaccacacgtgtagttactggaggtcgctaaatgtgagtgaagccaccccacctcgtaccctcgggtgaggcacaaagtcaagatgttttgaggagacccctcttttccttcgaatttgaagaagttttaaatggacccctatatttttctttaaagctttcctcttttttggaaatttttttttttttaaaatccttccccaaaatttccaatatttggggtaattttaggaaaacccatttttttttta

SEQ ID NO: 633675 - DNA, 242 bp, Homo sapiens
tctgactttgagtatcccgggagtcagagagaaagcgctgcaggattccgcagaaagcaccgggaggagtgatgatgtgcatgttgcttttgcacctacggggtgctctgattccagctcccccctagatgagctgcagcccccctgagagagctctgcacgtcacttagtcaccaggtctccagcctccagtgcccatttccgtccagcctctccccgctctggatctttctctctccact

SEQ ID NO: 633676 - DNA, 390 bp, Homo sapiens
ctgctccgcccctctctgcttccagtccctgcaattcacctgaaccttttaaaacataaatcatatcacgggttttttctttgacacgaagtctttctcttgctcaggctggagtgcagagccatgatcttggctcactgcaatgtccacctcctgggttgaagcgattctcctacctctgtctcccgggttcaagcaattctcccatctcagcctcctgagcagctgggattacaggcacacaccaccacacctggcccagctaattcttttttgtatttttagtagagacggggtttcaccatgttgcccaggctggtctcgaactcctgagctcaggtgatccacccgtcttggccttccaaagtgctggattacaggcataagcca

SEQ ID NO: 633677 - DNA, 692 bp, Homo sapiens
gcgacatgtgaccccgcacctagcccgtgcccgcacctgccctccctgggcagtactgggtgaccttccctgggggacggggagggaggaggcagctgactccttggacagaggcctgggccctcagtggactgccgtgctcccacagccgtgggctgacgtcagaggccgaggcaggaactgacgtgaggccccatggtcactgggtctcagcgatgggtcctgggggcctcgtgttcatcaagacacccctcatgcccgagctcaccacagtcttcagtcaccaggaaaggcctaggacttggcgtccccgcgatcactcagaactcagcaagccagtttgcctcaacgtccccccctttgcctcggtctggggacagagggtggttgggggacatgggtgctagaggtggaagtaccgccagacagtggtatgagttaccgcattggcgagtacctagagctcaccagcgggcatataaatggttggtccggcccgttggggtacagcttgattgtagaatactgaacgaagctttggccgaaagtcggtcgcgtcttggcattctatgcgggcgttaaaggtaaaggataattgtcgtcaagtattttgaaaggacacgcattgatcactaacgtggaaaagggcacaatggatgggtaggtggctgataataacgtcagggagtaag

SEQ ID NO: 633678 - DNA, 330 bp, Homo sapiens
gggaaacttagtgttgatccatggccttccagaaggttcttagctgatcatattttgaaggccgtgttttaccaagagttgcttgtaaagtgttgcgtgcacagttaaggcagaaggttggttagtcggcaagagatctttctttaggtagtgtgtgcctctctcgtgtgtgcatactctagatatatagaggatatctctagagagagagatctgactctgctcttgagagatatataagagagagttgtccatacacccgcgatgtgtgggaatcacaagctcgagagcccacggttatacacggtcactatggggattgtgtggtac

SEQ ID NO: 633679 - DNA, 98 bp, Homo sapiens
  misc_feature (30)..(30): n is a, c, g, or t
  misc_feature (53)..(53): n is a, c, g, or t
tcttcaactcctggggcttatgccatcctnccgcctcagcctctcaaaaagtnctgagattacaggtgtgagacaccatacccagctatatattttat

SEQ ID NO: 633680 - DNA, 541 bp, Homo sapiens
  misc_feature (442)..(442): n is a, c, g, or t
atactagtgatgcgagtctgctcatctgcagagacatgattccccaggatggccctctgtacactctgcccctcgagtcagcgtttggtagacctgccctgtcgcactggtgcccccagagtcaacgccatccccgctgcctctggagaccccttgtatctccccatgacgcccctcattggtggtagacacctggctataggcctggatccgccctgttgtgtgagaggagaaccggatgtagtagaggctgaagggtttgggaaaccaccatttgttattctgtgcttcccctcctggcctggaagctggcccacttcatggggtgactcacggccctgcctctgtgccccaaggcagcctccgccctcctgtaaacaggcccacagggctccaaggggaggacatttgtgggtaaatcaccctcacatccccccagcanccacagctcatctggaaatcagctttccgaagcttccacatgtgtgccctccccctctctccactgcagacacctgcacaggctgagctggcctggtca

SEQ ID NO: 633681 - DNA, 172 bp, Homo sapiens
ggtattgagttgccaccattctccatgataatgtacgttgcggagtaaggtgctcgtctgaccccataaactgaatgaggcagaaacacacacacacacacacacacgcacgcacgcacatacacacacacacacacacacacacacgcacgcgtgacacaatctctacgag

SEQ ID NO: 633682 - DNA, 798 bp, Homo sapiens
ggaaaatgaactgtgcagagagtcatacttgttagttgtgggtgtgggcatagggagtgggctgttggggaatgggagaaaatgaataggaatgtgtgatctgaatgtgcctgagcaggtctatcagtgcatggttggaggagatatgcgcgttaaaaggaatgatagggagaagaggataaataccaggtgatcaaactcaatcgagggaggtagtaccaataacatgtggactgtgcactgtgtccaggtgctactctagccttggctatgatctacttaaccacaccaataacagatctattgcagattggctcgggacgtcccctgacaccgatgtatttgtcgtgacgttgggtcgaagccagaattatctcttgcgtctaggacacttgctcgatgcctgattcgtgggatgatatttgaccaaattccaaggtgggttgacagcaatgtacctcagattataagagaaaatagtatctctctcagtgaaatcgaattgccgtgctcagaggattgcatttggaaactttgtcccaagcacatgtctacataattgcaggagcctgcttgtctctgggttttcgatttgctggctcagaaaacttatcagcatttaacgtgtttgcataaatttcgccaacagatttatgacttatttgtccgcacctaagggttgtgtacagggcctcataacctaaaaattgtctgaggtggtgcaggtggcctcgccaggtcactgtggccaggaacccaaagggttgcgggtttggggtctaacctggagagggggga

SEQ ID NO: 633683 - DNA, 288 bp, Homo sapiens
ccaaccccaacaccaccttgcacacatgaccccaacccctgacacccatcaccaccaccaccactggtgaccccaaccccaacacccatcctgtgcacactgggcccaacatctgacaccccatcaccacacaactactacttgtgaccccataccccaatcaccaacctggcacacctgatgtacaaccctagacacccgatcacctaccaacactactggtgaccccaaaccccaaacacccacctggcacacatgacccgcaacatctgacacccgatcatgcac

SEQ ID NO: 633684 - DNA, 391 bp, Homo sapiens
ctcgacccacgcgtccgacaaaagagctagaattcaaaagaaaacaacatttagcctatttatttatttgtttattattttttgagagggagtcttgctctgttgcccaggctggaatgcagtggtgccatctcggctcactgcaacctctgcctcccgggtttaagcgattctcctgcctcagcctcccaagtagctgggactacagttacatgccaccacgcctggctaattttttgtatttttggtagggacggggtttcaccatgttgatcaggcttgtcttgaacacctgaccttgtgatccacccacctcagcctccggagtgctgggattacaggtgtgagccactgcgctcagccgccctttttaatactatgggtattttag

SEQ ID NO: 633685 - DNA, 174 bp, Homo sapiens
attatgaactacctggactctacgttcagcaacttgcgttagtgcaagcaacaaaggcctgctggggaatgtattagccactaaattccccaagtatgccaacattacaaaaaagataggtttttcatcataattgaatttccacataacctccccatatcacagagtattata

SEQ ID NO: 633686 - DNA, 324 bp, Homo sapiens
tgcaaggatcccctatctcctctgcccctgcacggctcggtcccaggcaatctgtctgcccaccacacctttctcctcttgcccaccacgctccagccccacagtcctctttctgcttctttcccagcctctgggcttttgcacaggctgttccctctgcctgaacaccctccactgggctgagaacaactctctgaggcctctctcagctgttgcttcctttggaacagccgctgctgctgtccctctcccagctccaagacctgctgagcctcctgtctttttcagttcccatgcccccagcacttcttcttggcctctagc

SEQ ID NO: 633687 - DNA, 274 bp, Homo sapiens
taaagaagaagcagacttctgcaatatcagtgttaatgactcctcttcatcctcagaaaatcgatggctgtgacctcccgagtggtgcagtggtctaaggcactgcatcacagtgctagctgcgtcactacagatcatggttcaatcccgggttgggtagctgccggcccgagaccaggaaacccatgtggcggtgcccagcatcgtccgggtttgagggtttgaccggccgggatgtccttgtcccattgtgctctagcgactccgtcgacgc

SEQ ID NO: 633688 - DNA, 314 bp, Homo sapiens
ccagtgaatcgagctcagtaccatctcgtgacggcgattatcactagttcttacaggttttgggataggcggtggagttagggacaatgttttgcgggcaggggatggatctcacaaagtacattctcaagggtggggagaatgacaaagaaccttcttaagggtgggggagattgcaaagtacattgatcagctagggtggggcagaaacaaatcacaatggtggaatgtcatcagttaaggctcttttcacttattttgtggatcttcagttgcttcaggccatctggatgtataatcgccggtcacgagat

SEQ ID NO: 633689 - DNA, 249 bp, Homo sapiens
gctgtactgactgtgcctgtgtacaatgatcacatgactctgagtgacaaggccctcatgaactggtcctgagagcagtgttcgtgcggtgagttcctcgcagtggcctggtcagagctacactattgagaaccatgaacactggaggccgacccctggccacgtaccgtgtgccactggcaccatgatccaatggacttgctgaccatggcgtggggactcctctatgacgtcgaccgtgcatgtgcg

SEQ ID NO: 633690 - DNA, 162 bp, Homo sapiens
gaattccgggatgcagcaagtttaatacctgaaggttaacataaatgacaacaggacacagatgcaatgctacagtcaaatgtggttgatcggatggaagggggacgagggacactggatatactacacggacaccgtgagtgagtcctctgtgcgctgaga

SEQ ID NO: 633691 - DNA, 161 bp, Homo sapiens
cggtatgcatttaggtaaaaggcaaagtctctattcagaaaaaaaaaaataggctgggcgtggtggcttacgcctatatccctgcactttgggaggccaagacgggtggatcaggtggtcaggagttcgagaccaccctggccaacacagtgaaaccccat

SEQ ID NO: 633692 - DNA, 803 bp, Homo sapiens
ccagtcggtgcccctcccgctccagccatgctctccggcctcggccgggctgccagcgctgctctccgccgcagcttcagtcgacctcgcgcccttacgcgttcctagttgctgttgacgtatgctacatctccttgcagctagtcctggtgtagagttggtcgcgctgaataaacagaaagtcgtatgactgtcctgatacttccctatacgctataggatcgagagatcccgagcgctgatgaagaaccctggtgctcagggatttacagatgcattttggcacagaggacttacgatactatcagcgcgttctggacgcgtgaagagaggctatccgtctctaactcgttgttggaaggagtctcttcctgactgtgaggcgagactgagtcgctgccggccagggtgtctcacacagctgcattgaacttggtcccgtcgagccagcgttgaagcctaggagtcgctaaggctatcttgtgtagccattcttctcagaagtggtgcgttcttaagaacgtctgctagctgtgtctacgaagtcaccagaaatgctaataatataacacatgacgtctgggttcatttgaaggaagcttatagactgcgggggggggggtccggcgatttgaaccaggtggactctatgttaacccgtattttgagaagagcccgaatcatgggagactaaagaaagaccagatctgtatgcagtgaaagcaccactggaaggaagaagtcgagggagtgaaagaacgtgtgactggaccaattgcatgctgctcttagccccgggatag

SEQ ID NO: 633693 - DNA, 382 bp, Homo sapiens
  misc_feature (135)..(135): n is a, c, g, or t
  misc_feature (146)..(146): n is a, c, g, or t
  misc_feature (153)..(153): n is a, c, g, or t
  misc_feature (227)..(227): n is a, c, g, or t
  misc_feature (267)..(267): n is a, c, g, or t
  misc_feature (330)..(330): n is a, c, g, or t
  misc_feature (340)..(340): n is a, c, g, or t
gggcagcaagggccctggcgaggacttccgcatggccaccctctacagccgaacccagacccccaggggtgagttaaaggagaaaattcgccgcctttctgcaagggcccaggggcttcacaggaggaataccanttgtcttcctngccccanaaccgtataagtgcatgacaggaacaatagactcccccaggggctgaaggctgggatcccggccaaagccaagntgacccccacgctctgagatgtctcgtgctctagttcctntccccgaagcccctagccccggcgtccccgcgcaaagcgaacccctgcccatctaaagaattnttctgtgcgncaataagactccggagagcaaagacagatagaaaagaaaaaa

SEQ ID NO: 633694 - DNA, 201 bp, Homo sapiens
  misc_feature (149)..(149): n is a, c, g, or t
  misc_feature (187)..(187): n is a, c, g, or t
ggtgaccagcgtttaaatcctgccccctggccgggcagcctctcagtttcctcacttgtatcatggggcatgatcacagttccaggcctccttgggcctttgagggaattaggggcagaagtgggtaaaggcatctggggcccttgtgncggcagggcttcagtggaaccccaaaacgggcggtggntattaatgggggga

SEQ ID NO: 633695 - DNA, 1168 bp, Homo sapiens
tttttttttcaaaaacacttatttaataaacaactccaaagagcaaggggaagccaaatattatttatttattaatatggaagggaccagagaaactggatttggtggaaataatttgctacctttcactaaactattctcttaaatattggctcacctatgaagatttggtggcaattctatgtggcagagcaatgtgggtatgaaagtctggtctggaggggaaaacacaccactataatatgggggcttttggcctggctttcctaattatataaagggagaactagaaaggaaagggcatgggcaccaaataattcaaactctgtatgactaagaaaacaatcggtaacacacacaggggaccaacaacaaaaaaatctcgaggaaacctattttgaaaaactcttggtcagaaacaagcagggagatttatgcccacaatttttgacctattataacctcataaagtttccccataagaatggttccgcctccttacatgtgaccacccaagtgcccccccaattttttcagggttcaccatgtgattaagaatacgggtcttatctcaattaaaaatattttcaatttcaaaaaaaccaaaagcaaaaagagtttaggggaagtctaggggtgggccaaagagaaaagaaaaaattatttttttgaaatgattatattattagtgctagggggttgtggtggcgcaacttttttgttcagagaaaaataatttcccaattatttaacaggtttaagagaaaagttgactagtatgatatacactaataatgtggtatgtattacaaagattaggggaggaaatggtgggggtaaattattcaggtaaaatttgtgagtcctaagaaataacttggagggtaaaggggtatgaaatgggcaccttatccatggccataaaggtacaacgtctccccttgtaacgcggaatacactgagtaaaatttcggacaattttcccaccccccgggtaaaagggggacctctgaccctaaaaaagtccctattcgaaaagaagagactacatactataccttttgaacacacaagattctccgctaataaacataaagtttctatcaatcctggaaaaagaactaatgttagttgagaaaacctgactccaccgtaaacatttaacatg

SEQ ID NO: 633696 - DNA, 506 bp, Homo sapiens
agaggcactgctgaaccctggcaccgcgggcactgggagagtcaagctcatgggggtttcccggagaatcctgtgtgatctgagtagaaaccctgctgcttccacccttctagccctcagcttgtcaggagctgacccgttcagcttttccacccaaccagagctctgtcctgtgtgcagagagccacaacacccaaatccacagcctggctgacgggcctgccagcgttgggaaaagccactgataggttcgcatgaagtggaactggaccctgcagaagtttccaaaagctgccctgcgggtgacaggctgtccgggccccacatacctctgtctgtccgagggtgagtagcacaggacagcactcttccatctgtgcacggccgggaactgatgggggtcgacgtctgcacattcaagagcggccaaaacatcctgatcgagttttgatggctcctctctagaaagcacaataaaagaagcaaaaacatctttggtaaaaaca

SEQ ID NO: 633697 - DNA, 498 bp, Homo sapiens
aagactgctgtgtgctgggaacaggacctccatctggaagtccactctcgactaccctgtcaccaagcttagaggcagatcccaaggatggcgaggggtgtcccatgtgccgtctgcttccgtctcgaggcaaggaggattcgcagacttcccgggatgaggggagagcagtgtacaggcagggttgggccaggaggcctgggctgctgaggcgggataacggtggttgtggagggcactgtgctgtccccagctccgtctcgaggggcctggattccccactggatggcatagggccgctcacaggtgcttcacaattggtggctctcattagtctgctactgggtaagctgtggcctcagggagtgagacagacaccataggccatattgtgttggatgaatcttacccatcaaaatgtatcctggataaaagcagtcatctagctacaagtactatcttgattctatccatgggccgtcaatggactgtagccca

SEQ ID NO: 633698 - DNA, 293 bp, Homo sapiens
  misc_feature (253)..(253): n is a, c, g, or t
gaaagtatgacggtattgtcggtttcaggcttgaaactgccaggcgcctattgcttgacctctgtttaaatgagggacttcaagactagacagcatggttcttttcagtttatttgcatgaatggagttacactaagtccaagttaaaatgcggaccccaatatggttacattgatacaatgctgtgaggtttttaaaccctgtgacaaggggagagagagggaaattctacatcatttgcaagtgaagtccntcactgtaatgcttcgatgtgagccacaatgccacgtgtc

SEQ ID NO: 633699 - DNA, 477 bp, Homo sapiens
  misc_feature (19)..(19): n is a, c, g, or t
  misc_feature (60)..(60): n is a, c, g, or t
  misc_feature (73)..(73): n is a, c, g, or t
  misc_feature (246)..(246): n is a, c, g, or t
  misc_feature (250)..(250): n is a, c, g, or t
  misc_feature (282)..(282): n is a, c, g, or t
  misc_feature (330)..(330): n is a, c, g, or t
  misc_feature (360)..(360): n is a, c, g, or t
  misc_feature (395)..(395): n is a, c, g, or t
  misc_feature (451)..(451): n is a, c, g, or t
ctccgtatgaactgtgccntgtcttaggagaattgcttcatacaaaagtggattacaagntaccctgaagaanggctgacaaggcctgtgagccaggagtgactatgtgtacaagacccgactggtcaaggttagctgccaatactttacgagtacatcatgccattgagcagaccatcaagtcagctcggatgaggtgcaggttggacagcagcgcacgttatcagcccatcaagtgcagagaancctnagctgagagaagaacactacctcatgtggggntctcctccgatttctgggagagaagcccaacctcagctcatcatcggnaggacacttgggtgagcactggccgagagncgaatccaagacgaagagaccagaaacaatccagncctcgggccttaccgagagcatggttgtctttgtgcccaactgccacacccccatnccccactccagataaagccccaccca

SEQ ID NO: 633700 - DNA, 188 bp, Homo sapiens
catggtatctgtcagacaagacccaggttcaacatttgggatggtgctagagcatggcaactaccatctgtgattatataacgcttaagtcaaatcccgcagcgaagatcgcagccccgagctcggtggctcgaagccggtccccctgtccgcgcggccccccccctcacggccggcgcgggagggcg

SEQ ID NO: 633701 - DNA, 926 bp, Homo sapiens
cgaaaaataaaaaacaagaaactaaatcatatcaccagagaaaattaccttcactaatgaaagacaggaatgaaagaaggaagagaagaccccaaaacaaccagaaaacaaataacaaaatggcaggagtaagtccttacttatcaataataacattgagtgtcagtagactaaacttttcaatcaaaagatagagtggatgaatggatgaaagaacaagacccatccaggtgtggtggctcacgcctgtaatcccagcagtttgggaggccaaggcaggcagatcatgaggtcaagagctagagaccatcctggcaaacatggtgaaaccctgtctctactaaaaatacaaaaattagcagggtgtggtggtgcgcacctgtagtcccagctactcaggaggctgaggcaggagaatcacttgaacccgggaggcagaggttgcagtgagccgagatggtgccactgcactccagtctggtgacagagcaagactccagctcaaaaataaataaataaataaataaataaaataacaataaaagacccattgctctgttgcctacaggaaacactcttctcccataaagacacatgtaggctggaagtggtgtctcactcctataatcccaggcacttggggaaggcagaagggcgggttgggtttacctggaagggtccagagaggtcaaagaaacaagcctggcccaatattgggtagtaacccggaatctctactagaaataccaaacattccgaccggcaagagtggcgggccccagtgaatcccagtaattcccactgaaacccctttcagtatcagaaacaactggtggaccaaaggattatccaaaggcacacttaatgcgaaataaacacaagtagagcaatggtacactataagaggaaaatcacaaatacaaaga

SEQ ID NO: 633702 - DNA, 160 bp, Homo sapiens
  misc_feature (2)..(2): n is a, c, g, or t
  misc_feature (32)..(32): n is a, c, g, or t
  misc_feature (45)..(45): n is a, c, g, or t
cnccgcccctcctacagctgtactccctctgnctttgcccaaagnctctcctcctcaccccacctggaggccaggggagtggagagagctcctgatgtcttagttccacagtaaggttgcctgtgtacagccccgttcaataaatatggcatgaaacctg

SEQ ID NO: 633703 - DNA, 1799 bp, Homo sapiens
cccaccccattcctccccacactcatcgcccttaccacgcatacacctacctactctccccttccataaccaacattagtactacaagggcgagataggcagcgacctacgagtgcccaccgggccgcacgcacgcgccacgcgcacgcaaccgcgcgcgcgctccaagccccgcccacacccagctcacgcatcaatcagagacgtatcaatactcatccacgagtacacatcatcaacaacggcacatataacaccatgcaaacacaccaccgcactacacacacacccacgcacaccttcttcacatacctcaacccacacacgccacacaaacagacaatgagcgtccgccacacgcatgagcgatacaccaacggctagagcgcagcccagaggcacagacacagcacgtgcaacgatagctacaggtgagcacccgcgacgcctgagccacattgctagcagtataccagggaagcccagtaccctgcaccaggtcaaggtgatgagctggtgcacgctgaggtatggagaactgagcggtaaatagtccgatagcgcgctatttcatagctagccgagccagcacatatcctgcgcctccagggggtcacatatgagagcgcgcgcgcgcacgacagtgggacgcaaatcactacgaaggtgagcatacatcactgtcctcgggtagcgcaacgtactacagccacacgaacactgtacccacgcctcgagacacagcgtcatcaacactacggaagctcaaagcagttctccgagcagggcgcggcagagtgccgcgctcgagagtggaagtgacgagaaaggtgtgatcgacacaacacgacagcgaggtgagacgaggaggagcgactaaccgaggacaagaactaggcttcgtcgcgacgagcgcacggcgaagtcgtcgaacgagctcaacgcaatcacaccaaaaccgaacaccacgcgagagaacacccaccagtgcagcaagctggaaaccccgtccacgtcgaaaggacaaataacgtgctacgcaatgagtcgtgattcacacaaggcaacccagacgaagaggaaacacaggtcgcggcccacaactatgcgactacgcgcaccaccactgccacacaagacgccgaccagcgaacatacggcgacagacaaggagacaatccaagcggagacgacgcgggcggagacatctgatcactgactctaccaccgcatgggagctgcagcatctatcacggaggaagaagaaaccgatccgccaaactagctaagatagaaactacaccaacatctcgaatgtcatatcctgaccgacgaccgactgacccgaccacggcgagacagtgtagccccgagaccatgcgtgtcacacgactccaaacacagcggcacgctgcagccacagcaagcgccgggcgtgcgtctccacgcagctaacaacgtggactatcatacatcagctcatccttcatgcttacatctactacacattctcatcaactctatacatcgttcgatgttgtctgctcacatgcttccccacaccactacttcctcttatctgtctcagcctttatatgttgttaccaccacctcttagcttgctatcatcttcatcaattgctgctctctaacatctttaccatcccgctgtcgcatgcttgaccactacattgaccttctttctcatacacactgtcttcttgtgtatctcacttacttagctagacctctgatcactagatgtgttatccaatctacattctgttcgtgtcaaataa

SEQ ID NO: 633704 - DNA, 203 bp, Homo sapiens
  misc_feature (61)..(61): n is a, c, g, or t
ctcatgcagtattggtcatgcctgtctcggaaataacccgatagtgcagattgcggactgncttgatgcgttaatcagacttggagcggcagtcgcattgggctgatgaataagccctttatagccatctccgttcgtccgaggcttagcagtataaacccgcatgaccatgaaaatgcggtcttttacttcttcttggagag

SEQ ID NO: 633705 - DNA, 147 bp, Homo sapiens
tcttgtaggacgtactgggatgaggaacgtcattgggatgaggaacgtcactgggatgaggaacgtcactgggatgaggaacgtcagtgtggatgaggaacgtcactgggatgaggaacgtcactggtaataaagctttggaatggg

SEQ ID NO: 633706 - DNA, 133 bp, Homo sapiens
ccagcagcgcgtaaggcggcaccggggccatggctccctgggcggaggcgagcactcgcgcatgaacccgctgcgcgcggtgtggctcacgctgaccgccgccttcctgctgaccctactgctgcagctcctg

SEQ ID NO: 633707 - DNA, 154 bp, Homo sapiens
gaaggacgaacatagctcccaattctcacgggaggagtgtcgatttgcaaccatttgagaaaacgccacagacttctcactagtatcagaaatacaacatatgatcttcactaaaacatttcatcagcatttactcttcttgttcgttccattt

SEQ ID NO: 633708 - DNA, 927 bp, Homo sapiens
taaaggcccccaggaaatttgggggtaaaaaggggaaaaaggggggaaaaaaaaaaagaggggggggcaaaaaaaaggggggctttgggcacaatgggggaaaaggggttcgggggggccccccatgtggttaaaaagggaggcgtcggggcataaaaataaaaaaaggggtgggtgttgggggggaaaaataattatcgtgggggggtggtgggataatttgtggggagggggattatctggtccaggaagagcggtagttactttaaacaatggggagaagagacccccccatagttgtggtgggagccgtattgacaaatatttttgtgttggccacatcagaaaatatctcatggcccgacagcagaggtgggggagggcggtgttataaaaaggtggtggcggcagcaggataataaaattgttcgcggcgggcccccgacgaagggacgcctgcgggggcaaaaacaaatgggtgtgcaggtctcctaaacgacgaaacacaccggacacaaacaataatcaccccgcggggggcgcctgctaaataaagggtcgtaagcaacaggggggggcagcagcgggctaccacacccacacagaggggagcggagacccccgaacgagtgactgagtaagacacccccgagtctggtgcaaaaaaaaataaggggggctgcacgatcgcgcgggcggcaaaaccattaagggagcgcaccaaactaaacgtgagaagcggaacaacccaatggttggcgaggggggaccattctcatagaaggagaccccccaaaatatcggaaagaaggggcgcccccatagttcggggggcaacacacgagcatatctggcggccccaaaaagattggccccggagagaaacccacagagggcggcctaaacaccagaggaatccgcaaccgt

SEQ ID NO: 633709 - DNA, 581 bp, Homo sapiens
tatttgggttgggaatccgttcttctctttggttaaaagggggaaaggaagtggatgcgggtacccccaggtgcaggggaggcatgcaggcagccccagcaggcaggcgcgtgggaggcgggggaaaaagtccgtggagtatcccaaaagtccatatactctgcaaggaacagcaacgctggctgacagagggggtgggagaggaggcagggcccgtggggagggggcgggagggcagggggcgtgggggcctcacacataacagtgcaaagctccagcgtgccccaggaaactagggttgcttcgtgaaaagcgaccacagcgttaaaaattacacagaacacggcacacgcgccacacagtggcgggaagaagagctctggatatatcccataagaggtggaggagagtacaaaatgagcgcaagcgcgggcccccgacaagggaagacctcccaaagacacgaggggcaatacagacaaggttcactcgcgcaaaggggggggggtaccctcccagggggaaccccgtgggcgggggagtgggaaagagaggacgttcttacaaaaggaaggcggaga

SEQ ID NO: 633710 - DNA, 134 bp, Homo sapiens
tacttcctcatcatgagactcggaattcctgttaacgcgtgagacttcagcctgtgcagatccagagcctggagacactgggggtgctggcacgagcagtgggtggagcccatgagtacgctggaatggaattg

SEQ ID NO: 633711 - DNA, 608 bp, Homo sapiens
atcccttcaggtcgctgaaagttggccaggaaatccaccagcgtgttaagtcctaacagtggaagatgccaacccctcttccttgctggagcaagctgaacgagcagtttaactgggtgtcccggctggccaacctcccgcaaggggaagaccagtactattttgggggccccccggtggctttccaccctttttaatcggacgttccctccggggtcccttagggggttgtgaagctcttttctcttgatcccctccctgtggcgggccccgtagaagtttcccggaaaaacccttaatttttgggggccctggcggagaaagccctgccggaattcccccaaaagccccggggggggttagatgtggatgttgcttttgcccccacggggggattttagtcccgcccccccccaaattaggtgcagcccccccaagagaggtttggccgtcccccagttacccgggccccgcctcccgggccccaactccgccccgcccctcccccctttgggtcccgccctcttacccccggctttgctggtcctggggagaaccgaattggtcccgcctgccccttattccataaaactgttttgtgggctgga

SEQ ID NO: 633712 - DNA, 237 bp, Homo sapiens
tgatttgcccttacaaaaaatgttgaaatgtaaaacttttgctagaagaacccagctgtaattcgatgtgtgtcgggagaaaacaacttagggccaagatgatgaaagctcgggggcactctaaatagggagagacacttttcagagaagagcccgggctatatagtgctaatgactcgcaatgtaaaaccttcagcaatgtgtaattgggccacgaggagcagcagtgtatatgtg

SEQ ID NO: 633713 - DNA, 252 bp, Homo sapiens
atggaatacacgcattcccatcatcttctgattcatcatcctgcaccctaggcccctagcgagcacccagggggctctcccatcctgcgctccactgagcttgcgcattgtcacagtgcctgtatcctgccagggcgtggcagggagggactcttagcacattgacatgtgcagcacctgaatgagcagggtgtgccagaccaggctagcatgtcctgaaggctcctgtccccatagtgatgggaaaggaat

SEQ ID NO: 633714 - DNA, 102 bp, Homo sapiens
agttcgacggagactctcatactgctgggtcatatgataattgttgcttcactttaaaataaacgctaaccgttttccaaattatctgtaccattgtgcatt

SEQ ID NO: 633715 - DNA, 1654 bp, Homo sapiens
tcggctgggcacaatattggtgttggtgttgatgccaacacagagcgcactgttttcgtggctgccaccgctcttttttggctggagggcttcgcttcacacaacaccccggcgtatcacatcatttgttgtctccctcttctgtctgtctctcacccgtcgactcaatgatcgcccggtgggttgttcctccaccttctgttgatgctctccctgcgtgggattgacctcacggtgatggccacagtgggcccctccgtggcaagcccacggttgtgtttgaaggtggtgggattgtggcctcccctctttgtttagggggacgtcccccccccaattgcggcgggtgcctacccctgcgtgtggaatccccccacacaaaaattgtgtgcgccgtgtgagaacaaaatgtgggagaatggcaacgggacagcacccttgtgtgacccggcctcgtggagagaaagtctctgcccttgaaccacgttcatccgccccatggagaccacacgcttgcatgttgtgggggtgccccgcccgcccctcgtctcacgacggggaacttgtgaacaggaattcttcctcgcacgccgaaattttaatttggcataacgatggagggggaataaaaattgggggtctcgtgtccggctgatcaacaccacctgtttttcgttgtcgtataagtttttgtgcccgccgtcagcaatagctctgtgggctgtcaacaagatggggtttataaatggaagtgggggcccccccctctgtggaagcccacatgtggaggggagtttttgttcccacaccgcgtcgatcaacggcggagagagtccttgtgccttgtggtagatgacggcccgcatatgagaggagaatcccaccagggaagatttttctctttccctcgcccacttctcgtttgcgccacaaagactctgggtgtcgcactcgccccctcggagaacccccttcggagagggggatgaaaccttttatatattctgctcgggaggatgtctcacactcccctcctctcttggggttttggaatacacccccacgctccctcataataagggagccacactttctctcgaggtgttaatagcacccgcgttgttgaaacactattgagagatgtgaccacagaggttattctccaccggtaaccttttcttctcacgcgattctcccggagtgtgccccctctgtgatataaacaagttgcgcaacacaccacactccacgggccacgccgacaataaatattgtaccccccgcccctaggatatttttaacataagagaaatctccaatattttcttttataagggacacaccgcctttctcaagtgccccttttttctccccagtgttttctcacagaggcgcgcccaagaatatgaatttgtgaaatataggaaatataacctcttatagttcttttcaccacccgaccactctctaccagaatttatgaaaaaaagtttaccgaccataatcttatgtttaccacgagaaaatctttttgcgtagaataccttttttaaaaggtatttttgtagatacccacatttaacctccttttttttttcccgccagtatcccacccacttggttttgcttccaataaatctttgggaaaactcca

SEQ ID NO: 633716 - DNA, 165 bp, Homo sapiens
gaactaaccaagcatgatgatgtctggaaggtcgacgtgtattcaccactgcggtgcatgctccctgtacaagttccgtcgacacgtgagcacgtggtgactccaaatatcgttaagctgtgaacctgtgtcgaactctagtaggatcctccagtacccgagcat

SEQ ID NO: 633717 - DNA, 80 bp, Homo sapiens
ctgcccagccctgtgctggggccctgcaattatgaatgttggccagatttctgcaataaacacttgtggtttgcggccaa

SEQ ID NO: 633718 - DNA, 262 bp, Homo sapiens
acaggatctcaaggctttaccgcctttttgagaatagccattctaacatatgcaaagtgatatttcattgtggttttgatttgcatttccccgatgaagagtgaagttgagcatctatccatgtgtctgccatcaatctgtacattttctttggaaaaatgtctgttcaggtcctctgcccattttttaacagtttttcacttctttgatgttaagttgtatgaattttttgtatgttttggatattaactagcggtaaaag

SEQ ID NO: 633719 - DNA, 343 bp, Homo sapiens
  misc_feature (328)..(328): n is a, c, g, or t
gcgtacactggcatcaagctacactccaaatctgtgcattattttcagattcatttgttccctcggcaggtaatccatattaagatgttttctagtctcttttttttcagctgtctagttttgttttgctgttttttgtttgtttgtttgtttgtttttttggttgtgcacatgggtattctgaatacctaggatttgctcaaagctaaaattcaaaaataaaatactttaaaatgaagcccttgtcagtctcttgccaaaacagttgtctctaaaattcaagtctttctagggcttcagactaaaaaacaaaacaggtacttgtccntaggtccatttaaat

SEQ ID NO: 633720 - DNA, 305 bp, Homo sapiens
cgacctagaggatccccactgacggggttatgggactgaaagaggacgttgtgcttgatactggggtgtgatagctcaacggggttacaaggtttcttctcacacatagactcgtgaggtcttccttgagctctttagagccttccctcgggataggatgaaatactgagatcctataaaggattcacaagacgagtcactcatcagtgcagattcacctgattcacccctagatgtgtgtgggatttggatcgcaaagagacacaggcactgaagatttttgtgccaggagaggggctctcaaa

SEQ ID NO: 633721 - DNA, 794 bp, Homo sapiens
ggaggagggaagcggctgagcatgtgacaagagcgaaagtccactgcctggcaaggacagcctagacacgggggaaagaagggacatggaggggctgagccctgtcacacgtcatgccctgcatgccgggctggacatggagaagctgagctgtgcagtctggagctgaggctgggaagccctgatacatggcttagaaggtgagttggtgacaactggactggttccccagcaggtgcaagcaccagagtgatgggaacagcccctgctgccaggagcccacgggggggagtgtgcacgtgtgtgcgtgtgtgtaggtgtatcctgtgtgcacagatggtatgttcaatagattgtgtacgttgtcttgtgcattgtgtagcggtgtgtagaggagagatactagtacataaggatgtggtggagaatatgtacaatagtagtgcaggtagtagtagtggatagtctgcccttatagtgtagagcaacattgctgttgctgattgggtgcctatgatagcttatctaattaacacggcccgaaaggaccaaacatagtataggcacatttctaatagatcggttaactgattacatagagcataaaagccccaattttatgggaataacttgcagaatcaaacaaggttcattgatgggactataatgtagaacgaacaggccccggttcaatacaagctgggacatttccccacgtcatgtactgaagagttgcgattgataattcagaaggctccaattaaataggcgccactaacaatgtgaaacacccg

SEQ ID NO: 633722 - DNA, 108 bp, Homo sapiens
  misc_feature (1)..(1): n is a, c, g, or t
ntccatcgtgcagcaagcatcacccaacgtgccagcaagcatttctgcgaggcatacaggtgcatcttcgtgccacgcatgcaggtgcatcgttcgtgccacgctata

SEQ ID NO: 633723 - DNA, 376 bp, Homo sapiens
aagatatttttaccccagtttgagatatattctgaacaattaaatgtcccaggaatacattttttcctagtacctatgtttttcagagttctaaaggattatttttcgctgggcacagtggctcatgcctataatcccagcactttgggaggccgaggcaggcacattgcttgagctctggagttcgaggccagcctgggcaacatggtgaaacccaatctttacaaaaaatacgccaagaaaaaaaaatagctggacatggtggcacatgcctgtagtcccagctactggggaggctgaggcgggaggatcacctgagcccagggagggagaggttgcagtgagctgagatcatgccactgcactccaccctgga

SEQ ID NO: 633724 - DNA, 486 bp, Homo sapiens
ggcacgaggcgcatttcaggagtgggcatctcagccccctggccaaggactgcgttctgagaaagagcttcattgatcttaccggtaggcagacgggtggttcgcactctttcttgctgacgagaaccagggctctccagccgctcctggcagccgtcttgtcaccatgagggaacccaagaggaggaccaagatgtggagccggacccttgatcagacctctcctgaatcccgcctctgggcttcccagtaagatccctgactgtttgggctgagtttctattttctggagctgaacacatcggctgaaatagccagactgtccaacaggcaggttaagcccctggttcacgtgtttgtcacccatcctcaccttccagatgtccagtcccatgagggtggactgtgtccctgctgcgtcccctgactagaacggggtggacacagagtacacagtacgtgcaaaataaatactgttgaatgcaa

SEQ ID NO: 633725 - DNA, 953 bp, Homo sapiens
gtagcgcacgacggtgcgccgcacccctcttccccctcgaatccaccgctctgccgcctccgttcgttctgccgcttccctggtgcttgctctgctgttgcctcgctcataggtagcggaccctggttaccttcatctttgctgacacgccggcacgcctgcaggcagactcccggtcgccatcgccacactggacacgaccgtaacaaaggcgccaaaggcacacggcagatcaaacgaccttgcagtatacagaacgaactccactacttcaacatctctgcacacgcgatgcgcccgcgaggcccacgcgcacatgcgcttctccttgcctgagaatggccacgcccttctacccgcaagttctcaacgcaacggccaactaatcccacacaaaccgatataaggcgtaccaacacccttacaccctggcacacacagccccgattactttggctggaaaagccgaaccccagcggtgcaacttatggctcacaaaattgacaggggccaatgcaaccttcaacgaaactttatccccggaacttctctggcaacccggaggagacccaaacacccccaacacgttccacacaccttgtcaaccacaacccaacagaaacaaaaccgaatccccaattgacccaaaaccaagcggctcagtcggccccccaccactttgggcgcaacgggcggcacactggcactccgcggcaactttacacacaaaaacgattgtctgggaaagatttggagatgaggatatataacccccaatgaagccaaagatgctccacatcggcgaaaccgcggatgggggacaacgacggggactgagcatttccactaaaacccctttgcgtgacaacactaacaactggacggggggaaacaaaagcccccgcttgggacacagcttatatcacactttacctattacaaccctattatcc

SEQ ID NO: 633726 - DNA, 364 bp, Homo sapiens
  misc_feature (1)..(1): n is a, c, g, or t
nagacctagaggaccccgagtctacaccaacgttttgatacacgaactggatccaaaagacctttagccaaggaccccgcatgtgaatctacctcccgacctaccaccccactggctggttccagaacgtctctacctagaccttgcctcccctccttcctgcccagtctgaccctgatgcttaataaacgcacgacgtgagggtcctgattctccctggttttaccccagtccatccttgcatcactggggaggacgtgatgaggggacttgggtcttggtcttacccccaccactagagaatacaggaaaatccttctagatctcttttaccggccatgggtccgagctgaattgaatcagg

SEQ ID NO: 633727 - DNA, 184 bp, Homo sapiens
gcactactgacccttatagcatgatgaactcctcgacagctcagctgttgtctgcatttgtgtcaggtcctccatgatgtgttctatgacctatttcattcttattctccttcttgagaaaatttatgcagatcttttctgcaccagctctattgaattccccacaagttggggtacctgagct

SEQ ID NO: 633728 - DNA, 413 bp, Homo sapiens
acaggggagctggtgtacccaggatgggtttatgggcgtcgaggtctacaggtaccaaacacaaacagctcttgacctgggtactctgaggatgggaaattcatcctgccagcctgtctttgaggctcagtctcaggggctggtacggttccacatacccctgaatggatgtggaacgagatataaggttagtactggcagatggcacgaggttaagtctcatctttgacataactggctgctaacccactttctctgacatttaagttcgaagatgattaaagtcgtctatgaaaacgaaatacatgctctctggacggattttcctccaagcaaaatatctagagacagtgagttcagaatgacagtgaagtgttcttatagcaggaatgacatgctactaaacatcaacg

SEQ ID NO: 633729 - DNA, 583 bp, Homo sapiens
  misc_feature (302)..(302): n is a, c, g, or t
ttttctcattttaattggacaaaaaaagtggctctggcatgtacagattttaaaaaaccaaaagtgcctttaaaaaacattgaaaagtgggggggaggggtacaaaaccttcagtgggggacagatagggaccaactaaattccaacttccgtgcccctttcctttcacagaaaaacacctttattaacaaccttcacagttccacaacacagccattacaaaaatacacccgcgtgggaacactttacgtggaaataacacggtgtggaggcacagtgaccatccgcgtgtgccgctgtgnaacactcaacgagggcgtggggagaatatctcgcgtgaaaaagcggtgggataatactcaccgagcaccgcgactacacccacacgaggacacacacccgcaacaacaagcaagaaaaaaggagacaagaacaagaggacaaaccgaagcagaacaaagcagaaagcagagaaccacaacaaagcaacaggaagcagaaaaccacagaacgagaaacaagaagacgaggaagacgacgaggagagaagggacaacaacacaaagacaaccaaagaaacaaa

SEQ ID NO: 633730 - DNA, 150 bp, Homo sapiens
  misc_feature (69)..(69): n is a, c, g, or t
  misc_feature (118)..(118): n is a, c, g, or t
actatgaagatggggcttttggaattcgcattgagaatgttgccttgtggttcctgtgaagaccaagtntaattttaataacccggggaagcctgacctttgaacctctaacattggntccttcagacctgatagatgtggattctcttc

SEQ ID NO: 633731 - DNA, 382 bp, Homo sapiens
ggctgcagtgcactccacccgtgggttaagagggagactccgcctcaaaaaaaacaaaaatggtggctaaagtataaatgtcggggggctggggtcgaaggaggcactgttagaaagtgacaagctccacagaaaagcagcgagtctctttcctgagtctgtttctctgagtctcttctttggggtatgtggtcataacttgaagtccaggggggtgtatacaaatggtgggggtgcgggtgaactcgcaggatagcgactaggggggctgtgacggctttggcccccaggacactgaggtgtatggggcatatcaacgtaaagtcaggagaaccactgttgcagggccatggccgtaagcggctggcataggagacccgga

SEQ ID NO: 633732 - DNA, 1431 bp, Homo sapiens
ccctccatggttactctccgctcccgtgagtaacttgtgctccgtgggtgctcctggtctgcctgtcccgacactgcactgccctgcacacccattggaccgacgacctgcctggctctacctgcacagcatacggcaaagcccttacctgagcaggctcgctcgctgcggcaatgcctgggactgcctctccacccctcctggcaccgtgcgcggcaaatgttaacgtttgaacgacggggcggaagatgggtgtaaccatggtaccattgaagaggccggactccactctgcgagtctgatggaatccggtaacaccctggcagactgttcgagcaaccttgctctatggcaccgacaacttcgcacagattcacacatgaatgcgcacacaaagtgtgcatgggccatctaagcagtctgcaacacctctcggtggaacctatcagcagcttccgtccaggtaatactaacgtcacaactgctagcgcctctgcatcctacaggttttcaaagtcctcacactcaaacgcactgcacgtacacattctgcaaacacacgctatggaaacctccaggtggagacgatacgaattccttcctggcagggtcttgcgaccattgtctagcctcggccaccacgaccttccaaacatcctccaccacgttctaagaacctctacacagtgggaacacttcacatcttggcgaccgaatagtccaggccacacccttagggaaacccctgtttggaccgcaacagttacgcacattggccttgaagagaaggccctgcgaagcctcctcatgaaccttgtgcacgcgctaacccaacgcttgacactgacgtacccgaagacgcaccgacgtacattcaaaagccgtgcttgggcgccccaagcattcacccaaaacgcaggggaatcggcgaactcgaccccggagagcgcaccacgggaacaggcaacccctgaacgccacggagcgccccgaacgcggcacgggcggacgggaacgaaccaacgggacagacgagacgaaagcacccgcgcaaacgcatcgcgccacgcacccgcggcgatcaaaccacagggtgaacaaacgcaggggacgacgcgcgcagcacaaggacgcgccatcagaagcctaccacggacagtgaggacaatagccacgtggacggccaccaacattcgaagcaggagcacgaaacggcagcgtaccgaggagcgacataggctagcgaaacgaagcggcgcccccgccgcacacaaccagagggagggacaagaagcgagaagaacaggagaggaagggagggacagacggtaaagcgtggcccagcaccgagcagagagcacgcacgacggggcagccatctccccttagcgacgtgaccgagccaagcaaggacagtcgagaggacgcggg

SEQ ID NO: 633733 - DNA, 99 bp, Homo sapiens
aaaaaggggcaaattttttttagtttgggcccccccccggggttttttcccaaaaaaaaaagggggggggggggggcctttaaatccctttttccctca

SEQ ID NO: 633734 - DNA, 3647 bp, Homo sapiens
ataagctgaattatggcagcccagtcaagtttgtacaatgacgacagaaacctgcttcgaattagagagaaggaaagacgcaaccaggaagcccaccaagagaaagaggcatttcctgaaaagattcccctttttggagagccctacaggacagcaaaaggtgatgagctgtctagtcgaatacagaacatgttgggaaactacgaagaagtgaaggagttccttagtactaagtctcacactcatcgcctggatgcttctgaaaataggttgggaaagccgaaatatcctttaattcctgacaaagggagcagcattccatccagctccttccacactagtgtccaccaccagtccattcacactcctgcgtctggaccactttctgttggcaacattagccacaatccaaagatggcgcagccaagaactgaaccaatgccaagtctccatgccaaaagctgcggcccaccggacagccagcacctgacccaggatcgccttggtcaggaggggttcggctctagtcatcacaagaaaggtgaccgaagagctgacggagaccactgtgcttcggtgacagattcggctccagagagggagctttctcccttaatctctttgccttccccagttccccctttgtcacctatacattccaaccagcaaactcttccccggacgcaaggaagcagcaaggttcatggcagcagcaataacagtaaaggctattgcccagccaaatctcccaaggacctagcagtgaaagtccatgataaagagacccctcaagacagtttggtggcccctgcccagccgccttctcagacatttccacctccctccctcccctcaaaaagtgttgcaatgcagcagaagcccacggcttatgtccggcccatggatggtcaagatcaggcccctagtgaatcccctgaactgaaaccactgccggaggactatcgacagcagacctttgaaaaaacagacttgaaagtgcctgccaaagccaagctcaccaaactgaagatgccttctcagtcagttgagcagacctactccaatgaagtccattgtgttgaagagattctgaaggaaatgacccattcatggccgcctcctttgacagcaatacatacgcctagtacagctgagccatccaagtttcctttccctacaaaggactctcagcatgtcagttctgtaacccaaaaccaaaaacaatatgatacatcttcaaaaactcactcaaattctcagcaaggaacgtcatccatgctcgaagacgaccttcagctcagtgacagtgaggacagtgacagtgaacaaaccccagagaagcctccctcctcatctgcacctccaagtgctccacagtcccttccagaaccagtggcatcagcacattccagcagtgcagagtcagaaagcaccagtgactcagacagttcctcagactcagagagcgagagcagttcaagtgacagcgaagaaaatgagcccctagaaaccccagctccggagcctgagcctccaacaacaaacaaatggcagctggacaactggctgaccaaagtcagccagccagctgcgccaccagagggccccaggagcacagagcccccacggcggcacccagagagtaagggcagcagcgacagtgccacgagtcaggagcattctgaatccaaagatcctccccctaaaagctccagcaaagccccccgggccccacccgaagccccccaccccggaaagaggagctgtcagaagtctccggcacagcaggagcccccacaaaggcaaaccgttggaaccaaacaacccaaaaaacctgtcaaggcctctgcccgggcaggttcacggaccagcctgcaggggggaagggagccagggcttcttccctatggctcccgagaccagacttccaaagacaagcccaaggtgaagacgaaaggacggccccgggccgcagcaagcaacgaacccaagccagcagtgcccccctccagtgagaagaagaagcacaagagctccctccctgccccctctaaggctctctcaggcccagaacccgcgaaggacaatgtggaggacaggacccctgagcactttgctcttgttcccctgactgagagccagggcccaccccacagtggcagcggcagcaggactagtggctgccgccaagccgtggtggtccaggaggacagccgcaaagacagactcccattgcctttgagagacaccaagctgctctcaccgctcagggacactcctcccccacaaagcttgatggtgaagatcaccctagacctgctctctcggataccccagcctcccgggaaggggagccgccagaggaaagcagaagataaacagccgcccgcagggaagaagcacagctctgagaagaggagctcagacagctcaagcaagttggccaaaaagagaaagggtgaagcagaaagagactgtgataacaagaaaatcagactggagaaggaaatcaaatcacagtcatcttcatcttcatcctcccacaaagaatcttctaaaacaaagccctccaggccctcctcacagtcctcaaagaaggaaatgctccccccgccacccgtgtcctcgtcctcccagaagccagccaagcctgcacttaagaggtcaaggcgggaagcagacacctgtggccaggaccctccaaaagtgccagcagtaccaagagtcaaccacaaagactcttccattcccaagcagagaagagtagaggggaagggctccagaagctcctcggcagacaagggttcttccggagatactgcaaatccttttccagtgccttctttgccaaatggtaactctaaaccagggaagcctcaagtgaagtttgacaaacaacaagcagaccttcacatgagggaggcaaaaaagatgaagcagaaagcagagttaatgacggacagggttggaaaggcttttaagtacctggaagccgtcttgtccttcaatgagtgcggaattgccacagagtctgaaagccagtcatccaagtcagcttactctgtctactcagaaactgtagatctcattaaattcataatgtcattaaaatccttctcagatgccacagcgccaacacaagagaaaatatttgctgttttatgcatgcgttgccagtccattttgaacatggcgatgtttcgttgtaaaaaagacatagcaataaagtattctcgtactcttaataaacacttcgagagttcttccaaagtcgcccaggcaccttctccatgcattgcaagaagcacaggcacaccatcccctctttccccaatgccttctcctgccagctccgtagggtcccagtcaagtgctggcagtgtggggagcagtggggtggctgccactatcagcaccccagtcaccatccagataatgacatcttcctatgtcaccatcacatcccatgttcttaccgcctttgacctttgggaacaggccgaggccctcacgaggaagaataaagaattctttgctcggctcagacaaatgtgtgcaccttggccctcaacagcagtttggtggacctggtgcactatacacgacagggttttcagcagctacaagaattaaccaaaacaccttaa

SEQ ID NO: 633735 - DNA, 1218 bp, Homo sapiens
gggcagtgcaagccgagcgggcgctggcacagaggcctgaccatggacgcggaatacgatgtgatcgtgctggggaccggtctcaccgaatgcatcctgtcgggcatcatgtctgtgaacgggcacgaaggtgctgcacatggacctggaacccctactacggtgggcgagagctcctccatcacacgcccatggatggagctgtataagcgtttaacagttgctggaggggccccactgagtcgatgggccgaggacagagaacttggaatgtagacctgattcccaaaattcctcatggctaaactgtggcagcatgtgtacaggatgctacttgtatcacagaggtagacgtcgcataacatggacttcaatgtgttggtgcgagtgggcaagctattgtcctacaaaggtgggcgcaagcatctacaaacgtggccgtaccactgacgactgaggcctatggcttccaatctgcatggtgcatgttatgagaaactggcgctatcctgaaaagtatcctggtagtaatgtggccaactaacgatagagcaatgacacccaaagcagcttttgcagggggccgtatgaccacacacaaggaagtaccccagtaaagtgcgatgaaccggtcttaacccaggacacagtatatatggaatcctggcggacccaagggaactaggttcacaaccgaccatactatcacactggggacccattgcacccctagagggcgagacatacttacacctgcagaacctggagtggaacatagaccccatagggaaacccaagaaccctagaccccttatgaaagacaaaccccgataccgaaaaccaggggagattcaacaggactcgatcaccgaagagtggacggagacccatagggagcaaccagagtagcaatgggacaaaacgaaaaccacgccgaagataacttagataaataacgcacccggggataccatacaacgaggagcataatggacacaggcaaggccgttggcacccaacaacgcggcaataatgaggaacacacgcaaactataggcagcgggggcgcccaacaccaaatatgtggggaggaggcagaacagttacggtaatgagacgatggcaccaagaaaaaagcacacagagaggaagggaacaggaacacagacaccacacacgccagggaacgacagcacggcgaccacaggactgagagac

SEQ ID NO: 633736 - DNA, 2614 bp, Homo sapiens
gcaaacagaaaaaagtggctccccgcccaagtatccctgtaaaacaaaaaccaaaagaaaaggaaatgacccattcatggccgcctcctttgacagcaatacatacgcctagtacagctgagccatccaagtttcctttccctacaaaggactctcagcatgtcagttctgtaacccaaaaccaaaaacaatatgatacatcttcaaaaactcactcaaattctcagcaaggaacgtcatccatgctcgaagacgaccttcagctcagtgacagtgaggacagtgacagtgaacaaaccccagagaagcctccctcctcatctgcacctccaagtgctccacagtcccttccagaaccagtggcatcagcacattccagcagtgcagagtcagaaagcaccagtgactcagacagttcctcagactcagagagcgagagcagttcaagtgacagcgaagaaaatgagcccctagaaaccccagctccggagcctgagcctccaacaacaaacaaatggcagctggacaactggctgaccaaagtcagccagccagctgcgccaccagagggccccaggagcacagagcccccacggcggcacccagagagtaagggcagcagcgacagtgccacgagtcaggagcattctgaatccaaagatcctccccctaaaagctccagcaaagccccccgggccccacccgaagccccccaccccggaaagaggagctgtcagaagtctccggcacagcaggagcccccacaaaggcaaaccgttggaaccaaacaacccaaaaaacctgtcaaggcctctgcccgggcaggttcacggaccagcctgcaggggggaagggagccagggcttcttccctatggctcccgagaccagacttccaaagacaagcccaaggtgaagacgaaaggacggccccgggccgcagcaagcaacgaacccaagccagcagtgcccccctccagtgagaagaagaagcacaagagctccctccctgccccctctaaggctctctcaggcccagaacccgcgaaggacaatgtggaggacaggacccctgagcactttgctcttgttcccctgactgagagccagggcccaccccacagtggcagcggcagcaggactagtggctgccgccaagccgtggtggtccaggaggacagccgcaaagacagactcccattgcctttgagagacaccaagctgctctcaccgctcagggacactcctcccccacaaagcttgatggtgaagatcaccctagacctgctctctcggataccccagcctcccgggaaggggagccgccagaggaaagcagaagataaacagccgcccgcagggaagaagcacagctctgagaagaggagctcagacagctcaagcaagttggccaaaaagagaaagggtgaagcagaaagagactgtgataacaagaaaatcagactggagaaggaaatcaaatcacagtcatcttcatcttcatcctcccacaaagaatcttctaaaacaaagccctccaggccctcctcacagtcctcaaagaaggaaatgctccccccgccacccgtgtcctcgtcctcccagaagccagccaagcctgcacttaagaggtcaaggcgggaagcagacacctgtggccaggaccctccaaaagtgccagcagtaccaagagtcaaccacaaagactcttccattcccaagcagagaagagtagaggggaagggctccagaagctcctcggcagacaagggttcttccggagatactgcaaatccttttccagtgccttctttgccaaatggtaactctaaaccagggaagcctcaagtgaagtttgacaaacaacaagcagaccttcacatgagggaggcaaaaaagatgaagcagaaagcagagttaatgacggacagggttggaaaggcttttaagtacctggaagccgtcttgtccttcaatgagtgcggaattgccacagagtctgaaagccagtcatccaagtcagcttactctgtctactcagaaactgtagatctcattaaattcataatgtcattaaaatccttctcagatgccacagcgccaacacaagagaaaatatttgctgttttatgcatgcgttgccagtccattttgaacatggcgatgtttcgttgtaaaaaagacatagcaataaagtattctcgtactcttaataaacacttcgagagttcttccaaagtcgcccaggcaccttctccatgcattgcaagaagcacaggcacaccatcccctctttccccaatgccttctcctgccagctccgtagggtcccagtcaagtgctggcagtgtggggagcagtggggtggctgccactatcagcaccccagtcaccatccagataatgacatcttcctatgtcaccatcacatcccatgttcttaccgcctttgacctttgggaacaggccgaggccctcacgaggaagaataaagaattctttgctcggctcagacaaatgtgtgcaccttggccctcaacagcagtttggtggacctggtgcactatacacgacagggttttcagcagctacaagaattaaccaaaacaccttaa

SEQ ID NO: 633737 - DNA, 127 bp, Homo sapiens
gatcccttaagcagctcgttcttccatggagcatctgtctctcattagtaatgttcttcttctttgactcagttcaagtagttttacaatatgtacaggagttcttggaacgatagcttttggtttt

SEQ ID NO: 633738 - DNA, 696 bp, Homo sapiens
  misc_feature (209)..(209): n is a, c, g, or t
ggatgttcggtcctgttctcctgtgcgagcgggtggcgccgcgctctcttggtggcgcgagggtcttctcggtccccgtgggggggtgccgttgagtatcatacgacacgcgctggttgcgttgggtcacctcgcgttgggtcgcgggcggttgcctaaggtagatatccttcctttgcaagggggggttttccgcggctcctttcccncccctccctcgggggtaagagcgccaccaggagttttttttttgggcgccccgggtgggggccccaccacaagtgttgggttaaccaagggccccggcgcgggcccccaggtggggtttttttctctcgggggagggggggctttcaaggggggaaaaaggttttctttcccccggggggggggggggggggttccctcctaccccttttcccccccttttttggcccccccaaacccccggttttgggatttggggggggggggcccccccccctttttcggggggcccggggggaaggggaaaagggggcccctttttccccttttttggggggggggtcccccttccccttggggggggggggggggcccccgggccccgggggtttgggggggggggttttttggggggttttttttttaaaccaggggggttttttttttaaacccccattttttggggggggaaaaaagggtttttttgga

SEQ ID NO: 633739 - DNA, 413 bp, Homo sapiens
gtcaggagttagaggtggcagtgggcgtgcaggagaagctgtaggtcaggaggtagaggtggcagtgggcgtgcaggagaagctgtaggtcaggaggtagaggtggcagtgggcgtgcaggagaagctgtaggtcgggaggtagaggtggcagtgggcgtgcaggagaagctgtaggtcgggaggtagaggtggcagtgggcgtgcaggagaagctgtaggtcggggggtagaggtggcagtgggcgtgcaggagaagctgtaggtcggagggtagaggtggcagtgggcgtgcaggagaagctgtaggtcagagtggagaggtggcagtgggcgtgcaggagaagctgtaggtcgggaggtagaggtggcagtgggaatgccaggaagaaactgggtcttcggggtcgacgc

SEQ ID NO: 633740 - DNA, 394 bp, Homo sapiens
gtcaggagttagaggtggcagtgggcgtgcaggagaagctgtaggtcaggaggtagaggtggcagtgggcgtgcaggagaagctgtaggtcaggaggtagaggtggcagtgggcgtgcaggagaagctgtaggtcgggaggtagaggtggcagtgggcgtgcaggagaagctgtaggtcgggaggtagaggtggcagtgggcgtgcaggagaagctgtaggtcggggggtagaggtggcagtgggcgtgcaggagaagctgtaggtcagggggtagaggtggggagactgactcaaagccatgccaaggtacagagtagagcagatgattaaacatcatgatgtgaattgcttctgagcagggcccataaataactatcattttaagtcgacgc

SEQ ID NO: 633741 - DNA, 466 bp, Homo sapiens
  misc_feature (135)..(135): n is a, c, g, or t
  misc_feature (163)..(163): n is a, c, g, or t
  misc_feature (175)..(175): n is a, c, g, or t
  misc_feature (236)..(236): n is a, c, g, or t
gccgggcgcggtggcgcgtgcctgtagtctcagcctcctaagtagctgagattatggttatgtgccaccacacccagctaattttgtatttttagtagagacaggacttcactgcgtttgccaggatggtctcanactcctgatctccggtcacctgcccctnttggcctcccanaatgctgggattacaggcgtgagccaccgttcccagccaagtaaacccttttttaaaaaanaaaagaatggatgttcttataatgtattacctaggagattatgcatttatatattctgtactctaaaaagaaagaggttagtaacatttttctttctaaaaacgttttcccccttcccaaaagctgccttatgaggatacatagttatgaggatattaaaaataggaacaaaagaagaatgtgagcagtgacagggatacaacatggcaccttccaagaggttaatactg

SEQ ID NO: 633742 - DNA, 322 bp, Homo sapiens
gtcaggagttagaggtggcagtgggcgtgcaggagaagctgtaggtcaggaggtagaggtggcagtgggcgtgcaggagaagctgtaggtcaggaggtagaggtggcagtgggcgtgcaggagaagctgtaggtcgggaggtagaggtggcagtgggcgtgcaggagaagctgtaggtcgggaggtagaggtggcagtgggcgtgcaggagaagctgtaggtcggggggtagaggtggcagtgggcgtgcaggagaagctgtagggagtcgcttgactgcttggcccgggtaggccggtgtggctgagtgtccagtcgacgc

SEQ ID NO: 633743 - DNA, 118 bp, Homo sapiens
  misc_feature (5)..(5): n is a, c, g, or t
  misc_feature (109)..(109): n is a, c, g, or t
gtctnggacctactccggggcctgccgcgtgtgagcctggccaacttaaagccgaatcccggctccaagaaaccggagagaagaccaagaggtcggagaagaggtaganaatgtggaa

SEQ ID NO: 633744 - DNA, 379 bp, Homo sapiens
  misc_feature (47)..(47): n is a, c, g, or t
  misc_feature (51)..(51): n is a, c, g, or t
  misc_feature (138)..(138): n is a, c, g, or t
  misc_feature (200)..(200): n is a, c, g, or t
  misc_feature (203)..(203): n is a, c, g, or t
  misc_feature (257)..(257): n is a, c, g, or t
ccagagttaaatatgcccaggctgaaagaaggtgtataatgtatggncgtncttataccaaatgatttctttggaatttaaacaaatatgtttagtattttattcctaatttaggaagaaaaagcaactaaagttgtnctgacattgtacacagatgagtagcacgtaacttttatttagtaagccccataggatagtanggnataaaagttgttagtgagcaaaacaggagtatcctgccatttgctttaattctncttgtgatagttttgagggtacaataattcctgtgtgcgtgtcactcaagcaaaccagaaagtgtcttttgtaaatacgcattttgggcctcatcctcatggaggttcccgttgtttgttgg

SEQ ID NO: 633745 - DNA, 1690 bp, Homo sapiens
tgtttgttttcgtcgtttgttttgttcttgttatgttgtttgtcttgttcggttttctgtgtgtgtgttttcttctttgtttgttctgttgtgttgttgtgtcgttttggttcgttctgtgtttgcgtatctgttctttgtgttgatgtttggtttgtcagatgaggtcgcacgcaggcggcgacgtgcgcggcgccttgcgacgacagcacgagtatggtcatcctctatgttggcctgtcgcgccgttgtgttttttttcgtagacaggtggcttgtctgcttggtggatgttatgtacatcacacgagggcggcgtagttgtgggcccccgttgaaatggcgaggtttccccgagagaggaaaaggcccttggtgctcacattttgttgttgcgcccaagtgttcgctcggcccgcggtgttctcgcaatggtccttgtgtgctcatataattatcccgcgtgtgtcagcaaggggcctgtgagattgtgcggtgaccctcttgcccacagcctgcccccttgtggaatcccatgtttggaggtccctttaatggaatgaagcctggtccctctcccttgatgtaggaccccatctttgtgagggataatctcccagataaccccgtttatgggggccgcccaagttgggggaacgccccccaacggtcccaaaattttgggaagaagtgtggaatatccccccccgttccccgggggctgtaccccgaatttctgttcctggctccgcctcaggatgtctccccttgggatatggtggaccccaataggcttggagaagccgccctcaataaatagtgaagagttctcaattgtgtcgccgggacagcctcgaagatctaccctcgtgtatagagtatagtcgctgtggaagcccccttgtgggtgtcgcaaccacacaagccgccgggggccttggagacagagaagtgtgtgaccccccggggatagtggtctccactggtgcgcaacacacacagggagatgcactgcgcctctccacagaggttgtgcgccaccggggtcatcccgacagggtgttatactattgagactccctgtcggggcggcgcaccacccccctttctacagggtgtcttcttgtagcagagattctgagagcgtctcacgattcacacacacgcgctgagcgccactgtgagaaggctgcgcctctgtgagaagaccaccacctgtgccacagagaaaacgcgagggccgcgcctcttggagagaccccacgcctgtgcgcactatatcccagcgcgcctgaatcacaccgggtattctgtacaggcccccgcctggggcgaatgttgcgaagccttaatataggtgagcgcgtcacgagattcacaggagtataccacagcgcgctcactggagcactcacacatttcgcgcgctggagagaacgcgagagttgccaccgctatccgcacgcctcgcttcgaagggacccacggagaagaatcacactacacaccacacatttgttctgcctccccaaggttcctctctcgaaggcaagcccaggactctgcgggcttttgtctgtcccttggagggtgttttctgggtagagggatgtggaaggaagggaccccttaccccccgctcttctccctgaccctgtcccaatataaaattttatggtcaccaagggga

SEQ ID NO: 633746 - DNA, 204 bp, Homo sapiens
  misc_feature (113)..(113): n is a, c, g, or t
gctccacgacggggtggcctagaactgaacacacaatatcttcaaggtcagcctatatgagagacagcctcctgctcctaggccacagacctgtaaagcatgttactgtacgntgaatactgtagagcaaattgttacagcatggtaacgtatttagtcgtcgtctaaacacagtttaaagcacagaaaaaagtaggctgggat

SEQ ID NO: 633747 - DNA, 140 bp, Homo sapiens
  misc_feature (42)..(42): n is a, c, g, or t
  misc_feature (81)..(81): n is a, c, g, or t
  misc_feature (128)..(128): n is a, c, g, or t
  misc_feature (137)..(137): n is a, c, g, or t
cttccgggaatcttggtctgaaacaagccgggcctccccagntgcctgggcttaaccggcggggagcctggttggcctttnttatttatatagagaacacttcactgttttgtacatttttaagtggncttcagggnagc

SEQ ID NO: 633748 - DNA, 110 bp, Homo sapiens
  misc_feature (2)..(2): n is a, c, g, or t
gnttacaaagctgtttaaagaaaaaggtatatataagggaagtcctaaattaaagaatagaactagataatgctggacatgtagctgacctgtcttttgcatttgcagag

SEQ ID NO: 633749 - DNA, 1112 bp, Homo sapiens
  misc_feature (906)..(906): n is a, c, g, or t
ggccgtcgctctccaacgccagcgccgcctctcgctcgccgagctccagccgaaggagaaggggggtaagtaaggaggtctctgtaccatggctcgtacaaagcagactgcccgcaaatcgaccggtggtaaagcacccaggaagcaactggctacaaaagccgctcgcaagagtgcgccctctactggaggggtgaagaaacctcatcgttacaggcctggtactgtggcgctccgtgaaattagacgttatcagaagtccactgaacttctgattcgcaaacttcccttccagcgtctggtgcgagaaattgctcaggactttaaaacagatctgcgcttccagagcgcagctatcggtgctttgcaggaggcaagtgaggcctatctggttggcctttttgaagacaccaacctgtgtgctatccatgccaaacgtgtaacaattatgccaaaagacatccagctagcacgccgcatacgtggagaacgtgcttaagaatccactatgatgggaaacatttcattctcaaaaaaaaaaaaaaaatttctcttcttccggttatgggtagttctgaacgttagatattttttttccatggggtcaaaaggtacctaagtatatgattgcgagtggaaaaataggggacagaaatcaggtattggcagtttttccattttcatttgtgtgtgaatttttaatataaatgcggagacgtaaagcattaatgcaagttaaaatgtttcagtgaacaagtttcagcggttcaactttataataattataaataaacctgttaaatttttctggacaatgccagcatttggatttttttaaaacaagtaaatttcttattgatggcaactaaatggtgtttgtagcattttatcatacagtagattccntccattcactatacttttcataactggagtttgtcctacatggcaacgtaccgtgttttaaacgggtcgcacggcctcctggtgcctgtccctggtaagttgggcaatttaaaatttactttaacccaaaaaaacaacaacaaggacacacgaacacaaaaacctttgcccggcctcttcgggccccgaaaagaggtttgtatacg

SEQ ID NO: 633750 - DNA, 980 bp, Homo sapiens
ggccgtcgctctccaacgccagcgccgcctctcgctcgccgagctccagccgaaggagaaggggggtaagtaaggaggtctctgtaccatggctcgtacaaagcagactgcccgcaaatcgaccggtggtaaagcacccaggaagcaactggctacaaaagccgctcgcaagagtgcgccctctactggaggggtgaagaaacctcatcgttacaggcctggtactgtggcgctccgtgaaattagacgttatcagaagtccactgaacttctgattcgcaaacttcccttccagcgtctggtgcgagaaattgctcaggactttaaaacagatctgcgcttccagagcgcagctatcggtgctttgcaggaggcaagtgaggcctatctggttggcctttttgaagacaccaacctgtgtgctatccatgccaaacgtgtaacaattatgccaaaagacatccagctagcacgccgcatacgtggagaacgtgcttaagaatccactatgatgggaaacatttcattctcaaaaaaaaaaaaaaaatttctcttcttccggttatgggtagttctgaacgttagatattttttttccatggggtcaaaaggtacctaagtatatgattgcgagtggaaaaataggggacagaaatcaggtattggcagtttttccattttcatttgtgtgtgaatttttaatataaatgcggagacgtaaagcattaatgcaagttaaaatgtttcagtgaacaagtttcagcggttcaactttataataattataaataaacctgttaaatttttctggacaatgccagcatttggatttttttaaaacagctatcggtgctttgcaggaggcaagtgaggcctatctggttggcctttttgaagacaccaacctgtgtgctatccatgccaaacgtgtaacaattatgccaaaagacatccagctagcacgccgatacgtggagaac

SEQ ID NO: 633751 - DNA, 690 bp, Homo sapiens
ggccgtcgctctccaacgccagcgccgcctctcgctcgccgagctccagccgaaggagaaggggggtaagtaaggaggtctctgtaccatggctcgtacaaagcagactgcccgcaaatcgaccggtggtaaagcacccaggaagcaactggctacaaaagccgctcgcaagagtgcgccctctactggaggggtgaagaaacctcatcgttacaggcctggtactgtggcgctccgtgaaattagacgttatcagaagtccactgaacttctgattcgcaaacttcccttccagcgtctggtgcgagaaattgctcaggactttaaaacagatctgcgcttccagagcgcagctatcggtgctttgcaggaggcaagtgaggcctatctggttggcctttttgaagacaccaacctgtgtgctatccatgccaaacgtgtaacaattatgccaaaagacatccagctagcacgccgcatacgtggagaacgtgcttaagaatccactatgatgggaaacatttcattctcaaaaaaaaaaaaaaaaaaaaaaaacttttggggcgcctgcggcccgaaaaaattttttaaacacattccgttgggcgccccgggccccctggttgtacctgtggccacggtccccaagaaacacccggggcccgtgtctggggttctcctccccttaaa

SEQ ID NO: 633752 - DNA, 348 bp, Homo sapiens
  misc_feature (348)..(348): n is a, c, g, or t
actggatagaggtcaggtgcacggatgtgagaagcgaacctgggcctgcttgatagaagcctatgaaagggaaagcgatcagagctgtgagcttaagatacgccatggtgttgatcgccagggcaagtatcctgaggagtgctcactctgaggatcatgtgcataactgaaagaaggactgagagagatactcatgcggagcgtgaagaatagccgataacagtgacagcagagcttgtacgctctgatgagacagcatgtacacactggcagctttcggggactactatctggaaatggctgactagtgagcactgcaagctcctgagagtgtgcttctagcggccn

SEQ ID NO: 633753 - DNA, 823 bp, Homo sapiens
ggccgtcgctctccaacgccagcgccgcctctcgctcgccgagctccagccgaaggagaaggggggtaagtaaggaggtctctgtaccatggctcgtacaaagcagactgcccgcaaatcgaccggtggtaaagcacccaggaagcaactggctacaaaagccgctcgcaagagtgcgccctctactggaggggtgaagaaacctcatcgttacaggcctggtactgtggcgctccgtgaaattagacgttatcagaagtccactgaacttctgattcgcaaacttcccttccagcgtctggtgcgagaaattgctcaggactttaaaacagatctgcgcttccagagcgcagctatcggtgctttgcaggaggcaagtgaggcctatctggttggcctttttgaagacaccaacctgtgtgctatccatgccaaacgtgtaacaattatgccaaaagacatccagctagcacgccgcatacgtggagaacgtgcttaagaatccactatgatgggaaacatttcattctcaaaaaaaaaaaaaaaaaaaaaaaaaaaaaaacttggggggggaaggggccctaggagaagcctctaaacaccaacagaggggaccgcagggcccagaagggaacgcaaccggggacaaagcgcggccccagagaaacccgggcaagaaaaaggggagcgaatacacgccacagaaaaaagcgcccggggaccccacgagggtcaggaaacaaacccaacagagacccagagagagcaaaacgggacacccacaccagaggaccacagcagagaccacattacaatataggcc

SEQ ID NO: 633754 - DNA, 377 bp, Homo sapiens
gagccacggacctagccctgaacatacgtcacccactcctgcccccgacaacccaaccacaaggcccccacagttattttcaaaactctggaatgacatgttttcctattacaaacaaggtgacaatgtatcttcaaaggaacgttgaactcggggtttgtaccttcacaagtgccttctctctcccgagggggggaattaatctctaggaacctgtattggtgcctctgccctgtcctccccttggggggacacagacttcgggttgggatttgacagcaggggggaagtgttatcgaatcttgggccactgcgctgctacattatatcttagggggaggggacaacccctaccgggttttacatgatcagctgcg

SEQ ID NO: 633755 - DNA, 626 bp, Homo sapiens
ggccgtcgctctccaacgccagcgccgcctctcgctcgccgagctccagccgaaggagaaggggggtaagtaaggaggtctctgtaccatggctcgtacaaagcagactgcccgcaaatcgaccggtggtaaagcacccaggaagcaactggctacaaaagccgctcgcaagagtgcgccctctactggaggggtgaagaaacctcatcgttacaggcctggtactgtggcgctccgtgaaattagacgttatcagaagtccactgaacttctgattcgcaaacttcccttccagcgtctggtgcgagaaattgctcaggactttaaaacagatctgcgcttccagagcgcagctatcggtgctttgcaggaggcaagtgaggcctatctggttggcctttttgaagacaccaacctgtgtgctatccatgccaaacgtgtaacaattatgccaaaagacatccagctagcacgccgcatacgtggagaacgtgcttaagaatccactatgatgggaaacatttcattctcaaaaaaaaaaaaaaaattttctttactccctgttatgggaacttcaaacggtaaaatatttattgggcctggaaattaattggcagggaacccta

SEQ ID NO: 633756 - DNA, 477 bp, Homo sapiens
  misc_feature (27)..(27): n is a, c, g, or t
  misc_feature (29)..(29): n is a, c, g, or t
atcctcagggaaataaaagttttccangncctcaatgaccacctatcattcctatttgtttagtgttaagatggtttttgttgttgctctgtagtatattttacagatgaaaatggttgatgatgtaagtttaagttagcctatgtcacagggaggtttctctgttgtccagctttgtgatgttaagcatgaagttaaagttagataaaccattgcctgaaaactgcctaggctaagcactagattttccatgagaaggttgttttcgattctagtcttgttctctgcaaaagtaaatgggatttgccactagttaaggaattctgtctctggcaaaagtgtcgtgcaactgagagaagtaatagcggtgcttaaaattttcgagatcacttctgtttaccaagtgtaagctgtacaaacactcagcaagtaataaatgagtctgaaatagtcctcaaggataacgatgaaaaaaaa

SEQ ID NO: 633757 - DNA, 743 bp, Homo sapiens
  misc_feature (537)..(537): n is a, c, g, or t
gcggccgcctactactactactactgctcgaattcaagcttctaacgatgtacggggacatgccaaacgtgtaacaattatgccaaaagacatccagctagcacgccgcatacgtggagaacgtgcttaagaatccactatgatgggaaacatttcattctcaaaaaaaaaaaaaaaatttctcttcttccggttatgggtagttctgaacgttagatattttttttccatggggtcaaaaggtacctaagtatatgattgcgagtggaaaaataggggacagaaatcaggtattggcagtttttccattttcatttgtgtgtgaatttttaatataaatgcggagacgtaaagcattaatgcaagttaaaatgtttcagtgaacaagtttcagcggttcaactttataataattataaataaacctgttaaatttttctggacaatgccagcatttggatttttttaaaacaagtaaatttcttattgatggcaactaaatggtgtttgtagcattttatcatacagtagattccntccattcactatacttttcataactggagtttgtcctacatggcaacgtaccgtgttttaaacgggtcgcacggcctcctggtgcctgtccctggtaagttgggcaatttaaaatttactttaacccaaaaaaacaacaacaaggacacacgaacacaaaaacctttgcccggcctcttcgggccccgaaaagaggtttgtatacg

SEQ ID NO: 633758 - DNA, 184 bp, Homo sapiens
tagtagagacaggatttcaccatgttggccaggctggtctcaaactcttgacctcaagtgatctgcctgccttggcctcccaaagtgccaggaatacaggtatgagccactgcaaccatccacattttttatttttgtactatatactgcggttctactacccaaaaaggaactactgccttat

SEQ ID NO: 633759 - DNA, 132 bp, Homo sapiens
  misc_feature (114)..(114): n is a, c, g, or t
gggttgttgacacatgacagaacagagaggcttttttatatatactgatgatcacagggggcagatttgcataaaattaccatgattgctttatgtttatatttaacttggatntctgaacaaacaagattg

SEQ ID NO: 633760 - DNA, 150 bp, Homo sapiens
acaacggactgattcaccgcaagactgtgggcgtggagccggagccgactggaaggtgtcgtggtggtcattaagcggagatctggccagtggaacgctgccacctcctatgtgcggacccccatcaacaagaatgctcgcgccacgctc

SEQ ID NO: 633761 - DNA, 252 bp, Homo sapiens
  misc_feature (2)..(2): n is a, c, g, or t
anatcaagtgatcctctgtcacaacaaaagaattaaaaaaagagacccagaaggacaggttcaggaagcttctgggtgggtgaacacattcaggttgtttggcagagctgtgccacggcgggcatggaggctccatacatcctgcacccagcaccttgcgctgtgcctggcttctgtctggcacttcctgacctgctccttcataacaaaaccccaagctgggagggaaagtgctgtcccgagtcctgtgag

SEQ ID NO: 633762 - DNA, 128 bp, Homo sapiens
ttttataggataatttttttatttcaactttttagattcgggggtacatgtgcaggtttgttacatgggtatagtgtgtgatgctgaggtttggagtactattgtaggataagtatttaaagaaataa

SEQ ID NO: 633763 - DNA, 422 bp, Homo sapiens
gcgatgggggcgcgtgtcgacatgtttgaggtgggtttggcccctgtgccctccctcttcaaccaaatgatccttattaggagggtggggcgctccctgggcccgcccaccccaacaatggggttggcccccccttaggcccctgccccacaaaaactgggttttcaactggcccaaaaaatgggccgcctgggggggaaccaccaacggggggttttcccccaacaggggcccctcggggggttcttcccaggcccaaagggggggttcccccaaaaaaaggggttcctgggccccggggggttcccccccccaccgtttccaacgggccttttggctttcccctttgttttccccctgggcccccccccccttaaggccttaaccccccccccggccctaaaggggtgttttaagtttga

SEQ ID NO: 633764 - DNA, 130 bp, Homo sapiens
tactgatggagtgcaagctcgaaagagagagagagaaaacacttgagacagatagtggagtgaaatggcggacacagatgggcctgcagaccatgcccccaaccctccgctgcccatcccctcctcccca

SEQ ID NO: 633765 - DNA, 832 bp, Homo sapiens
  misc_feature (30)..(30): n is a, c, g, or t
  misc_feature (80)..(80): n is a, c, g, or t
  misc_feature (123)..(123): n is a, c, g, or t
  misc_feature (125)..(125): n is a, c, g, or t
  misc_feature (169)..(169): n is a, c, g, or t
  misc_feature (200)..(200): n is a, c, g, or t
  misc_feature (209)..(209): n is a, c, g, or t
  misc_feature (224)..(224): n is a, c, g, or t
  misc_feature (240)..(241): n is a, c, g, or t
  misc_feature (264)..(264): n is a, c, g, or t
  misc_feature (275)..(275): n is a, c, g, or t
  misc_feature (291)..(291): n is a, c, g, or t
  misc_feature (296)..(296): n is a, c, g, or t
  misc_feature (384)..(386): n is a, c, g, or t
  misc_feature (394)..(396): n is a, c, g, or t
  misc_feature (416)..(417): n is a, c, g, or t
  misc_feature (434)..(434): n is a, c, g, or t
  misc_feature (451)..(451): n is a, c, g, or t
  misc_feature (485)..(485): n is a, c, g, or t
  misc_feature (582)..(582): n is a, c, g, or t
  misc_feature (584)..(584): n is a, c, g, or t
  misc_feature (677)..(677): n is a, c, g, or t
  misc_feature (735)..(735): n is a, c, g, or t
  misc_feature (748)..(748): n is a, c, g, or t
  misc_feature (755)..(755): n is a, c, g, or t
  misc_feature (830)..(830): n is a, c, g, or t
aggtgggtggtcaatcaagcagggcttggnccaaccagttatggcagatgaggtgtcccttgtcctgtggggactcactnctcctgggtgccccaggagatgttatgtctggccgtgtggccncntggtatctcattcgatgagctgctgcacaatctccctggatgtntccatctctatcaaagttttccttgaacatntcctccttncggaactgctccagnaaggcctcccgcttanncagtcttttcatactggcgacangttctctcgangagcgatgagattctngtgtngttggccatcatgagcccgctgacccggtgggccgtagtggcaggtagggagacttctctcgacatggtgctctacctggatgcttgnnnggccccannntatgaagttgtccaacttgnnttcccggatcctcttcnagctcttgttgacctgngtggggtccacctctccctggatgattttgatgntggcgatgtagcagtggttggtctggcggtctcggcctgtggacaccatcacgttctttggctgcagctgccgcctcattgacatccaggaccgtgntnttcctcacgctggccactgactggtccgtagtgagaggggtgtagccggtcatgaggaagtggagccgtggggtgggaatgagcgaggcgatnaggccgatgaggtcattgttcatgtagccagggtagcgcagggtggtggtgctggctngacatgatggtanacaccanctggttgatctgggagaaggatgggttctggatgtgcaggcggtctgtggcaatccggttcagggctgtgttgtnca

SEQ ID NO: 633766 - DNA, 1581 bp, Homo sapiens
  misc_feature (1101)..(1101): n is a, c, g, or t
agcgtgctacgacctgtggtggagcagcattttgtgtggcccccgtgaccgaagaaaggtggatggagtggagattctgttgccagaagtgttgtgtttggttgagtgtccgcctccccagcatgctgtgttggtgttgggggggatacaaccccctctcctcgcgggggggagagaagtgtctcccctttcttcgtcgtggtgagaaccccacggtggggatgatagtggggccgacctctctggtgggacgaccgccagagaagtgagacttcgtggggaagaacataaatgtggtgagacgcgattgaggcgttgtttgctggtgaatagttcaccggccgccgccaagactcggtttgaaggatgtggttggccccccccgccccccttggtgagttgtgggctccgcgcacccacaaagaccccgctgttagcaccgggaaccgccacatttttgtggagaggggcgcctgtgttcgcccttgcgagcattcggggagccctgtgttagagaggaggcccccccgcgtgttattgtccccgcgacagttaagagtgtggcgaaaggaagagttccgccacaggaggggaagttcttttttggtaagggggagtacaaaaacgaccgcgcttgggagtgtggagcctctttgttctcctcttataatatatggagcaatttggcccacctctggaaccccgcggagtttggtgccttaacaccccgtcttgtgtaaagaaacaccccacccccctgtttccccgcacacattgtggtccccccgtcgaagaactcggcgcccactcgttataagatctctaatgtgggccccctcctcccacagcgggggcttcgcgagagattgtatagcgtatatgggagaagagggttatagtgtttatatctcgcgagaggagagtttcgtcgaggatggctcttcgtgaaaaagaggtcgacacaccgagagactttgtccctccgtgtggcacccaccgcgttatatctcatggagatatatatgatatgtagaaagagcccactgcgaggggagaacactcttaagtgatataagagagagtgatttgagacgccacccnccacagagttctcgagaagagaagtgtgtggcttgtgttctggagaacccacgagagagttggtgagagcagatatgtgcactcttctctgctgcgagagctctggcacacttataccgctatattcccgcaaagaaagagaggggaaaagggctatatgaaagagtgtaatggagattaacgctgttcacaaagagaaattccacacaacactgagaggagaggagaagagaatggagctcgaatgagcgaccctcggtatgaatctctctaaccactttgaaagttgagtttttcacaatgctatactatatcccacgaagaaagtaaggaaagcactatcacaaacgtttaaactttatatttataaaaggtatataaatgtgaaaaacactataaaatatatttaaacttttttattgttttcttttcccctttcaccagtaacctttatggttaaatataaccattttccaaaga

SEQ ID NO: 633767 - DNA, 256 bp, Homo sapiens
tcagctcggcacctcttattcatcggcaccaggttggtctggaattctgtcggtcaacattcaggtctccatcaaatctcaggcaagcagtgatggaggacacaatctggctacactaaggcggttaaggttgacgtgtagagtaggcgcgctcgactatcgaaggtttctacggacagatgtcatacgatggcctcattgatctaccatgaagggcacaatacagagtagcgccagggttggtgatgggtggctg

SEQ ID NO: 633768 - DNA, 257 bp, Homo sapiens
gtgaccaagagctgacgtgtgcagaagtccttcttgtcctggtcgttgttcccgtctgagtaccagctccccactgcctaggcgggccggcctcgcggagggaaaaggagaggagaggaattgtccgatccctcagtggtccaagcttccgggtggccagtctttctgtagttgcgcaaacgcagcaaagagagaggatttatctatcggtgagtcgattgagtctctgagcgtgctcctgagcaggagagttctca

SEQ ID NO: 633769 - DNA, 213 bp, Homo sapiens
attttaatataatacagttccaatcagtgtataaggtgaacagtagctcataatgtgacaaatcggtgggcaaggagtgtttcagtttctcaatattctctatgacagtgacgttcagggagtaaaggtaggaattgcatcatactttgtacttaatcatgagcctagcgatgagtatgttggcagatgggtcatcccttctgtcgtcttctc

SEQ ID NO: 633770 - DNA, 185 bp, Homo sapiens
tgctgcggcgttctagaggatcccattatggacgtgaccataagcatgttctgaagttggtggcgccatcaaagccgccttggtcagggctaatgcgccctgaaggcagagtccaggaccttgacccagcccctctcagcagacgcttcatgataggaaggactgaaaagtcttgtggacacctg

SEQ ID NO: 633771 - DNA, 151 bp, Homo sapiens
  misc_feature (67)..(67): n is a, c, g, or t
aagcgggggattgttcacccactattagggccagacgaaaaccctactcccaggtcggacgaccgantggcacgtcaggtcttctacggacctccaccacgagccccctctggcttcgccctgcccaggcatagttcaccatctttcgggt

SEQ ID NO: 633772 - DNA, 577 bp, Homo sapiens
  misc_feature (9)..(9): n is a, c, g, or t
  misc_feature (25)..(25): n is a, c, g, or t
  misc_feature (73)..(73): n is a, c, g, or t
  misc_feature (178)..(178): n is a, c, g, or t
  misc_feature (194)..(194): n is a, c, g, or t
  misc_feature (213)..(213): n is a, c, g, or t
accggattnggtccatagggattcntggatccatatggaatccaaccggaaggggggaaaaaatatttaaaangacttaaaatgttaatggattgaggaactgttgtatagtggtatatgggaattctttggactaatcttgccaatttgtctgtatatttaaaattatttaaaatangatattaaaaggctanccttttaaaagtgagacanggaagtttcaaaactaggattcaaaacaacaaactgaaataagttagatctgagttgtctagaaaaacacataagccgggttcttactgacttttcaatgaacttcaaaacaggaacagacattttggttgcctattgataaatagaattatgatgatctgtggtttgaatttacttatagtctcattttggggttcttgtttctaacttatttacaactttgtaaactcaccatgattcatgacttctgattcatattgcctagtttatgagactgcattgaattcagaatgcgtgctgtgatgccaaatttattttactagtttcttattgaatatttaggactattgaattactttaagga

SEQ ID NO: 633773 - DNA, 328 bp, Homo sapiens
tagactaacgtgtatcaatatgtgagatccaggtagtgttatcttccaccagacaaggtcatgtttccctttacttgtacctgcaatgggctggtcgtttgtggttcgaagctgaccaccttagttccatcatggactgctttggattaatcttgggttgcagttttagtgtactttgtttgcccttcttggtaggatatggctctgcagagcttttatactctgcctgatatgtcatcgtgtttttagcaccagagaggactatagaaattcctgctcttcacagaatccttgtctgttcagcctcctgtactctttcgttttagaa

SEQ ID NO: 633774 - DNA, 181 bp, Homo sapiens
cacagtcatctcaacttccaatctatatattaaaatacttgcacacagtatctaactgaaatgtatgacatcatcatttgcatccccaattgcaaacaacatacaatccatcattttaacaacatttgagcacaatccaggggcaatttgcaatcactcaaatggcatatctgcattcaca

SEQ ID NO: 633775 - DNA, 208 bp, Homo sapiens
tccttggtctgtgcaagctacggtcgcgtcgctagattcccgtgccttgggcgatgtgggcagtgatgggtatggaagcattcgcggggttcctgcgaggcccaacggtccatccccatcttggactttgtggcagatgtggtgctgatgtgtgttgtcgacagcttggtgctatgtgctactggtttggtggtttgtgctgtggttc

SEQ ID NO: 633776 - DNA, 137 bp, Homo sapiens
gatcccccgctattggttgtgacagcacggcgggacgcacggtgctgtcggatgaatttgtgtctagtgtgtcgggtcatatccttgcatatctcattaaaccgaaccacagccctgtggagaggtactggggtccc

SEQ ID NO: 633777 - DNA, 873 bp, Homo sapiens
actatctttctattctcttttgtttatttctactctaatattttatttccttttgctagctttgggtttatttttttcttcttatggaattgtctttttatagttattttgtttgaaacaggatctaaaaataggtctatattttgcctgtggtgtatttcttcagtctccttaagtctataacatccccttttccttattttttatcatttatttgttcaagttatctgggtcatatgtcttaaaattttatacattttagattttggtgtcatttaacatgttcatattttctgtgagctcatagagctaaagctctctaaaggttagagctagaggctggttggattcaggttcaactttttcgctttttgggtaggaagaattcattgcttcactgatattaagattgacctgttggtccaggtgttgtcagcttgatccctccactagaaaattccacattatctttccatttaatgtttcagcagtcattggtgattgttgcctaatgtcattatttcactaaagattgcagaatagtgatttgtcacaaacaaaaacaaccccaaaaaaacttttggggcgcactaggcccttggaaaagtttttaaaacccattcgttggggcgcgggggcccattagtttacgttcgacacttggggccaaagcgcggtgccccccagaagaaaaaccctgggggaaaaaaaaaatgtgggcctggagttttctccccccaatataaaaaacccccggggggggaaccaccgaaggtctttttggaacacattcccaaatgggagtcacagagggccataacgcgaggctcttatacacaggaggttcacaaggagagagctcgaatttaaata

SEQ ID NO: 633778 - DNA, 315 bp, Homo sapiens
ttggacaaccctcgggtcaggtcaatgcctggagaccctgtagcaaatctgaacaaatcttcctaattagcacaccttcaaacaaaacctcattatttgactgcgtgcgataagtctggagaaaatacagtactggataggctgcgcatggtggctgtctccggtaatcccagcactttgggagactgaggcaggccgattacctaaggtcaggagtacaagaccagcctggccaacatggtgaaaccctgtctctactagaaatacaaaaatcagccgggcatggtcatgggtgcctgcaatcaagcctggaat

SEQ ID NO: 633779 - DNA, 324 bp, Homo sapiens
accaaatatggaccctactatgcaaacagggatacaaactatcgctgttcattatagctactctcataaccgtcaccacccactggccttttagccaaaaatgtgcccaaagccctactagattttgccgcctgccaagcaacggtgggccaatccctgctaaacgaaatctccaacacatatggcctagactacgtacataacctaaacctactccaatgctaaaactaatggtcccaacaattattttactaccactgacatgaggttccaaaaaacatataatttgaatcaacacaaccacccacagcctaattattagca

SEQ ID NO: 633780 - DNA, 938 bp, Homo sapiens
  misc_feature (220)..(220): n is a, c, g, or t
gggcgggatagggactggcagtcccctgacaccctaagagcggcatctgtcgatgttatttccccagcatggccgaaacagaagccctgtcgaggcttggggaagacttcagttgatgcagaataactccgtctttatggggcgccaggggagaagccggcggagtgctctagggaaatcctggagcagtgcctgtttctccaaagtcacgctcattggncgggaggaaagctcacccttcgaccgaggaagcttataaaatattgtgattcacgaagtggtgccctttgacaatgttggatgaactacgccttctgcctttcaaggtcatgatgtggattctgttgcctggtaccacccagagggcaacgctggggccggagggatattgtcgtgttgaccgagtattatgtgctgaagtcttgcagagttggcaaaagctggaggggtgcaaatttttcaagttttgctatcctctaaaggagctgatacatcaggcaattttcatatctacaaggtagggagaatgtagaagccagggttgaagaatccaattggatcgtacctctgtattagggctgagagtctgttatgtggtaggcaagaattctcgcccagtgtgaatgggtctggctagaagagttctttggctcctttaccagaacctctgggggccaggggggatttctgggtgctgtggtgaccgtggttagagcagctggaccaatgtggttgcacccgagaccacgcgatggacggtggaacacaggcatcatgacgggaggcctgggccctccaggctaacccatgcgagggggtttggcaccataccaccccacgtgttttggttcaaaccactgtagacgtgggcaacccgcacctcaccaaaaggcgcacgcgacgaataaacacagcaaagcccacacaagagggtcgca

SEQ ID NO: 633781 - DNA, 246 bp, Homo sapiens
  misc_feature (158)..(159): n is a, c, g, or t
  misc_feature (172)..(172): n is a, c, g, or t
  misc_feature (176)..(176): n is a, c, g, or t
agccgcgcagtgggcaacacgtgagagcgagcagttttatgtcacaggattcccaaaaagcagacacacattgtgcaggtcactgcagacgggaggtggtgatgaaataaggaagactgggttcaaagtctgtttaagacacggtccaggctgggcanngtggctcacgccngtantcccagcactttgggaggcccaggcgggcggatcatctgaggtcgggagattgagaccagcctggccaac

SEQ ID NO: 633782 - DNA, 371 bp, Homo sapiens
gcgccgaaccagcctctgactctgctgggctcccacatgcgcgcggctaccacttgcacatgtcaccactctgcacagcttccacccactccccacgagccaacgacacacagccagcaaccagcagctcaaggcgtcctggcaccagcaaactgcaaccacctcagcaacctggcaaacgggccttccagcagctagcgaaccagcaagctcataccttgcttctccttccttctaacactttacggccttgctaacaactgctgccctgacttgcctggcccctccttctacactaaccctggctccacgggcgcagctcctgactgcccttcttctggcactcacacctccgctcccggcacctcgac

SEQ ID NO: 633783 - DNA, 103 bp, Homo sapiens
ctatcaactaactcaaacaaatgatacccatacacaacactaggacgaactgatctcttatactagtcatcttaatcatttttattgggacaactaacctcct

SEQ ID NO: 633784 - DNA, 493 bp, Homo sapiens
  misc_feature (293)..(293): n is a, c, g, or t
  misc_feature (300)..(300): n is a, c, g, or t
  misc_feature (378)..(378): n is a, c, g, or t
cgtacaaaccccaattgaccccttaatttacaagacactaagggctcctcacccaaccccctttcgtaaggagttggcctgggtaaacagatcctcagcatttcaaaggagcctaattaactgataaggtacgaacaccaacaatatatgaagttcccaggaattttctccaagagataacaacataaaaccttgagttcgtgtctggcgtagaccctatatctaattataatgaaagatttagaatcttgcacctggtactgttgctcttcttgtaaccatttgtcttttangttgttnatcactctgtaaccattttgattcttttgattcttgcatgtttttacttctgtagaattattacatttaagtcccccnccccttcctaaacctaagtataaaagttaatcgagccccttcctcgtggccgaaagaattttgagcattagctgtctctttggccgccggcttaataaaggactcttaattcgtc

SEQ ID NO: 633785 - DNA, 206 bp, Homo sapiens
ccaggtggcaactaagtggctacaggagcacgtcctagctgattaccaaaacccccaagaatatgtaagaattcagctgccaggaacagacccccaatgggacctgaacaagagaccagacatggaaaggctaagacggtaccgtgagcattaatagaaggtctaaagaaaggggctcaaaagactacaaatgtaaataaggtctc

SEQ ID NO: 633786 - DNA, 92 bp, Homo sapiens
tgctgggattacaggcgtgagccaccacacccggccctcggcttttacaattttagaaaggcttaagcatcaaatccaaatttccacctctt

SEQ ID NO: 633787 - DNA, 402 bp, Homo sapiens
cgccctaagtcaacgctccattgactgaagacagtccctatgcctagaggggttgagcgttcttcctcctatgggttggaggagaccagggtgcctcttatctccttctagacggtctgcctctctggtacctcttggggggatcggcaaaacaggctacaccctgaggtcccatgtgccatgagtgtgcacatcatgcagtgtgtctgtgtagtagtgtgaatagtgagagagacacagccctcctttcagaaggaaaggggcctgagatgccagctgtgtctctgtgttaggggttgtgggtcggccccttctcagggaaaccgacgggcacgttccctctctggtgctgataatcggcgtcttagagaaataaaggtacgggtgggaccctcggtgcgt

SEQ ID NO: 633788 - DNA, 814 bp, Homo sapiens
  misc_feature (149)..(150): n is a, c, g, or t
  misc_feature (156)..(156): n is a, c, g, or t
  misc_feature (165)..(165): n is a, c, g, or t
  misc_feature (281)..(281): n is a, c, g, or t
  misc_feature (310)..(310): n is a, c, g, or t
  misc_feature (327)..(327): n is a, c, g, or t
  misc_feature (370)..(370): n is a, c, g, or t
  misc_feature (455)..(455): n is a, c, g, or t
  misc_feature (480)..(480): n is a, c, g, or t
  misc_feature (498)..(498): n is a, c, g, or t
tctccttattggagataagcgaaaagtgaaatatggacgaatcacgttcccccttcagccgcgaaactgatgggtcacagggttctggtactatgacatgtgcagtgctcacaagatgtcattccaaggcagcgactttgcatgtcttnngctaanatagctgtnggtaccatagcgaaatatactcaaaaagaacactgaaaggaatattcctttgacgctggtctttcaggacatgtagaatcttagataagtgaccttgattaagccaagaatatttnaatgtctttatatacacactggacaacanattttgtccttaaatantgtttgaaaataggtgaagatgtcctttgctgatgtggaaatnggtaaaggagaatgctgctttgcaaatgatctattctaactcagttcacagttgagaaaattaaagcccgttaggtccactctgntaaaataggactggctccaggattnccagctctggactaacanttagcctcctttgagccttaagtctggacatcttcattgtaatgggttttatttctgacaagtagaagggcatacatgttaagatgataggcagtataggatgttgttttttatttttttaattttttttgcagaaattctttcattagcatgaacgctgattataatgttactatacctggtactgagtctattttaaataattcacacatatcgaagaggcataagaatcatgttcgataatgatgtattatagacgaaacaactaagttttgtaatccatggatttatatgtggtatatcaacatgaatgctc

SEQ ID NO: 633789 - DNA, 975 bp, Homo sapiens
ttgtatctccctgctgattattctctccccccgagaactcttcgccaaagttgggtggttctcagtaagtttttgctgtctcggcccacctgtggtggccaccctccctcactttgggggcccgcgcattctactctggggggcctctttcttactgatgatgttccttggcacagccctttttccgggggccacacccctgttttttgtgggtgttgtgagcagcccaccacggggtgggtagccaaactaccaccttctttctcgcgggggcggttcttcttttgggggtcccccggcccgcctgcacccttggtggctgcgggggtgtacactagcacacattttgttcctttcgccgccattatgtggggggccttttcgctccctccctacggtgtatcatcatcaaggggggggtcacactcccccacggggggctttataattgtgggggctattctcgtcctcctgcgggagatttttctgcccccactcattggtgttccccccattttttctcgcggggacacccccccttgggggggttataccccttagtcttatgtttttgtcccaaggacctctcttacggcgatgtgtgtaaataatggcgctcctgtttctcttttagaggagcctctgcttgtcccccaggggggatttctccggggatattgtgtctttctccccccctccctcgggtgttctccttgtctatacgcccccggggtcaccactggttcttagagggtctacggcccttcttgggtcctatttgccgcatttcccctctcgtaataaaggtgggcgctctatcctcctccccccggagaatgttggttttgcaccttccccccttcttctgcgccccccagtggggagggggcccccccccgggttttaaatttttttaaaagggtttttaacccccggggaaaaaggggggggggaaaaaaaaaccctttttttata

SEQ ID NO: 633790 - DNA, 114 bp, Homo sapiens
ttggcacgaggaaggtcaccatatctgggcagcatgtcccaggcggaaggagtcacagagacaattaaccctgcttgtcgtaagctccctccttgtgacccgttgatgctgccg

SEQ ID NO: 633791 - DNA, 145 bp, Homo sapiens
tgcatagagttatgtctagggtgtagcctgagaatatggggaaatcatgtgaatgaatgcctcctatgtatggcaaatacatgactcctattgataggacatagttggaatgtgatgctacaatgtaataatgtgtctgtgtagt

SEQ ID NO: 633792 - DNA, 154 bp, Homo sapiens
cattattatacgatcgaaacttgtacaacaacaaaatggtgagggaacgttaggttgtttgtattagtgtaaaacaaaaggaaacacccacagtacggaattgaggtcccagatgttcgaagtgttcaagaattatgtcgatcgacttagtaaa

SEQ ID NO: 633793 - DNA, 261 bp, Homo sapiens
agaggagcgtaccggtatcccaccccgtacatagccaagtcactaacaatgttacttctataaaccaataacgaatttctgacagctttctatcagttccgtctgcctttcttttggcctttaaaaatatacttgtaactgcttctaattggagtgtatattcagggcagctttatagtccagggttgcaatcttcaagcgttggcccaaataaactctcttcttatattatgtttaccccacctttttccttttaggctc

SEQ ID NO: 633794 - DNA, 369 bp, Homo sapiens
aagggcagatttgactatttcactctccttaagcattttagggactcccttgatttataggattgagtccagcctccatcaaaagggacaaaagacctttttatgttttgattccggcttatgtctccatattttatttccattttatattttaggaaacaagagtttgtagaaacctgtaaatttttgttttgatgtaagtcattcctctgcccgcagggtccttttccaatttattttatgggggtaaagcctgctcatttttcaaagcgcagcccatttactgccttttccaggaagcttttttgaatcctccagtgagtaaggcaagtatcactttgggctcccatggcctccatgactttttca

SEQ ID NO: 633795 - DNA, 219 bp, Homo sapiens
tacatttacaatacgagattcaaacaaaatcacaccaacaaccaatttatgtcagattggcagcacaagaaacgcctctctgatttttgtggcagtgacgccccagaattgtgcaagagttagaaataattacataacgtaacactacacacaaacagcaacttcagtaatttttggttgcaacaggtaattaatgtcaacatctgtaaatacctttgg

SEQ ID NO: 633796 - DNA, 102 bp, Homo sapiens
cagaggccggacagccgcatctcatgattgcctgtatcccaaagaagggaaaggcttgtggccgggaaccagctggctgccatgctgatgatggagtgatag

SEQ ID NO: 633797 - DNA, 119 bp, Homo sapiens
tgaatgcaaaggacacaataatattttccaaagatccatgtgaaattgtctcccattttttggcttttgggggggttcagtttgggttgcttgtctgtcccaacggtgaccggcgactt

SEQ ID NO: 633798 - DNA, 181 bp, Homo sapiens
  misc_feature (18)..(18): n is a, c, g, or t
ttttgccaccttgagcantgcccggatcccgtgcaccctgggacccaaaagtgcccccgccatcccgccaccaggattgttccccgccagcaggtccagagcaatttaccccggccagccagccctttcacccgaggatccctaccccctggccccccaataaacatgatttgaagcagca

SEQ ID NO: 633799 - DNA, 215 bp, Homo sapiens
aaactaaattttttttccccggggcccccccccccccccggggggggggttgttttggggccccccccccccccggggttttttttaaaaaggggggggccgggggggcgggggggggcccctttttgcccccgggggaaatttttttttttttttttttggaaaaaaagggggggggttttggggaaaaaaccccgaaattttggggggtttta

SEQ ID NO: 633800 - DNA, 423 bp, Homo sapiens
tgatccggagcgacaaatacaagttggccgtatctgaccgggaaccgaataggtgtattttaccttgtagcttgagttcagcggaacacaaaatggcttggggttaagccagaaaggacagcgtaaagagcaagacaaaggcggtagccctgatgctgagagccgaattggacatccgaaagtgccgggttcatccatacctaaaatgtaggacgacctgccctggacctttgggcgcgactgctgctgtagacagagcagacgttctgcataccttaccgaaaaggacctgacctggaagaaaagtgcacaagactaacggtaatgcggataccactcgcacttgcatgtgtattccggaaagcacaatttataattgggaagaagggcaacataacaatgcctatgggcacctgggttcct

SEQ ID NO: 633801 - DNA, 493 bp, Homo sapiens
agcgtaaaacgacgcccagagaatccgaactactgctctatgttaccccccgctagaaaaacgcccccttgatgccagaattcttaatgcagggcagtgcgggagaataacagaaccaaaaattcctgtctgatagcattttcctcaattaatgcagctttatcctcttcatctttaattatttatatgtgtggctggatgttttgctgaatctttcatttatttccttcgaataatgcaataaatccccaggatctactgaaaccccataattagatccctcaaatttactgaaatttactatagacttattctcacagatgtaatgcccaagtgttcaatctatgacccattgtccctctcatagaaaacttggttatacaggcagacaccatggaggctcttgtctgcgtccagtttattcctaccaagagaggcactctctaggagagccccaacctgggaatcagttaggtcttggtgtgttgatcag

SEQ ID NO: 633802 - DNA, 359 bp, Homo sapiens
gccatatttctttctctctttctctcctgtagcctctctctcagtcaatatacttaatacatttaaaagtcagatacatagattgaggtgtgcgatacagttgcccgacattacaagataaattaatactgatgtaaggaccacatgaaagacactaatgtgatagactcacaatctgtaattccagtgcgtagagaggctgaagtgaaaagactgacttgaagccaagaaagtagaagctgcattgagccgagatcatgccactgctcaccaacctacgcggcagagagagaccatgtccccccccaaaacaaaacaagaacaaagccaaaaaaaaacaacaaagacatatcttgtag

SEQ ID NO: 633803 - DNA, 261 bp, Homo sapiens
ttagcatcctgatatctcatagatcatcccggaagatattgctcagcgccaggataatctctgcagcttataagtactctttttggtaagtatcttctgttataacctagatcctcagaactcactggtacactatgcggatatagattgttggctctcataacatcctctcggctttttcatgcttttgaactgaacacatgccttgaagggagctggaacaaatcacacagtactgacagaaatttattgcttccagga

SEQ ID NO: 633804 - DNA, 110 bp, Homo sapiens
cgcatttcgaatagaggagggtggtcgtccatcttcttgtccttcagcctgtgggtgatgtgcggtagtgcatgccttccctgcccatgggcctccccagaatgccactc

SEQ ID NO: 633805 - DNA, 864 bp, Homo sapiens
  misc_feature (393)..(393): n is a, c, g, or t
tggcaaacccccccgccgagaaaacccgggtactataacccagggtcaacccccccgggtcctccaacttattgccgtcaaccggccaacccctgtgggccgggtcccctttgagcctgttggcagaacaaggtccccaaagaacagccaaaaatattttccgttgccttctgaagccatcgggaagaaaaagaggtattgggtttataagggtccctcgtctttacacagaatattatatcccgagggttatatgttgtccagggtggttgaatcttccacagcgccctaatatatgcggccaatctggtgtgggcatatgtccctatctctatatgggggagaagatatactttgagacaattatttcgacaaatcttcactatcctctanaaagcctataacagggtgtccctgggctatctcttgtgtccactatggtgcaatatgcgctggagccccaccaccaccatatatgtgtgtcccccccatgttttactcatctctcgtgcactgtcgcccaaaaacactgtgaggtgtgcgttgcaggagtatttgagaccaacgccactgtgtgtggtgtgttgtgtgcgcacacatgttgtagaaaaagaacgcgcgatagtcgaacatactctgtgtgtggagaccgcgccccatgtgtgacgcccgctatgtgtggggtctccccagaggatatgtgcggtagacagaaccccactgcacaggaaaagattccacccattttggcgtgccctgtgtgtggcaccaaactctcggaaatttataagtttgagacccctgtgtgttgctttactacctcttttatccccccccaagaatttaattctccctttccgtgat

SEQ ID NO: 633806 - DNA, 104 bp, Homo sapiens
tgactacgagtttgcttaaaatgcagtaggggagccaggagcagactcaatgaagtttgccaactgaggcaccgcttagaccagtccgtaccttgactctcgct

SEQ ID NO: 633807 - DNA, 1046 bp, Homo sapiens
tccccccttaattccctttattttttttggtataaaacccctttttggtccccccgaggggggcccggaccccggggcccgggaaaccccggggggggtgtctggaaagggtggtgccaggtgagacctcctcgtataggggaaatctgggggagattccaggttccttttctctccacaagagtgtgggggtgtccagtgaacgctagtagtgtcctacaaaaatgtgggccatcaaagggtgtcgctctaggagcagaatgtgtcgccacatgatgtgggcatgtggacacccccggtgctatagtgttgtacaaagcataatctcgagatctcacccacgcaccatatcatagtagagcgacaccgtctctctatataagcggcaccagtgggtgtgcgagagaaaaacaatcgtcgccagaggtcgccgcctgcgtggtctcgctagaggagatctagagtgagcggatcccccaacgacaacaaaaacgcccgcgaaagcgggcgcctagtggtccaccctgtgtgacaaagggggagacacgacgtgagttggggggagccttgagccagagatctctgtgtggtcccccccacagatatatcgccttctggtgcgccgcgtgggagccctcattggagaagacactttggcgcccagtagtgttattgattggcgctccccctgggtgtggtggggggggggtcgaccaccttcttgtggtgagtgccttttaaaccaccataaagcgcggagtgtggcggccactggtgagcccccgcgagtaaacaacaaaagtggccttgtgaacacctgggtggacgctggaagccggaacagagtaatacggagctctgcgagggggggaataaatccttcaaaaacgctctctctctggggaaaagagggcccgccgaggaaagaagaaccagaagatcctcgagacgcccaacagggggcgggaagaaagaaaagcagatccgcccgcgggagatgagatgactagctctggcaacaaggggcccattggtggaggggcacc

SEQ ID NO: 633808 - DNA, 711 bp, Homo sapiens
ggcaatgacaccccgccctaggacgggaggaagacccccttttggggagacctcttaaaattttagttagaacgccccaccccgtgtatccctgtacccaaacacccccacagggtccccctatagacagttccccaaacacgtgcccactttgtagaataattttctgtgttttgtgggcggaaccctctgggggagaccagagtaccccccacacttcctcggacgccagttaaccatagcataaaggacattctgcacccagtgctcaaagcgggacatttacttatatacctccaatgtggatccccccatatagacactgtgggacaccaaccggggcaccacaggtttacccattaggagggtaacaccagcgcgccaatctccttatttattagagtccccataatcaccaccaatagggtgttacagacctctgatgttggagtcaaggacatctcccgagtggtgccacacccgcgtattataaggttctgtttgttcaacgatttaagtcctaccgtgatctgagttcagacccggggttatccccggtccggtttcttatcttacacttccaaattctcctcccctgtaccgaaaggaccagagaaataaggcctactttacaaagcgcctttccccgttaatgatatctatttccacttaggattaaacccccaccccccccaggacagggttttttta

SEQ ID NO: 633809 - DNA, 190 bp, Homo sapiens
tacgtgatcccgtctgatagtcaacagcatgcgttcatcttccctaaccagtatggacctagtgttggctaccttgtggcacatcatcagactcctacagccaaatagtacaggcaggggccatatcaccaccgagatagcagtctcacttctccaatgccacgtgaacttgtactccaaattacagtcc

SEQ ID NO: 633810 - DNA, 396 bp, Homo sapiens
agaggatcccgtgctgcacaaaggatgcaacacctaaacttacgccggccctgccctgccaggtctacgtgaatcatggcgagaacctgaagacggagcagtggccccagaagctgatcctgcagctcatcccccagcagctgctgaccaccctgggccctttgttccggaactcaaggatggtccagttccatttcatcaacaaggacctggagtctctcaaaggcctctaacgcatcatgggcaacggcttcgcgggctgcgtgcccttcccccacacggcgccctgtgaggtgcgcgtgctcatgctcctgtactcgtccaagaagaagatcttcatgggcctcatcccctacgaccagagcggcttcgtcaacggcatcctttgtggcagca

SEQ ID NO: 633811 - DNA, 771 bp, Homo sapiens
cttccgtggacactatgaagtataggatttaaagccaaatggcaaagttgcatccgtggcacatggttaaatcatcatcactgtcgggcatgaacccctgcacgccctctcatgacaatgtggagaaactctttccaggttttgagatagaaactgtgaagcaacaacctcaggatccttttataatcaatgctgtcaaagcaaacgtttagatgacagcaccagcaaggcattggcatgccttttcatccagggggcttggcatcccagcttggttgctagccaaatctgttgcaagcagctgaagagaagcccaagtacagtatccatctccagacatttgcaagttggcatggacagacagccccgatttactggctgctagaaaggtggcagatcatattggcagtgaacattatgaagtccttatataactctagaggaaggcattcaggctctggatgcaagtcatattttaccttggaaacttatgacattacaacagttcagtgcttcagtcaggtatgtcatttaattatccaagtatatccggaagaaccacagatagcgtggtgatcattctactggagaaggatccagatgaacttacgcacaggacacatatatttccacaaggatcctttctactgcaaaaagccgaggaggaaagtgaccggttcatgagggtaactctatacggtaagatgtactacgcggcacatcgaactactgatgaccctggatcttgaaatgagagtcccattactagaa

SEQ ID NO: 633812 - DNA, 473 bp, Homo sapiens
gctctttgttctgaaatgtcttcatcagtgaaagttgaagagatatgctcagctgggatacagtgaactcaatctactcctccaggactggatctgcagaactcagatctaccttccatgacagcttctggccgttggcatacagagctctcctctctctctgcacgtagcttgtcactcactcagcttgtattgatggggtggggcagtctcagattgttttataggtgcaattatttaacttctttagatgagggttgtgctttatgttactctctgaagcctcatttatttgccacatggtgggtacatgaagatacatgctaaatgaaagttgtgcaaagagctctgaacttggaggcagatgaccttggacttttactcagtctgtgttacacatgagcttggataagactgatctttcagctttcttcagaccttaagcatgagatataaaacaagtagaacatata

SEQ ID NO: 633813 - DNA, 161 bp, Homo sapiens
ccccccccccatcattgtttttaaaaaattaaggcctggcgcagcagctcatgcctataatcccagcactttgggaggctgaggcgggcggatcacttgaggccaggagtttgagaccagcccaggcaacatagcaaaaccccattatgctttaaaaaaaa

SEQ ID NO: 633814 - DNA, 429 bp, Homo sapiens
  misc_feature (1)..(1): n is a, c, g, or t
nattacttcctggagaagccaaagggcgctcccctaagaggcctggatgtgaaggtagagtgagacgccctgggctctgggtgcaaaggtcggcgcctgccgctttcaacactcaggaggcgcgtatcagccccgctggcccccggccgcagactcggagcgctgagctcccaccggttcccatcacccgactcacttcccaggcatgattagcacccgggaagctatcagccactacacgaaggaggcgccaagcccaaaactcctccccagctaacggcggggtctgtgcagagcccgcgggaggggcacacattgaaccctggcacgcagcctcaggcaggggcaggctggaaatgaccctgccctgcagctgggccaatcagcctagacacctgccccctaacgctataaactgggggtacccga

SEQ ID NO: 633815 - DNA, 182 bp, Homo sapiens
  misc_feature (5)..(5): n is a, c, g, or t
  misc_feature (10)..(10): n is a, c, g, or t
gaganacatnagttagaggatgtggaagaatatgtgggtacagagtaggtatcgttggaaagagcggagtactcggtggtgaatgagcaaaaaagggtactcactgtgtagagttatgctgccaaagaaatatgcctcagccgtaccttcaaaacataacggcatgagaggtcggccggggg

SEQ ID NO: 633816 - DNA, 726 bp, Homo sapiens
ggccagtgctgcgcgggaaggcaccagcaccacagccgccgccgctggccagggtgctggacaagacgggcccgtcgggcacctcgccaggtcaggcacccgctgcagccgtcgctgtctcctcccagaccggtccccatggagggagatggaagaggagttgaaatgccccgtgtgcggctccttctatctgggagcgccatcatcgctgccctgctcatcacatattgtagtgtcaagtgctgtgcgcccgcaatcatcgctggtgcgagaccccgagtagtctgagatccccccaggagccgatcgggccgcgggctccggggtctccgactatgactatctggacctgggacaagactgacgcctataccatgctgaggcgtgaccacgctggctagtggctcctacggggggttcgccagtcgcccccactatccccgtggcagaagtcccccaagcggcgtccgcgtgtttcccccgggctctgccagcatccgtacagtccagcttgtcatgcggccctggggcccggtgccccgcaagctcctgtatcacctgcccccagtgtcaccgcagcctcatcctggatgaccgggggctccgcggtttccccaagaatcgcgtactggaaggggtaattgaccgctaccagcagagcaaagccgcggcctcaagtgccagctctgcgagaaggcgcccaaggaagccacgtcatgtgcgaaa

SEQ ID NO: 633817 - DNA, 1050 bp, Homo sapiens
agcggagcgtgccgattctgcatagagagatcatctaaatgggcagaagcctgcacaatttatgaagtgctgatttaacaccagcctatgcaaggctggactgtttagaaagaagtgatgcactcaattctgcaatagataaaatgaccaagaagaccagggacttgttttatacgctccgcaaagctgtcatggaccacgtctcagattctttcctggaaaccaagtgtaccactttgggtactgatagaagctgcaaagaatggaactgacgaaagaagttaaggagtatgcccaagtataccgtgaacatgccaacaaatggatcgaggttgccaatcttggcctgtaccatctcaaataactgaagaaggtgtaacagcttgtccgaatgtctgcaagccagttagaaagccctctgttcctcgagggtatattaatgctgcactggcctttagtcagcaaagcaccaccagagtaaactggcccaaagaaaacatggatctatagacacaggaacaatgggacaaacaagctccgagtcacacacagatagctgacgatgacacttactctcccaatgactgacttcctgggctggcctcacgagaatcacatggccggaagatgtgacacaaaatggtgtccaatgggctactcccaagagaaccgaaactgagatgggcctcggacccgcgacagccctggcgcgcacttcgacggcccggcgacatgacccggggtacacttccacgctactcaaccctcaggaccactggcaccatctatgagcccaaggagaggttcctaaccaccacccggagcgaacagagcgtcgaaaagaaaaaagccccaacaatagccttggccacctacaagacgcgagaaccaatgaccaccgcataatcacctaggagacgaacgtgcgaaagcaacctcagacggcaacgaccccaccaaagctcacgcaaacgcctaacccagcgcccactgggaataacgaacaagggctacaccgaagagcgaccgcacgcgccgtgatcaaccgag

SEQ ID NO: 633818 - DNA, 621 bp, Homo sapiens
ggaataatgaagattataagaaaaccaagcgccaggcacggtggactcaagcctgtaatcccagcactctgggaggctggggtgggtggatcactcaaggtcaggagttcgagaccagcctggccaacatggagaaaccccatctctactaaaaatacaacaaattagctaggcgtgggagcgggcgtctgtaatcccagctacttgggaggctgagagcaggagaatcatttgaacccaggaggtggaagttgcagtgagctcagatcgcaccattgcactccagcctgggtaacaagaatgaaactccatctcaaaaaaaaagaaaaagaaaagaaagaaaaccaaggtccctctccctctccctctccccacgggctccctctaccctctctttccatggtcacggtctccctctgatgccgagccgaagctggactgtactgctgccatctcggctcaggtgcaaaactccctgcctgattcatcctgctcagcatgacgagtgcctgcgattgcaggcgcgcgccgacaagactgacatggtttcgtattattagggtggagacggggtatcacatgtgttggacgggtggtctccagatcgtaacgagagtgatc

SEQ ID NO: 633819 - DNA, 463 bp, Homo sapiens
gataatataatcttatatgcagaaaatcctaaggattcgaccaaaaagctgttagaactaataaacccagcaaagtagcaggatacaaagtcaaagctcaaaaatcagttgcacttctatacactaacagtgatcaatctgaaaagaaaattaagagaatagtttcatttacaataccatcaaaaagaataaattaattaggaattaacttaaccaccagaaggtgaaatacttgcactacaaaactacaaaactgcaaaacatttctgaaagaaattaaagaagaacagaataatgggaagacatcccaggctccctaggttggaagacttaatactatccaaaccaacctacagatttaatgcaattcctatcaaaatcccaatgactttttgtagaaatagaaaaactcatcctaaagttcatatggaaactcaagggatcctgaatagcaaaaaaaaaa

SEQ ID NO: 633820 - DNA, 414 bp, Homo sapiens
gcctgccggatgcacactgcacactacgtcaaataggagtggtgagagagggcacctgtcttgtgccagttttcaaagggaatgcttccagtttttgcccattcagtatgatattggctgtgggtttgtcataaatagctcttattattttgagatacgttccatcaatacctagtttattaaaagtttttagcaagaagggctgttgaattttttttttttttttttggagacggagtctcactctgtcacccagggctgggatgtgcaggggtgctatctcgggctcactggcaagctccgcctcttgggtgttcatggcggttctcctggcctcaagctctcccgattgggctggggactacagggcgcccggccatttacgcctgggctaattttttggtattttacagt

SEQ ID NO: 633821 - DNA, 279 bp, Homo sapiens
  misc_feature (7)..(7): n is a, c, g, or t
  misc_feature (73)..(73): n is a, c, g, or t
  misc_feature (98)..(98): n is a, c, g, or t
  misc_feature (106)..(106): n is a, c, g, or t
  misc_feature (111)..(111): n is a, c, g, or t
  misc_feature (118)..(119): n is a, c, g, or t
  misc_feature (130)..(131): n is a, c, g, or t
  misc_feature (144)..(144): n is a, c, g, or t
  misc_feature (149)..(149): n is a, c, g, or t
  misc_feature (168)..(168): n is a, c, g, or t
  misc_feature (206)..(206): n is a, c, g, or t
  misc_feature (239)..(239): n is a, c, g, or t
  misc_feature (242)..(242): n is a, c, g, or t
  misc_feature (273)..(273): n is a, c, g, or t
tgggcgnggtcccggtgtatggggacgccccggagcccgccgctttggatcccagatcggcacccccgtcacngtcagcacggtgatcagcaatccgngcaggcanacganccattgnnaggccgtgccnnacacgcgcgccangtgtnatgcatagagccagctctngaccgtgttgccgacgtgctcgcccgtcgggcggaacnatctgatttcctcgccggtgtctccgtcaaacnggncggacgtgcttcctcctttgggggcacgctngaagaa

SEQ ID NO: 633822 - DNA, 83 bp, Homo sapiens
cacgaggtccccggctgaagttttctgagattccccagcgcctcacagccctgctattgcccccccgacccaattgtaagaaa

SEQ ID NO: 633823 - DNA, 305 bp, Homo sapiens
  misc_feature (26)..(26): n is a, c, g, or t
  misc_feature (33)..(33): n is a, c, g, or t
  misc_feature (302)..(302): n is a, c, g, or t
ccaacacaccaaaatggacacatgtnatacatncgaaacaaatctgcacattgtgcaacatgtaccctagtactttaagtataataaaaaaaagaaaaaagaaatcaagacaagaaatttattcaaaatcatacaattacatgaaaattcaataacctgctcctgaatgacttttggataagtaaggaaattatgggcagaaatcaagaaattctttgaaacttaatgagaacaaagatacaacataccagcatctctgggacacagctaaggcagtgttaaggtggaaatttatagtactnaaa

SEQ ID NO: 633824 - DNA, 135 bp, Homo sapiens
acaaaacctcacacactgatactatacacacacacacacacacacacttatatatataaacaagtctatgtatatatacacacacacacataaacacagacttgctttatagatatatcacatggccactcaata

SEQ ID NO: 633825 - DNA, 1556 bp, Homo sapiens
  misc_feature (1339)..(1339): n is a, c, g, or t
  misc_feature (1481)..(1481): n is a, c, g, or t
ggccagcatgatccggtgggcccccagagcgtctcctggacagagcccagtcaccctggacgagctcttcgcgtagcctcagaccgtccttgtaaagaggtatgactgcagccgattatgggcctacgcgctgtagtgtcgtgcgtctcggggaactgtcatcattgagaataagcgctagctcttcatccagagaactgggcgcgagggatgggattcagcatatgctggacactagttggataccggtaacaggtgaatggaccagcttcgtagcgcctgtgaatagcgatagtcctgttgtcactgagcaggccggactcagggagggagtgcccatgcgagcaaagtgccgataactgtcattcgagcatcatttcaattctactccgcaacaagtccgtgtcgcgcatcgttgagctttcatctgtgcttgagggggagacggcgtggtagcgtagagaccacttgcacggccttggtgccttgcagtgctctcacccaattccttcatgagcaggcaggctcacagccatgtaggctagatgaagtattagacactacggcatggagagagcactcacaaggagcgcacattccatggtacccgtaggtgatccccaatcccttgttgggcgtggcgtggcatcgcgggggattcgttggcattcaagtgcccatttggaacgtgtcccaatttcgagtgggcgccaataggggcgttggagttgcccccaatcggagtaagtacctttcgcaatgggcacacaaaccaagttaatatttgggcttcggggaaggaactagaagggggcgacacgaaccaaggtggctttagacttcgcggccatctcttggggggggtttttctcctatgggggagaagttccatcacggtcatttgggaatactcgcattggtctgggcaagggggggggtcccccttggccccatggggcctgcctaggaaacagctttggcgtgggggtaccctcggggggccaggccccatatggcggtgtgtggtgcaaccacgagttcgttccctttgtaccaggatgggccgccccaggaaggcgtcccttcgtagccgtgggctgcgcaggaaggtcataaccctgggtgcttcgaagtccgaacggtgaagccgaggacacactgggcctgagtcacgcgtggctcccccgataggagccagggggctagaccaatagtgtggcgccgggacctggttcatgggggaggaaaagagggcgccccaatagtaacatgggtgggggcccccaccaaacggcggtgtcgtaaaagtacggtcacccggtgtgggggggcgaagacnccccacttggggggtgctgcacatagagagggcaccagacttctactcaagaacatgcggcaggcgcctaacaaaagaccgagacaccaggagggacacgcagagcacgcgcgtcaaccaactgcgcgtctcctcagcagcnacagtggagcgggcagctcgacaccaccagagtggttggcacaccacacccacgtgacacgacagtagcagtggc

SEQ ID NO: 633826 - DNA, 495 bp, Homo sapiens
tttacggtgctcaccaccacacccagctaatttttgtatttttagtggagatgggtttcaccacgttggccaggctggtcttgaactcctgacctcaagtgatccgcccaccttggcctcccaaagtgctggaattacaggcatgagccaccacacccagctgttgttgcagtttggagtctacccagtcctccaacaataacccctctgaggcccatgaaagccctgggctcagccagagttgagcagatgagggaacaaccagctgcagagaggagccaccttctctgctgagaacttcagagatctgcagagaccaccaaatgaccaaatgacctgcctgcagggaggaactaccctctccaagggcctcctctctgctgagcactgaacactgagggtatgacctgcctgcctacagaggggagctacccactgtgggtctcctctgagctgttctaacactaaataaagctcctcttcatcttcttcacc

SEQ ID NO: 633827 - DNA, 374 bp, Homo sapiens
tcagatccccgccgtgctcccctctggtcgcgctcgtctggttgtaacgtgcctggcgtgagcgtgggcagctgaatgcatgggcgcatatcgaccctgtgggggtttccgagctgcgattggctcttggcgttctttacctggtttctctgaggtcttgccgccctggtgcagatcatatgctgcctcgggcccttattcccgagagtgcagacgtgggcgccaaggtcgtggtcgaaacggaacggagccctcatggactccagggtccgaagttccctcgggaaaccagcaggaggtgggaaaagagccccattagggcagtagatggagcaacagcactgagtgagattccagggggccacagcaatggg

SEQ ID NO: 633828 - DNA, 196 bp, Homo sapiens
ctccaagaatgtttagggccgtagctgggtggtccccaataaagaaaacccacatggctgtgtttttggagcgacccaaggcacaggatacaaacctgtccatgccccaattattgcatttattaggacgccctgattaaaattttgttttcccctgagaagacatttatttttcaataaattcagggaaccctta

SEQ ID NO: 633829 - DNA, 967 bp, Homo sapiens
gctgtagagggcggctcgcggcgggcagtggcggcacgaatgtcggctaccagggctactttagccatacctcggcaagcgagccaatttccacctctgtgtgctgtacgagctcactgaaacgtgttcgtgaagagcgaagacttttcgctcccagccttatatggatcgcgcgtgaccaccccttgccggcaggtggcccatgtcaagcacctgtctgccagccagaaggccactgaaggacgacaggacgaaggccctcctggagcagccctctcccaatggatgcagaaacgctccacgctcgcactcgcccctccaccccctcacaggcccgagcccccggccgacacacgacaccccggcgcgcccccgacacgcacctcggcacacacgggcggcgcggccgcgcgcccaccgcacccccccccggtccccaccgccgccccgcccatccaacgcgcccccccaaccccacccactgatcgcaaccgggcccccccctccccgcccacacgccccacggcaccacccgcacgcgccgctgcgctcgccaccccgacccacgcgacgcactgcccggcaccacttgaccaccgctgaccccccccaggcccagcgccctataccccactccccacgctgggcgacctaaccgacaccaccacaccgacgcccgcaacccacgttgacgcacactgcacgccccatgccccccctggcaccctcgcccccctgcgccacagcacccccggccccatgcccacacctccccgctggcgcccgagtccaacctggcgaaaccccctggaacgacgcccaaccaacacgcgtggatcccacagctggtaaacacaaccgctaccagtcgtacaccaaccaaacaccagagcacaacaaaagaaccagcaacgccagagagcgcagtcacacaagcgccgcctagaacaacacgtcacaacagcat

SEQ ID NO: 633830 - DNA, 154 bp, Homo sapiens
tgaaccgagtccccgatcgatggcgcactcgttcacgaatccgactaggtaatcattaggttgtgggttcgttcccctgcacattgctcatctgggttcccagatccggcgttgtcgctgagctcgaatgctatgttcgctggccctgcccgta

SEQ ID NO: 633831 - DNA, 358 bp, Homo sapiens
ggatgagctgggcaaagctccagagaccagtgtgcccgggggttcccaaatttcagccggtttttatacaccacctctataatttggctacatctggcacggcctatatcccagttgccggaattacttccttggaatcaactaatttttaagttcagtaaatgtattttaaaaagacacggtttcacggtgggaaagggaaactcagtatcacttcaccagagatagaaagtaacggtaaaaataaatacaagggaaacaaaagggtgtcatccaattctatctagatccttcggctggcctaggctctcaggggagagtagcaatgggccgggggttaagaggggtacggagctcg

SEQ ID NO: 633832 - DNA, 991 bp, Homo sapiens
ttttgctcggatgggatacccgcaccgccggaggttgtgcggtccccccactataatatctcgtgggggggctccccacgaaaagtcttttttttcgttgctgcggaagaaacacatgctatagtcctctgtcgctgtacatgcggagggaagaatattgttttactggcccgtgctcttaaaaaaaaggggggtgtgctggtaacccctctggtgtatggaggccaacgccccacaaggggggggtttaattccccccgcggttgtggcgaccagagagaagtgcttgatagaccgcctttgggacggccacacaaaaagccaatcctttgagggcggctccctccgccgtcaatcgctacacttttttgggccggaccacttccgccccggaccggaaggaagaactactttctttgtgggaacgcccgctgggcttgcttaaacgaccccgcgtgttgttgtcgggataagacaccaactggtttctatggcgctgcgcgccacggttgcgaaagaagttacctttccctctcgcttgatctgcactggtaggctactcgcgtttttccgccaccgcataccttggcgggtcgacccacacaagtggcttctgcccccagttgcccgggggacctcttctccactcgatggcggctgcggcgagaccaccactgctgtgtggtgttcaaacaggcaggcccaaccccactgatggcgccgcccccctcttccttgggcaaaagcctggcggggacacctgggatacattctagcacccacggcgggaatccgccaagacctggggtgagggaatcaaacgtgctcctctcacggacttgcgtttagaggtgtggagcgcgcggggaggcacactcacaacaccgcggtgtctattgcccctcgccttagaacaaattagaaggggcttttcttatatatctctgctccttcaaagatcccagaattcaccccaacaaaaacacccatg

SEQ ID NO: 633833 - DNA, 169 bp, Homo sapiens
caccgggagctggaagagaaaggaagggaagggaagggaagggagggaagggagggaagggaaggaagggaggaaggagtaatgtatgtcttgcttaacgtacatatacctagatttgattatatcatattagtagtctatttacagagataaaatacactgtagcttc

SEQ ID NO: 633834 - DNA, 1060 bp, Homo sapiens
cgtagggtattaacccgcccctccggtttagcgggatctgattatactccttgacctttctggctgatgtactgagggcacctgagacagagtgtgtcggtgtgaaccagtggtggtgcagtgtccctccaaccacacagcactgactcctgggactctgaagaatcacagaaacactttttatataaaataagaattataccatagcaacaaaaaaaaaaaaaagacaaaaaacaaaaaacaaaaaaaacaaacaaagggcgacaacacaaaaaaaaaaaaaacaaaaaaaaagaaaaaaaaacaaggcacggcgggcgcgcccggcgacacacaccaggccacctcgagggcccgccagtcacgcagacaacagaagccaagagaagtgaagggccaccagtcgaacgcctcatgagtacgggaagggatgcgagacaacgtgcagtaagagtaaacagagggctacaagtggaggtcaggcgtctattcgtgaaaagaagcgatgagggcgagagaagagcgtagtagtagcgtaggcgggacagacagcagtacccgtgacagctgaagtacaagcgcgagatggcgaggtgcgaggacaggcgcgcggtacagaggaaacgacacaggggggcaaaggagcagacagacgcgccagcgacacatcaaggaaggcagcacggaaaggagacaacacacagacagagggcgaggagagggaggaaaagcgacgggacgaaacaaagaaggggagcataggagaaggaggaacagcgagggtgacgaaaccaaacgagaagagccgagcaggaagcagagagcacgcggggggacagaagaggaagcacaggccaaagaaactccacgccagagggcagaagaacagatagaacagagcagactgaaggaagcgggacagcaacgcgaacaggagaaagcggagcacgcagcagaccgagagaggagaggcgaagaacagagcaccaacgcgagcgggaagaggacggacgcacgggaacagggggagcagagcgagcgcaaggacagcggcgcgcac

SEQ ID NO: 633835 - DNA, 142 bp, Homo sapiens
atccaaagaattcaggcacgaggccgggctgaagaggagcgtggctgtctcctctctccggcataggcgtgtaatcgcccaatgatatccggtgtactccgaaaagggggagatcatcaagcaaaaaagtaacttaaactga

SEQ ID NO: 633836 - DNA, 1340 bp, Homo sapiens
gctgaagcaggcgctcttgggctcggcgcggccgtctgcaatccgtaggaggagacgcgccgccgcagccaccatcatgcctggggcatccttacaggcaaggcttcggatgcggtggtcaccataccgattcgagccatgttatttgaccggactgatagtcgtgacccctttcgaggtgctgacaggcacgcagagaaacagggaaaagaacgaacgtccggcgggaagcggcgcttgtgcgggccctgagggccatgcatgcgcacgtgtcaggccgtcggcgcaggacctaacttcctagactgcgcgctagggcggagacattctcgtcgcaaggtacgtcccaggatacagagcgcaagatcccgggtgatcgcccagcagtgtggtgttggttcgacagaagaatcgaggagaccgccagcgctgctccgtggcgcttgagcaatagaaagcgaataaagaccgatgtatggaacagaatgactcgtggactcattcagatcttgcagtggctgacattcggcagaccattacctttggactacgagagaatcaggagcaagggtgaacgcagccctccgttgtagaccagatagcaatatcgagaggcagccacacatgtgcctgtaccaaagggttgtacacggccgggtgcaatacagtaagagcgggctaccgtaactatgtaccccggcatattcacttggaacacggtccacataagtcctggcacagactctgtccgcacgtgttgcttcggtgtccctgaacggttcccgccacaggggcgaaggccccgtgggaaaacctgcctgttgcaagaagggcgacccagatagtgaacaggcaattgtgttcttcccgcacttcattccttgccggacgcgaaagcgtatgaatacttggcgaaataagtgcacttctcggtgcaacacgctgggtattgaagataccctcccaacgttcgtagaaccagcgttatcggtaccattatcaggtatgggggatggaaacccggcggcgtcggttcttagcaattagcacatatgaattaagacaacggctaggaacacttaatttacccgtaacattaccggttggaacattcggcgtatgatacaccccaaaagaggtagtgtgcccctatgaagcgccaccagggacagtgggaatacggaagagatatacacaggagggatttagtgcacagggttaggtcgaagcacttcccctagaagaaacagtttaacaggccgaacattaaaaagcgccaaaagagggcccgtgtaatgccattaggggagaggagttcctcaccaggggagagcattacg

SEQ ID NO: 633837 - DNA, 186 bp, Homo sapiens
gagatgcagcgtgacatagcatgcggcgagtatcatcgagacatgccgagttctcgcgggaccctgcactggcacgagcaaggtggcggtgcaggctgtgcaggccatgaaccgcatctgtgtgctggccgtggacctgcagcgtgtgcggcacatcaaggccaccgatctgcggcccatctacat

SEQ ID NO: 633838 - DNA, 265 bp, Homo sapiens
atcccggacactgttaggggcagtactctaaacagacaataaagtatagaagaggaatttctggcaacagcaagaatgatgcaagacaagagaaaagaaaataaagcaacagaaaatggggaaacaagtaagtaaacacaaacacattttcgtttttgttctctaaattttctgcaggagtttcaaattgctcaactggccatcgctaatattaaggaggaaagagatctagggaatgaggcaaaaaataacattcttctctggt

SEQ ID NO: 633839 - DNA, 120 bp, Homo sapiens
cggctccctgacatgtgctgggattacaggtgtgaaccactgtgcctggccaaaattaacttcttaaagatgctttatctttgtcttgtatctccagtaccccacaataccctggggtgt

SEQ ID NO: 633840 - DNA, 489 bp, Homo sapiens
accttaagtagatgtgagtccttatgtataaggtgagtctctgaatacagcagatacttggttggtggattttatcgatcctgccattctgtatcttttaagtggaacatttaggccatttacgttcattagtattaagatgtgaagcactgttatatgcatcatgctagttgttgcttgaataccttgttttttccccccattgtcagttattgctttccctgtgagatttatgctttaagaaggttttattttggtgtacttcgaggtttggtttcaagatttagaactcctatagcatttcttgtagtgctggcttggaagtggtaaattctgtcagcatttgtctgaaaaataatttatctctccttcatttatgaaccttaggattgctggattcaaatttcttgcctgacaattatttggtttaaggcagctaaagataggaccctaatcccttctgatctgtgagatttctgctgaaaaatg

SEQ ID NO: 633841 - DNA, 372 bp, Homo sapiens
tattaatactgaaactggtgatcagcagcttcccgataagatctcaggagctgggcgagtgggctcaagcatgtgcactaagaggcaacatggtggagttaactggcatatgacctgggagcatttgactggtaaaggaagaatgcctcaagtgagcatgcgcacttcagtaaacaagctgcgcatgaggcccctccggagcgctggatcggccactgggcatggggtgctttacctgggcgtatgcccttgaatgcaggtgtgggatgaatgacaaggattgtatttgaagagcagggcaaagggcacaggttgttgaaaccaaggcaggagcgggaaggcattcaatttgccatttgatgacctgcatgc

SEQ ID NO: 633842 - DNA, 723 bp, Homo sapiens
cggcgcggctacgggcgggtctggcggcccaaccccctgctgccagtcagggcgcacaaaccccaggagagaaggcggaagcaggcagcgactctaaaggcagccccaggctggctaaattgcggttcctggtatgtgaaacctaggcccgcgagtgcccgggcccagtcccgtgcctatgttcaggaagcggctcagcccctaggggcagcacatacagagacaccatggaacactagtgcattcctctgccgtcgtgctgggaccaggctttcctgaccaatatcaccttcttgaaggttcttctctggtgggtcctgctgggactgttatgtgtgaactggaattcggcctggcatattgtgtcctgtccttgattctagttggatgtactgtcgtggactactgaggccctgacatgagaagtacatgagggacgatgatatgagccgcctactctggtgttcaatccaggctgtgaagccatccagggcactcctgactgcagagctagttggaggcgcgagttacagcttgagacccctgggcagggagatacggacacagctgtgctgtccatgcagactaaacgtactgatgtggtctcctcaaccatggctattggatttgattcaggtgtataggactaagggccgcatgcgggtagctctgtgactgcttagtaactaacgttcttccctggacacttggctgcatttgact

SEQ ID NO: 633843 - DNA, 373 bp, Homo sapiens
taggtgaagccagagctgtacagagaagattcctctattttctcagccagtactcctaggcaacctatacatccgtgagtgggggtggaggatatgcatgctggaaacttcctatgacaatttttatttgactggtgttcttgttagatctgttagtaatgagaaaagatgggactggaacttaaaaaggtaaaaaatttacagactttaggcgaatgcactaaccgagaatgaggttgttatagttttataaattatgctacctgagaatatgtaatactgatgagtcagagagaaaccttgaatggtgaattcctagaaaaatcaaacaaattctcaagcaaattaagttctgctgctgaagacctgtttg

SEQ ID NO: 633844 - DNA, 112 bp, Homo sapiens
gctgagggtggaaggggagtgagcagacacactcaggaggtgtcttgagattatcatccaccctcagcggatgataatctcaagaaactaaggaagaataaataaataatat

SEQ ID NO: 633845 - DNA, 909 bp, Homo sapiens
  misc_feature (368)..(368): n is a, c, g, or t
  misc_feature (405)..(405): n is a, c, g, or t
  misc_feature (409)..(409): n is a, c, g, or t
  misc_feature (414)..(415): n is a, c, g, or t
  misc_feature (740)..(740): n is a, c, g, or t
ggtgttttttttcttgctgcagcaacgcgagtgggagcaccaggatctcgggctcggaacgagactgcacggattgttttaagaaaatggcagacaaaccagacatgggggaaatcgccagcttcgataaggccaagctgaagaaaacggagacgcaggagaagaacaccctgccgaccaaagagaccattgagcaggagaagcggagtgaaatttcctaagatcctggaggatttcctacccccgtcctcttcgagaccccagtcgtgatgtggaggaagagccacctgcaagatggacacgagccacaagctgcactgtgaacctgggcactccgcgccgataccaccggcctgtgggtctctganagggacccccccccaatcggactgccaaattctccantttnccccnngatattatagaaaagttaatttgtatgaactaatgaatcattgaaacaggctctcgatggctgggtggacaagatgggcaagttgtatgaggaaagatgacaagaaggcacaagaaggcgtgagctagaagcgggaggcgtgaaaaagaagaataaaaaattgtgggctggaggcctatttgtgggtttgatacgtgcctcttttttggtgtcaaaggggaggcgattcttgggagtgtgacccctggcaaagaaggaaggaggctgttggtcagtggcttactctgaatggtaattctgtgcttaattatatttgttgaaattnaaaaattggagtgtggttcaaacttggtgtggaatattgtgaaaggatgtttttgctatttttgagacaaacttgaggagaggaggaatgagacaaaataagtgggaggacgcatgggaaattaagcccaatgagggaagggtagaattgttttagaaattactaatgg

SEQ ID NO: 633846 - DNA, 166 bp, Homo sapiens
cacagacaggcacgtgtatgcacattcacaatggaggaagaagggatatggtgtgcactgaggtaacgtgagcagggatacagaagagagctggagccgtcacagtctgattctctcattgtacataacctttaaggtcttagtttccctgagttctctggtatgg

SEQ ID NO: 633847 - DNA, 726 bp, Homo sapiens
tggcggcaaaaattaaagggtgatctaagccgtcgtgtttgtaaaccggtggtcgtcttgggtataagccgaaggtttgcctccaagtttttcggtaataatgcgcctgggattgagttcgaagaaggcccgcttaaaatgaaattgtccgttaaagttggcgttttgcccaaagaattggtggggtgccgcgaaggcgcgtgggcgcttaatgtgtgtggtacttaatggatccccgaaatgtggacaaacagttccaaaatgacatgggtactggactgattgggtgccctgtgtatgcccaagtaaaagtgagtgagtcttcctgtccgcttccatgagcgggtccagcaagcacacgttcccctatggccattgcgctggtacttgagcatgggcgtgttagggacccatggacgggcaacctcaattgaatgccaatcgaccgtgcaatataaggcaatcaggcaaatcgcggtaaatcatgagggtcaccgacaggaatcggcgtaataggaaggtcataggaatttggaatagaatataataactgggcaggtaatgcgaggggccctttggtggctggatatggataaacatgggtcgatttggatctcggtatgaacatgggcaggggtcgaagcggcggcggtaggtggcggcgatcggagatcaaaaatggaggaagagagcggcgcgcccggcgtgccaacgggcaacggctca

SEQ ID NO: 633848 - DNA, 441 bp, Homo sapiens
  misc_feature (368)..(368): n is a, c, g, or t
ggtgttttttttcttgctgcagcaacgcgagtgggagcaccaggatctcgggctcggaacgagactgcacggattgttttaagaaaatggcagacaaaccagacatgggggaaatcgccagcttcgataaggccaagctgaagaaaacggagacgcaggagaagaacaccctgccgaccaaagagaccattgagcaggagaagcggagtgaaatttcctaagatcctggaggatttcctacccccgtcctcttcgagaccccagtcgtgatgtggaggaagagccacctgcaagatggacacgagccacaagctgcactgtgaacctgggcactccgcgccgataccaccggcctgtgggtctctganagggacccccccccaatcggactgccaaattctccgcgatcgaagtgtggggatacctctagatcagccccac

SEQ ID NO: 633849 - DNA, 362 bp, Homo sapiens
  misc_feature (11)..(11): n is a, c, g, or t
ggattttcccnaacacccaccctttcccccttcagccatggtgatggcagagaagataagaacttggagcccctttctcactggagaggaaaacttgtcatttggcttgcggagaaggttcccccccacgcccggaggaccatatctttcctatggggtaggaaatcatatttaaaaggcccaaaaaatgtaaaaaacttgaatgggcttggattatacccttaaaattattgagaggatctgctttcccggctgaagggattcattcattattctagtcccgctttagccccttgtaatttgggggaattaagcttttttttttaaaacaaaaaaatggataaaaataaacccttgaaaag

SEQ ID NO: 633850 - DNA, 715 bp, Homo sapiens
ggtgttttttttcttgctgcagcaacgcgagtgggagcaccaggatctcgggctcggaacgagactgcacggattgttttaagaaaatggcagacaaaccagacatgggggaaatcgccagcttcgataaggccaagctgaagaaaacggagacgcaggagaagaacaccctgccgaccaaagagaccattgagcaggagaagcggagtgaaatttcctaagatcctggaggatttcctacccccgtcctcttcgagaccccagtcgtgatgtggaggaagagccacctgcaagatggacacgagccacaagctgcactgtgaacctgggcactccgcgcggatgcctcggcggcgtgtggatctactgaggggagccccccagcgaagctggactggcctaatttgtctccgggatttaagcccgtgggatacttgatacgaaacctttatgtgtactgaagtagtgcatgtttagaacactcctcgggccttaatatgtaatttttctttttaattactttagagagctaggggatgcaaatgttttcagttagaaagcctttatttactttcggaaatgaaccaaggaaatgcatctgtctaagaaacttgcagattatcggaatgtcaggtaaaacatgtactggtttctctggcaagtggatcacgcactttgaaaatgggatgttggaaaacaattttcttaattaaga

SEQ ID NO: 633851 - DNA, 396 bp, Homo sapiens
ggtgttttttttcttgctgcagcaacgcgagtgggagcaccaggatctcgggctcggaacgagactgcacggattgttttaagaaaatggcagacaaaccagacatgggggaaatcgccagcttcgataaggccaagctgaagaaaacggagacgcaggagaagaacaccctgccgaccaaagagaccattgagcaggagaagcggagtgaaatttcctaagatcctggaggatttcctacccccgtcctcttcgagaccccagtcgtgatgtggaggaagagccacctgcaagatggacacgagccacaagctgcactgtgaacctgggcactccgcgatcaccgcctgtggttttaggaccccccatcggctcaatttcggttgccggaatttg

SEQ ID NO: 633852 - DNA, 346 bp, Homo sapiens
ggtgttttttttcttgctgcagcaacgcgagtgggagcaccaggatctcgggctcggaacgagactgcacggattgttttaagaaaatggcagacaaaccagacatgggggaaatcgccagcttcgataaggccaagctgaagaaaacggagacgcaggagaagaacaccctgccgaccaaagagaccattgagcaggagaagcggagtgaaatttcctaagatcctggaggatttcctacccccgtcctcttcgagaccccagtcgtgatgtggaggaagagccactgctcaatgtgtctcatttggtcggcagggtgtcttctccgcgattaaactgtggccga

SEQ ID NO: 633853 - DNA, 130 bp, Homo sapiens
tgtcggacatacttctggtgggcactgagcagaaacttgaggatgaaatcagtgagctgcatgcaccttgaaaggcttgggctgatctcctcacttgagtgcaaggtccatcgaccaaagccctgttctg

SEQ ID NO: 633854 - DNA, 360 bp, Homo sapiens
gtaccatagcagtgaaatagcccaacggtagaagtaacacagtggaatttatgattcaagcttaagagctaagtcttccaaggcagaagctatgactgtagatgatgaaaacttcttgggaaggtagactctagcaggcattaaagggtagagcagattttggttgtggagtgggaggaggtattttgagtggtaaagtcacatatactctcgctccctcaccactgctgcatatgctcgttacatgtgtggagatttggagttgctctgcacacactatgtctcagctcatggcagatgtctacattctctggttatgtacagtctgagtggctctcatctcacagtgccttacatagg

SEQ ID NO: 633855 - DNA, 396 bp, Homo sapiens
  misc_feature (365)..(365): n is a, c, g, or t
gaggcaggaccgtgcgacctttgaaggataataaggaagtgtttggtacgcacatgcgagcggtggagaaggcgggttcatcaaatggaagataaagtgactagtccagagtaaagcagaatgagagcatagattaagaatgcacatggtagtatcctgcatctggagacgaaaacgcctggtagggttcatgcatttctctattaggtggaacatcgggcttgcatgaaacgggtcgacaaatattttgagttctcggggatttacaagcactggtctaaaggtctgttagttgtaatgatacatagtcgaacttccctagctggcacgctcacgtgagtagagaacgagagcgttcagctggntgtacccacaagttccactagctctcgctaa

SEQ ID NO: 633856 - DNA, 913 bp, Homo sapiens
gacgtctagaacccaggaagtgctaattgctcaggaagctgtagttgaattatcacatgttgatggtgcccccacacgtcatgatctgagcatctgagtcaaggaatactctgaaatggcgtatatccttgatggcgtgtttgcacatctctcattgggtgtggtaccctatttgcaaatttgcgtgacgatttaggttggatcatacgtgccctagctgtggttcaccattaatgagtgcatcatggcggcgatcagattaggatttcgtgcatcaattctccaacctttggatagttcctctcactctattgaggttcataccagtgaccggatcatggtgagttgtgggattaagagagcttggtttcaaggtgcattagtggcatgactttcacgtcacattcatgtttactctcaggtagcacagtaatttttgcacgcaggggagccctgtctgttatttgaaaggttgacttagttaatattggtaagatacttgactgattgctgttatgactaattccttgatggtggatactacaattttgaactctaagtggaagataatacattgcaggaatttccggttaataatacgtactgtggtgtggttctccaaggacacacggacgtctttacgttgttgcacaactatattcgagtgggggtgttcaagtctcaggaagattgttttccagtacacccagggaggtgcgtgcgggggactaccgtaagaaatcgaaggtctggtataaaccttgttaatagtggtacctgcggataataagagagggttagtttcctagacatattaagcggtgagggagctaacagggtggggggaagaaaaatctaagtatgttaagagggaagggggtacatgggggggagcggaacaagattgagtggg

SEQ ID NO: 633857 - DNA, 134 bp, Homo sapiens
tctgtgtcctctatgacgctacagattcctaagagaattctagaataagaggaggggggtcgaaggcaagcaaggaacagtttctaggcttagggcctaaacctttgcatacgaggatcagcaggggatcctct

SEQ ID NO: 633858 - DNA, 348 bp, Homo sapiens
  misc_feature (9)..(10): n is a, c, g, or t
  misc_feature (59)..(59): n is a, c, g, or t
  misc_feature (161)..(161): n is a, c, g, or t
  misc_feature (248)..(248): n is a, c, g, or t
  misc_feature (276)..(276): n is a, c, g, or t
  misc_feature (279)..(279): n is a, c, g, or t
  misc_feature (284)..(284): n is a, c, g, or t
  misc_feature (286)..(286): n is a, c, g, or t
  misc_feature (300)..(300): n is a, c, g, or t
  misc_feature (309)..(309): n is a, c, g, or t
  misc_feature (313)..(313): n is a, c, g, or t
  misc_feature (329)..(331): n is a, c, g, or t
  misc_feature (338)..(338): n is a, c, g, or t
ggaaaaagnngggcccaaacaagctgaagatgctgccaaaagcataaccaatggcagcnatgatggagctcagccctccacctccacagctcaagagcaagatgacgttctcatagttgattcggatgaagaagattcttcaaataatgccgacgtcagcnaagaagagagaagccgcaagaggaaattagatgagaaagagaatctcagtgcaaagaggtcacgtatagaacagaaggaagagcttnatgatgtcatagcattaggttgacagantgntctananagaaccttttattntttagtttntttnggagaaccagattttnnnttctttntttcaaaggg

SEQ ID NO: 633859 - DNA, 492 bp, Homo sapiens
  misc_feature (3)..(3): n is a, c, g, or t
  misc_feature (77)..(77): n is a, c, g, or t
  misc_feature (99)..(99): n is a, c, g, or t
  misc_feature (262)..(262): n is a, c, g, or t
  misc_feature (309)..(309): n is a, c, g, or t
  misc_feature (406)..(406): n is a, c, g, or t
  misc_feature (433)..(434): n is a, c, g, or t
  misc_feature (455)..(455): n is a, c, g, or t
  misc_feature (469)..(469): n is a, c, g, or t
ganttccccaaactaaattaaaaattaagggccaccaccaccaccaccaccaccaacaacaaaaacaacaacaacancaaaaaaggcagatgggtcccngggtttctttttctttctttaaaaaaaaaaagttcaacccccaagcccagtcaataattccctaaagtagcagaaactccctccgaggtagatatctgagtcagacactctcgtccaccgagcgattcttttggtttaagatgagctgcgtatgaggtaagtnagccgtccgcggggggcgggggtgggggtgcctgggggcgtggcccntgtcctctgtcccgaagtcctgtccccctttttggcatctctgattgggcagggctggcgtctccccagattcccgagcctaccagtggggtggggnaggggaagtgggggggccccggggggnnacagaattgttgccagtgggngtttgtgtgtgtgnggtgtgggggagggggggagaca

SEQ ID NO: 633860 - DNA, 457 bp, Homo sapiens
gacctgttcgagaagtgtgggcttgttgtggggtttgtttgagaactcaacaacctcggtcacgacacctgccgtccgcccaggtactgagccaggaatcgttacgtcgcaagaaacaggtcgatctggttttcagggttcaagaacccgtgcccctcgtcctctttcaccatgtattcgacctcgacgccacgggccctcagtgcggccacgatgttgtcggactccgcttggaccacacgaacatcgttggcgccctgcacaaccagcaacggggtgcggatctgatccacccggctgatgggcgagcgggcgagcatgtcggcttcctgctccggcaccgcgggatcgccgacgtagcgataccagttgttggtcaggttcggacggacgaacgcgggaagggtgcgcatgaagttggccaggttggagatgcccacgtaatcgatggcggccg

SEQ ID NO: 633861 - DNA, 1211 bp, Homo sapiens
  misc_feature (982)..(982): n is a, c, g, or t
gatcacagctcctcgctcgtttggacccctaggcggaccttcagttgagggcgcccaacttacgactgagctcgctacctaggggaggctctctgctactccacagttcgctgggtagccgggactcgagtaggcaagagcgtgtgaacggggacggcctagtgccctcgcgtatcggggagagagcagtcgaggcgatggcgtcagtggcctgaacttcaggactgggctatccgtgttcagggcgaggtaggtcgctcgacagccgccgtggcccctgttccccttgcgggcatgcatacggggaccttcgccagtacttatcccctaccgtagtcctggcagcttcccgcgcggtacgagtcgggtgaggactggggatgggctaatagcgacgacagactcactagagaaggttccggagaggtccccgccgggtcttccatcctcggtgtacccaacccagctcaggtgaggactacggccatggggattgccaaccgggctacccgttccgtcaaagaatccccaatgcagcaccgtaatcccggcccccattctaccgtggcaagagtggcatgcactgcgaagcccttcagcacgaagctactggacgtcccccgggccatggcgggcttcgggcccatgctgggtgggggctcatccccgctgtccctcccgtccggtagcggcctggtgggcagcagtggaagcagcagcacgttttggttggcctgtagccatgcagcgacgcgtcatgggctaccaggtgccatggagccatgcaggtgacaccggggggcgtcccatctgcattcttccttctcctccagccccggaggccacgtaccggcgggcggtctccaggcccacgcccgccgtggtcaagcgggggccgaaaaagccttactaggggctaccccgaagggacccaccagttggggaggtccccgcggatagaccctccggggaaaaagactanggcctccgattaaaatccccccgagatgctgcacaggcagcaaacttattcggtccagactgttgtaacccccgggggtgctccccccaaagattcatgtcgggacactcaacaactggcgctcacacagagaagcccgcgggtgtattaccaccaattgcacaacgggagcgtccacaacaccctcagctagactacaacaagcaccagcgtaggagcaaactaccgc

SEQ ID NO: 633862 - DNA, 328 bp, Homo sapiens
tgaacaatctcatctcactctataccacttccaatacggctacacttttttttttgggagacagagtctcgcttccttgtccaggctggagtacagtggcgccatcttggctcactgcgacctccgcctcccaggttcaagcgaccctcctgcctcagcctcctgagtagcaggcgtgtgccaccatgcccggctaattttggtattttaagtagagacggggttacaccatgtacgtcaggctggtcttgaactcctgaccttgtgattcgcccgtctcagcctcccgagtagctgggactacagttggcacggcaccacgcccaag

SEQ ID NO: 633863 - DNA, 346 bp, Homo sapiens
tctgagacagggtcttactctgtcgcccaggctggagtgcagtgatgcaatcacggctcactgcagcctcgacctccccagctcaagcaatcctcccacctcagcctcctaagtacctggtactacaggcgcgtgccaccacacctgggctaatttttgcattttttgtagagacagggttttgccacgttgcttaggctggtcttgaactcctgaactcaagtgatccgcccacctcagcctcccaaagtgttgggattacagacattaggccatcacggccttgccctaggaaacagtttttttaatagggaggattattttggaggagggcatttgagggtta

SEQ ID NO: 633864 - DNA, 211 bp, Homo sapiens
  misc_feature (20)..(20): n is a, c, g, or t
  misc_feature (96)..(96): n is a, c, g, or t
  misc_feature (139)..(139): n is a, c, g, or t
aactgactttaatatacgcnaatttaaaaaattatttgaaaggttgggagttctcagaatgaaatgcatactgtgacaaaagaatctaactgcatnacatgtacaaaacaatctcactaaaaaaataaggagaaaaggntctggcttaagaaagtttgaaaatgagtggagtctgtaagactaacagcaaataaacttcatgtaagtattg

SEQ ID NO: 633865 - DNA, 207 bp, Homo sapiens
tgcttgcgggctctgggtctggccccatgttccccatgagcccttggggaaggtccgggagcaggggggcctcagagcagcctcgctgctgaccccactggagaggcgccggcctcggcccctgggggagctccgtggctcttgctgacctcctcgcaggccaaagctgcttgcctgtgttcccctgcccagcctcagcccctgcgt

SEQ ID NO: 633866 - DNA, 358 bp, Homo sapiens
gagctcagtgtgttctctttcaatctacatcaaatcccaagcttcaaatagaactgtaaaattctgggtgatccattattttatctaccagtagaatgagtaatttaaaagattctaaaaatgcagatctcaatttatcattagcctctcaaagcttggccccacatgttcgtcatcaccatcactgcaccacaaacaccatcatttgcttgcaccatttcatgcatcatcaacacaggtcaatttttgcagtgttcagccaacacaccacttctttcaacagcagcagttaccagtgcacacacgtcatgcaccaacacgcattttcatctgttttcaggaaacccaacatcatttg

SEQ ID NO: 633867 - DNA, 437 bp, Homo sapiens
gggggtctgagatgcagacaccctgtggggggctgcggacgtcgctctcactcgttccagaataaacgtcttaagcttttaagaatggctaggagaatgagctgtatccacttcgatactgtacgccctacaactgagatgatacaagcctatggcgagaggactcttgaatgtggtttacgcgttacaccttaccgctcacatgtaacacggcaggacacaggaaagggatcacacatacattatgaggatgatgacatggcattgcctaattggctgtacgtacttctacatgacaaagcagcgctgactggaactggaccgactctggggtacgcatttagtacggattacactcataggctcatttgtgagcactatctgaacgatgactcgaacactctgggtgccactggccaatagatgttgcgcccttg

SEQ ID NO: 633868 - DNA, 168 bp, Homo sapiens
actcatcatgctgcattgctgttgtcaatgaacacgtgaacacgcatgcacaacgttcacatatgcgaccaccactgtagataaaagcatggagactataagacagagttaaggcagctcagccatggaggttacaccagtttatccatgggcagccagcagcagtca

SEQ ID NO: 633869 - DNA, 464 bp, Homo sapiens
  misc_feature (38)..(38): n is a, c, g, or t
  misc_feature (57)..(57): n is a, c, g, or t
  misc_feature (63)..(63): n is a, c, g, or t
  misc_feature (99)..(99): n is a, c, g, or t
  misc_feature (259)..(259): n is a, c, g, or t
actatttccccctaagaaaaagggggaaccttacgaanggcagaagactttcccccngggagnaaattcttttcaaaaaatcctcctggtcaattcaanaggcctcccagatttggttttggcccacctacaagaatcccaggttcctcatttctccccccaattatctccccaggcttgtggccgtcctgcccccatgttagaaaagcaaacccccaggacagagccctccccccggctacaagcagttagtgctgantgctgtattgtcaatattaaggttgtccagttcacactcatcccctgcaccactctctcccttctgattctgcccacacagaatagaccagtgcatctcaagttatctatgatgaaggacccagagtttgtttgtttgtttgtttcattcctcccaaatctgtcatggaccaatatctttgtagacaataaaactaaattaccaa

SEQ ID NO: 633870 - DNA, 180 bp, Homo sapiens
ctgcgtgtatattcgtaattaagattgctcgggggaataggttatgtgattacggagtagggttagacgatgagtgggaagacagacacagcagaggaagtcaaggttctaatctatcgccttctcttggcgttcgaggttactatgaggctttaactagctttattcttaactttattt

SEQ ID NO: 633871 - DNA, 319 bp, Homo sapiens
  misc_feature (4)..(4): n is a, c, g, or t
  misc_feature (18)..(18): n is a, c, g, or t
  misc_feature (44)..(44): n is a, c, g, or t
  misc_feature (61)..(61): n is a, c, g, or t
  misc_feature (78)..(78): n is a, c, g, or t
  misc_feature (102)..(102): n is a, c, g, or t
  misc_feature (132)..(132): n is a, c, g, or t
  misc_feature (225)..(225): n is a, c, g, or t
  misc_feature (257)..(257): n is a, c, g, or t
  misc_feature (308)..(308): n is a, c, g, or t
tttnggcccacccccttnggaaaccacccctcctaggaaccggnaggctggaccagccccntcgtgaagtcaggtggncggtgtgcctttcccagaaggtcncctggaaatgtcctcggacttgggtcccgnagtgccccgtgaaccgtgtttttgctcctgaggtgcattttctcatcatccttgctttaccacaatgagcaatgaggtcgggttttatatgcnacttattgtatctgaattcctgtagcacaccncctaggtatgatttttttaaattaaagaattcagaataaacattttttggntccttgcgtga

SEQ ID NO: 633872 - DNA, 350 bp, Homo sapiens
tgctgggattacaagcgtgagccactgcaccgggccacagagaaagtacttctccaccctgctctccgaccagacaccttgacagggcacaccggacacgaagaccgaatgtcaggacacgaatgttcataggtcaaggtgtagcccatgaggtggcaagacatgggctacattttctaccccagaaaactacgaagcccgtatgaaacttaagggtcgacggtggatttagcagtaaactgagagtagagtgcttagttgaacaaggccctgaagcgcgtacacaccggccgtcaccctcctcaagtatacttcaaaggacacgaggacacgaaggacacgaatgttca

SEQ ID NO: 633873 - DNA, 846 bp, Homo sapiens
  misc_feature (245)..(245): n is a, c, g, or t
  misc_feature (442)..(442): n is a, c, g, or t
agctattgaaatggttgccatctttttttgaaggcctgctttttattctatggtgtctattatgttttctttttctttttttttgagacggagtctttgctctgtcgcccaggttgagtgcagtggcatgatctcggctcgctgcaggctccgcctcctgggttcacgccattctcctgcctcggctcccgagtagctgggactacgaggtgcccacccaccatgccgggctaattttggtcttntggtagagatggggttcacgatgtgtggccaggatggtctcgatctccttgacctcgtgatccgcctgcctcggcttcaaagtgctgggatgcaggtgtgagccaccaacccagcaatgtttctaaataagtatagtcccctagggaaagttcctccatttggtctagtacatatttgtacactatatcactgtgtnggtgtcgggatgtaagtacggcgatgtcctagacctccatggaggtatatagataactcatcttgtctaggcagtcccactttttctgaagaatgttttacaggcaaaatttcctattttcctttattcataatagtgtcccgtccaaccatgtccgcattccaaaaacactagtttaatcaaattctaggcggtaataatagacctgcggaggtttggttctgagccaaaccctgtctatctatttataattgcgcctcttttgtttcggcgggcgcaacaaattttctccttctacaaccccacggcgacttgggctctttttttcacaccaattgggtttcgcactgtcaacggcttattgtgcacagaccggtcccatagcccatggttttctcgtaaac

SEQ ID NO: 633874 - DNA, 550 bp, Homo sapiens
  misc_feature (5)..(6): n is a, c, g, or t
tcagnnttgggtgacgaggacatgtggccacaccttgctacaggcctccagaaattatgttgaattccaagggctacaccaagtccattgatatttggtctgtaggctgcattctggcagaaatgctttctaacaggcccatctttccagggaagcattattttggcgcggggggccacattttggccattcttggatccccatcacacgaagacctgccctgtataacaaatttaaacgctaggaactatttcctttctcttccacacaaaaaaaaggcgccatggttcaggctgttcccaaatgctccccccaaagctctggacttatagcacaaaccgctgccatttaaccaacagacgcggatccacgcccaacattcttacccccatccatatcctaagcagcattacggcccccgatgacgagcccatcccctgtcctttcttgctgccccccccccctctctcccactccggcccccgttttcaccgtcacaccccccctccccctttaaatcgcgtccccactattctccgccatgccgcat

SEQ ID NO: 633875 - DNA, 315 bp, Homo sapiens
tatgacgccatggtgcgtctggcgcaggacttttcgctgcgtacgccgctggtcgacgggcagggcaatttcggcaatatcgacggcgataatgctgcggcgatgcgctataccgaagcgcgcctgacgcaggcggccgccgacctcatgtccgggctggacgaaggcacggtcgatttccgccccacctataatggcgaggatgaggagccggaggttttccccggcctcttccccaatctgctcgccaatggcgccaccggcatcgcggtcggcatggcgaccagcgtcccgccgaacaatgtcagcgacttg

SEQ ID NO: 633876 - DNA, 414 bp, Homo sapiens
  misc_feature (78)..(78): n is a, c, g, or t
  misc_feature (90)..(90): n is a, c, g, or t
  misc_feature (94)..(94): n is a, c, g, or t
  misc_feature (126)..(126): n is a, c, g, or t
  misc_feature (129)..(129): n is a, c, g, or t
  misc_feature (145)..(145): n is a, c, g, or t
  misc_feature (308)..(308): n is a, c, g, or t
  misc_feature (322)..(322): n is a, c, g, or t
  misc_feature (373)..(373): n is a, c, g, or t
  misc_feature (402)..(402): n is a, c, g, or t
gccatcacactatccatttccagaactttttccgcttaccatattaaacctctgtacccaataaacagtaactctcantccttctgcccngaancctgagcacccatcattctacttggtctctangtnactggctattctaacnatcttttataaatggaattacataataattatcctgttgggtctggtttgtttcagttagcataatatcttcaaggttcatccattttgcatgatgtattgggaattttgttccttgttaaggttgaataacatttcaatgtatagatacacctcatttgccnacccacttatcttngcaatgggacttttgcagttgtttccagttgttcgctagtgtggagtaaangcttctctggaacatcagtgtacaagtanttgttccaaatt

SEQ ID NO: 633877 - DNA, 982 bp, Homo sapiens
  misc_feature (982)..(982): n is a, c, g, or t
tcaaaaaaaaacccgggcccccgggggggggggaaaaaccccccgggggggggtcccccccccctttttgtttaaaaaattttttagggggccccgagtgggggggggggggggggggccctaccttactccccccccggggggagggagggggggctccaaacacaaaaaggaggaactatccagaccacaaagaaggagaggggtctaagcacacaaagaaaaaaatataaatagcacgggggaggacaacaaaaggagagccccacacaaaaggaaagtcgaagcaaggagggggggcacagcacacgggaggaacaccgacaacacacgggggggatcacgcagagatcaaccaacaagatttggtggcggggaaaaaaagatcaatatctacgccccccgaaataatataagaatgacacgaagagatatggggcggcactagctagacgtaaggagctagcgaccccgaaacaaagagaggcggacacaacatgaaggaggagagcgcccctcctcagaggcgagaagagagaaacgcccacaacaatgaggaacgaaacagagtgggacgcggatcacccacaagagccgaacggctgggaagtaaaacgaacacaacaaggaacatgacggaacaacaacacccgacggagcagcccacgaagcaggaaaagagaacaacgtacagctccagtgcgagtcccaaacaagcgtgcaagaccacaatcatgtatcgcagcaccaggcgagaggcagaggcacagcaacacaataccatgcgagcgggaggaagacaaaatataagacgggggggagaaacaacgcgcgtcatgagtacaaccaacagaataatgggccgcagcaacagccagcagcaggatacgcacagaacaacatttcacggcaggagcacataccaggaagtacgggagaaacatccaggcgcagattgaacaacctcacccagacagctggn

SEQ ID NO: 633878 - DNA, 404 bp, Homo sapiens
acacataggcatattagtaaaatctcaaatataataatcaagctgaaaacgaaactagctaatcttcctgaaagaaaccttttctaccagcagtctttctcatactcagttgataacagtccatacctatccaattgctcaggccagaaaccttggaatcagccgtgactacctcaaatatcctctacccttcgtctttcttcacctcctataatcacatataaacccaaaccatcagaacattctgaaggcttaccttcaaaatacatccaaaatactgaacatcttttcctaatttagtctgagccagtaccatctcctgcctggattactgctattttatagtctggtctcacaaaagcagtcatagtgttcctttttaaatgtaagtcagatcatgtgac

SEQ ID NO: 633879 - DNA, 209 bp, Homo sapiens
tgatcatccaggtctctctgctcgaggggcaacagagagatggagcacgcagagaacagaactggaggcagtccatctagggaatgggactgtgaggccatacttgtgaacacgtctggactgctattctagagcttttatttggtgtgttcgttgcacagcagtatgaaatgtataataaatctttataaacttaacaaaaaaacaaa

SEQ ID NO: 633880 - DNA, 328 bp, Homo sapiens
  misc_feature (60)..(60): n is a, c, g, or t
gccccccccatggggggggttactcacgccctccccatcccttaagggtttctggcctantgcatccttgtgggagtcaaggaggagggcccgttgggtaaatggggccaggcttctttcccccccccccgcaaattttttggtgcttcccctgaaacccttttggctggaaagaactgggtgggcttgtcagggggccccccaaaaagggggcccttccagggaactgggggagtggcatggggcaggggcccagttttcaacaacaaaccctttggacagttttttcaaaccccggttttgaaaaaaaattttcagcggcccggga

SEQ ID NO: 633881 - DNA, 82 bp, Homo sapiens
catggatttgctggtgcagtacaactaggcttaatagggacatgccagcctgggcaacagagcgagactccatcacaaaaaa

SEQ ID NO: 633882 - DNA, 853 bp, Homo sapiens
gaagaaggctgactattcctatgggagagaccacacagaaactaaaaatacttggaagaggagaggggctcagttgagcccaaccttccagccaactccagcagggtggcaagtatgagagtgaggatatcttggagcctcagcaacctgtgctatccaatagctatcagccacatgtgactactgagcactcaaaatgtggagcatcctgcatgattctatagcactcaacaggtgtctgccaagcggacagactacagacccctccggccgcatgatgctgagcttccccttggacacatgaagattaagttagtcaagcatggagattcctccctctccttcacaaactccagatgtttggcatctccccaatatcctaagacctcctggactgggaacaaaatgagcgtagtgaaagaggaagcagctttagagaaagcaccacagggaacaaaccaataaaaaagcaggaaactcagcacaagcctgatttatgtcactgcacttctctactctcagccccattcccccaaactcccagcaagcacacaagcacacacaggcacacacatgcacatgcgcacacacacatgcacatacacaacacacacacacacacatgccttctgccagcagctctctttctcactctcacttttcttttcaaatgctggcatttgaaaaaatcccctattttgtttcaccctccttttctgcctccctaaagagcttccgaagaggagttttgatgttgcatctgagtgttaatagattcgggagtgtgaagctgttgcctgaatctcattccctgagagtgcctttctctttttaatagctgagaaagaattga

SEQ ID NO: 633883 - DNA, 222 bp, Homo sapiens
tagcctccaacgcgctcatagccgtaaagacaaggttaaaaggaaaaaatgaggagacttacataattccttcgaaataattatccttaggccagtcgtgacagttcacacctgtaatcctagtactttgggaggccgaggagggcagatggcctgagctcaggagttcgagaacagcctggccaacatggcaaaatcccatctctacaaaaaatacaaaat

SEQ ID NO: 633884 - DNA, 187 bp, Homo sapiens
gggggggggttttttccccccccgggggggggggtttttttcccccagggtttcccccctttttttttccacaaccccgggggccctttttggggggggcccgggggggttttttttttttttttaacgggggcccccgggggggttttttttttttttttttttttttaaaaaaagccccccccca

SEQ ID NO: 633885 - DNA, 116 bp, Homo sapiens
  misc_feature (26)..(26): n is a, c, g, or t
  misc_feature (28)..(28): n is a, c, g, or t
  misc_feature (55)..(55): n is a, c, g, or t
agagaaagaggtaagaatcagatcangnacagctttgagtggcaggcttacagtntgaatttgttatgtaggcaatgagaagtcatgtacgtttttgagaagggaggtgtcattat

SEQ ID NO: 633886 - DNA, 89 bp, Homo sapiens
gacagcagcttctacatctgcagtgctagagatccccacccggggggccgggatacgcagtattttggcccaggcacccggctgacagt

SEQ ID NO: 633887 - DNA, 918 bp, Homo sapiens
gactgcctggtgcagcggggtgggccctggtgtgccctggtggacctgggatggggaacctgcggtggtgcttcccgctggagtgtttctggcatgctggcatcctggggcctggtggtcgctggctgtggactggtgcctggggcctgatgtgcccgctggatgctcgctgtgatgtgcaacggccgagtgataagtgaggtgtgattgccctgtcaccaatgttggtgccagcttgtgtcaaggacatgaagatcaatgtccctgggatggagatctatctcttctccctgcccattaatggaatcatgagatcattagatttcttcctgggggcctctctcaaggatgaggttttgaagattatgccagtgcagaatgcaagaccctgtgcctggccagcgcaacagagttcaatggcatttgtatgctatcggggactacaattggccactgtatggtctcgggtgttaatgttgctccaacggagtgttggcactgacaatcctgtggggccatcatcctggcaatgctctccatcgtccccgtgcgcagaggctactgtggggaacaagatcggaagcccaactgtccattgcaagtgtgacagtgacggtgcatgatctgtgctggtacgctcatccctgcaccccagggcactggcatcgtcattcggcaccttgtgcctaagacgctgctcatgatggctgtatacaatgatgctacacctcagccggggctgaaatgcaaccctggacaattcgcaagcaaatttgatgcattcttagactaaaggtactgacaccgacactgacgcaatgatcacaagttcacaataggagtaatgaccactgtaagacaaacaaaactcgacaaaggacaaggaaatggaaaattagttttaaaaaacaaaatcgc

SEQ ID NO: 633888 - DNA, 836 bp, Homo sapiens
gaatccaggactcggtactgaacgacgaggattcattccccgtgggggtgactaagatggtgcgagaggcgagcgttgtgagtgcatccgttgcgatggatcgtgaaagagccgctcgagggcatatgtgcgagggagcactgattgctcagaaggctagcagtgcatatctaaaacacgtgttacggtcgggacagacgtgagagagcgttgtgagggccgagggagagagtcgtgtagagactgagagaggcgagagatgtgggtaggcagtgcttcgcagtctgtgtgtgagcgaaactctgcgagagacagctagagtcagtgagcaagagtaaaaatcaggtaaaccgataatcggaggaatggacattagtgatagtgttggtaggctcgatactaaggaaggtgaatgggtgtagtgtacgaacttagcatctgaaggaacaagggtaagaagtgtgagcatggtgctcaccataggaaaccggtggttgacctgagcgagagatcaagtttactgtcagaggcaggcataatgtcgtcgcaaggacggataccggaggaagtgtagcaagatactcgaagatctcgaggacctggtcatgctcgcgtgcctgttccatggcatagacagccgcatctcctgggagtgtgtggtggacctcgaattgcatgatcgatcacacggggggactacggatgcatcatatcgctcgagcggctagcctcgggcgtgaccgactggatcatccctgtgtctctgtccactctgtggaggcacgcgggctggacgtagtgcgtattgcagagcgcaggttgcttgcacctgcgtg

SEQ ID NO: 633889 - DNA, 118 bp, Homo sapiens
cacgactgactgagtcctatttcaaagatttttaggggaattaattctatgcgacgatggatattaaactgtggttcgctccacagtatttcagagcattgaccgtactatacccccg

SEQ ID NO: 633890 - DNA, 899 bp, Homo sapiens
atgcgcctcattgacagtaaatattatactagcatttaccatctcacttctaggaatcctagtatatcgctcacacctcgatatcctccctactatgcctagaaggaataatactatcgctgttcatatgatagctactctcataaccttcaacagccagtccctcttagccaatagtgtgcctatggccatactagtcttggccgcctgagaagagccggtgggcctagccctactagtctcaatctccaagcacatatggcctagactagtacataactaaactactccaatgctaaaataatcgtcccaacaattatgttactaccactgacatgactttccgaaacagacatattgtgtgaatcaaacagaaccacccaagcgtaataatatagcatcgatcccttctatattgtttacccaaatcaagaaaacctatgtagttgtcccccaacttttcttccgacccctaaaaaccctcttcctaatactaatactgatccttaccctcaaatcatgggcaagcacgcaattatccggtgaacatatcacgaaaaaaactctacctctctatagtattgtcctacaaatctcttaattataccattcaaggcacgactaatcatattgatatctcttcgaaacaaatatcctacttggtatatcaccggtgaggacagcagagcgggaggagggaatatttctattaaactagaggtcgtcctataatggatttagcaaacctggtgccaaatataataactctggcaaagataacgggcctatgtgtgtacaagtgtgagacttcgcatcacccaaggccgcagtgctgttatatgatatctatccggacctcaatctcctcacctttactctccactcttgttgtatatggg

SEQ ID NO: 633891 - DNA, 284 bp, Homo sapiens
actagaggtataccttcgacggtgttctggaagagttctcgctgctcctacagccatgccacactgctcagacaaatccatcacatacaggactgcagcacggaggtgggccaggtcagtgatggactgcatctcgatggtgtacctatcctccagagggtggtccaggatcccaggagtgtctacaaactaaacacagccagaccttgtcactgaaagcacactcacccacaagcttcttgtccagcacatcccagaagtcactcacaacacacccaaccaga

SEQ ID NO: 633892 - DNA, 669 bp, Homo sapiens
  misc_feature (547)..(547): n is a, c, g, or t
tattggcacttgcttttttgccggggctttttttccttcccaaaaggggtggagtctgggaccaagacaggaatgtgttttggggaaagaccttggggttggggacccctagaaaaccgggtgggggaagcccctttttggccttttcccaaatgggggttaaggaggaccccttaattttaggggccttttaaaaagggggtattttccccctttttggggggggaggaaacaaaaaaacgggggggggggggcggccgatattttaaagcccccccccccttaaaaggggggggggagatttttttaccccccttcttttttttggggggggggggaaaaaaccacccctccttctttttttttttggggggggagaaaaaaaaaaaaattttccgccccccccaccatccggggaggtgtttccaaacaaaaaaataatgccgggtttcccaaaaccccccttttctttttttttttaaaaaaaaggggcccccccccccctttttttgtttttggacccaccggccccgcccaaaaaaaaaantattttggggggggcggcggcttttttttggggggggggggcccccccccccccaaaaaaaaaaaattttttttctcccctccggggggaatttaaacccttttttttttgtggcgcccccc

SEQ ID NO: 633893 - DNA, 223 bp, Homo sapiens
ggcccagggccttgggggcccccccccccccatggtccagggccctgggggcctccccctggccatggcccgggtccccccccccgggtccccatccttgaggaagtaaaaaaaaacgggccccaagatggcaagcctgaaaaaattgcccagctgccctggaatggggcctaaaccccaatttttttttcctaataaacagccccctaggggccccctttta

SEQ ID NO: 633894 - DNA, 128 bp, Homo sapiens
  misc_feature (7)..(7): n is a, c, g, or t
agcccgngtcgggggggcgaaaaacaattttacgaaaaaattttttttgaccctggggtggggggggggaaaaaaactcttggtgggaggtggttgaaaaacccttttttaaagcaaaaaaaattaaa

SEQ ID NO: 633895 - DNA, 221 bp, Homo sapiens
catctgcacttcccagatggagctgtgacaaaagactggaccatctgcgggagctaccatagtaacctggtctcgcgatcacatatagagtgggcggctggtacgttcagatgtagccatgacgggagaacatacactgagaggtctggtccttccagatgggtggacataaagactgggtgctgtcgacacacagagcgggactgaagcaagtcatcatt

SEQ ID NO: 633896 - DNA, 333 bp, Homo sapiens
agatggcggacattcagactgagcgtgcctaccaaaagcagccgaccatctttcaaaacaagaagagggtcctcctgggagaactggcaaggagaagctcccaggtactacagatacatctggtctggggttcatgtaacccaagtgaggctattgatggcacctacatttacaagaaaatgccccttcactggtaatgtattccatatgggggcggattctgtctgctgtggtaccaacatgagtgtccagagcaccgttctatcccgggtctatctcactcatccgcagcacaacctcttgtggagcccacaggacattctcacacatctc

SEQ ID NO: 633897 - DNA, 347 bp, Homo sapiens
  misc_feature (233)..(233): n is a, c, g, or t
tcctctaagtcccttgcaggctctctacctatagggagcaggaagaagagaaggcgcaaaattaagcaactgtgcctgacatggcacaggatctgcctaatgagcggaggagtggggatctgaccccacaaccaccatctgggccagagcctcaccattccccgtgggccagaatgctggccccgagaagaacagcctgctgttctggaaatgagcatggcctcctgggtcangaatgacccatgttctgattgagcagcatcaccacttttctaatttacaacaggggggcaatgtcatctagaattctggagctttagtgtctttggagcatgtaaaattagaca

SEQ ID NO: 633898 - DNA, 258 bp, Homo sapiens
gctgaatcgtcggctgtaggaacgtggagtgtgccgggtgcggggggtctttttctcgtttaagttggcgatactgtcacaggggcctcccactttggatacattttttcataatcagaatatttgagaatggctgggaccttctcagagacaggagaagttgtgacacgtggcatatattagaatcagaaactggagacaatgtcgaagctggtccccaggctcctgagctctaggtttctggcctctgcaggaagg

SEQ ID NO: 633899 - DNA, 361 bp, Homo sapiens
gtgtcccatacaggcgattcttctgcctgatccggccacatgctggagggttcggggagaggctcgtttcagtctagttggcgatttcttggatagagaagttatcagtgagctgaatggaaaaaacattgaagacgtcattgcccagggtattggcaagcttgccagtgtacctgctggtggggctgtagccgtctctgctgccccaggctctgcagcccctgctgctggttctgcccctgctgcagcagaggagaagaaagatgagaagaaggaggagtctgaagagtcagatgatgacatgggatttggcctttttgattaaattcctgctcccctgcaaataaagcctttttacaca

SEQ ID NO: 633900 - DNA, 2827 bp, Homo sapiens
  misc_feature (2000)..(2000): n is a, c, g, or t
ggcacgaggccaccactgctgcctgtaagggctgttttggatacagaaaatgtgccctttctaacccaaaaaatgcttgaaatgtgtaaaagtggccagactaacagtcccaaagagggctgccctctaagaggaagcgtcccaaatctgttcagttttagagactacgtgactggggtacgtggtggggccttaccagacatccacgaggagaatccaggccttggtttggctccagctgggcctgcctggtggctgccacttattgacttaagtcccagtgattcagctcctcatctggaacacctcgggtcacccccgacaacggtggtgggagggagagcggcctcctcctccctggtggggcctgtctgggtgaagcccctctgttcccgccgaggaggatcgtctgccttattgaaaccatctaattggagatccgcagattaggctaccaagacacagctgcctccagcagaatttgtgtagtggacacttgtacgtgcactttggagacagcaagcatgaggcctgcagctgacagctttgagtggctgtgaacctgactatggaaaagatgtgactcccaacccccagccgggtgctccgagccatggccgacaccatcttcggcagcgggaatgatcagtgggtttgccccaatgaccggcagcttgcccttcgagccaagctgcagacgggctggtccgtgcacacctaccagacggagaagcagaggaggaagcagcacctcagcccggcggaggtggaggccatcctgcaggtcatccagagggcagagcggctcgacgtcctggagcagcagagaatcgggcggctggtggagcggctggagaccatgaggcggaatgtgatggggaacggcctgtcccagtgtctgctctgcggggaggtgctgggcttcctgggcagctcgtcggtgttctgcaaagactgcaggaaggtctggaagaggtcgggggcctggttctacaaagggctccccaagtatatcttgcccctgaagacccctggccgagctgatgacccccacttccgacctttgcccacggaaccggcagagcgagagcccagaagctctgagaccagccgcatctacacgtgggcccgaggaagagtggtttccagtgacagtgacagtgactcggatcttagctcctccagcctagaggacagactcccatccactggggtcagggaccggaaaggcgacaaaccctggaaggagtcaggtggcagcgtggaggcccccaggatggggttcacccacccgccgggccacctctctgggtgccagagcagcctggccagtggtgagacggggacaggctctgctgacccgccagggggaccccgccccgggctgacccgaagggccccggtaaaagacacacctggacgagcccccgctgctgacgcagctccagcaggcccctccagctgcctgggctgaggtgtctggtgcctggaacagacttccctgtggaggattcctgccagaccctgcccggctcctccctgaccggtccttgtgccctcaccagacaccctgttggccatgactcaacaaaccagtgttgggagccgtctgcctccccagctcagtgcctttctgcaccccttctctcctggggagctgtctgcatccgccaccccctccaaccactgccctcagcccccgaccttatttattaccctcccctcccacacccccaatctacctggtgatgattttaagtttgcgcgtgtcttgggttgggctggggggtttcccacatgcagtgtcagaggggccgcccggtggggctatctccgttgctatattaatggcaagactaaatgaaacctagggcacggcctccgaagctgcgtgtggccccttagaggtgagcatcagagccagagcagtgagggggagactcacccaccctctccctctcccttcagctctgggaggcaggcgcagtgcccccctcccntgggctggcccaggaccgcgggtgaaacctgggtctgtttagtttctttggtttttgtatgtttgtttgtttttgacacagtctcgctttgttgcccaggctggggtgcagtggcacgatcgcggctcactgcaacctccacctcccgggctcaagcgattctctcacctcagcctcctgagtaggtgggattacagatgcccgccaccacacccagttaatttttgtatttttagaagagatggggtttctccatgttggccaggctggtcttgaactcctggtctcaagtgatccgcccgcctcggcctcccaaagtgctgggattacaggtgtgagccaccgcacccaatcctattaggtttctttgaatcccctcatggcctgcctggtttttgctcagcctgtcttcagcttgaggagctgggaagctctggtggatgctatgaactcacttgctgaagagcagcgttcaggtgcatccccagccagggcacgtggctccctcagccatgaattcacttctcttcaggaggtttggcttggcatgaaaatacttcattcagagtatgggcaaatgcttctggaaaacccttccctgaagagagagaacgtgtgtgtgtgtgtcggtgatcacaccctcccatccttcctgcctcctgccccaaaccccgggttcctgggtctggaagggccttctctccaagctgggagctcctgggcccccaccattcactttttgtccttgctgctggcaaacagtaaagaaactcactttccctgtggcacgttatgcttcagaattaaaacaatgaagattaaaattt

SEQ ID NO: 633901 - DNA, 675 bp, Homo sapiens
  misc_feature (6)..(6): n is a, c, g, or t
  misc_feature (103)..(103): n is a, c, g, or t
  misc_feature (117)..(121): n is a, c, g, or t
  misc_feature (127)..(127): n is a, c, g, or t
  misc_feature (134)..(134): n is a, c, g, or t
  misc_feature (190)..(190): n is a, c, g, or t
  misc_feature (205)..(205): n is a, c, g, or t
  misc_feature (216)..(216): n is a, c, g, or t
  misc_feature (227)..(227): n is a, c, g, or t
  misc_feature (229)..(229): n is a, c, g, or t
  misc_feature (241)..(242): n is a, c, g, or t
  misc_feature (245)..(245): n is a, c, g, or t
  misc_feature (254)..(254): n is a, c, g, or t
  misc_feature (256)..(256): n is a, c, g, or t
  misc_feature (259)..(259): n is a, c, g, or t
  misc_feature (287)..(287): n is a, c, g, or t
  misc_feature (305)..(305): n is a, c, g, or t
  misc_feature (313)..(313): n is a, c, g, or t
  misc_feature (316)..(316): n is a, c, g, or t
  misc_feature (323)..(323): n is a, c, g, or t
  misc_feature (328)..(329): n is a, c, g, or t
  misc_feature (332)..(332): n is a, c, g, or t
  misc_feature (337)..(337): n is a, c, g, or t
  misc_feature (345)..(345): n is a, c, g, or t
  misc_feature (350)..(350): n is a, c, g, or t
  misc_feature (353)..(353): n is a, c, g, or t
  misc_feature (359)..(359): n is a, c, g, or t
  misc_feature (362)..(362): n is a, c, g, or t
  misc_feature (392)..(392): n is a, c, g, or t
  misc_feature (395)..(395): n is a, c, g, or t
  misc_feature (409)..(409): n is a, c, g, or t
  misc_feature (464)..(464): n is a, c, g, or t
  misc_feature (467)..(467): n is a, c, g, or t
  misc_feature (471)..(471): n is a, c, g, or t
  misc_feature (477)..(477): n is a, c, g, or t
  misc_feature (480)..(480): n is a, c, g, or t
  misc_feature (482)..(482): n is a, c, g, or t
  misc_feature (498)..(498): n is a, c, g, or t
  misc_feature (513)..(513): n is a, c, g, or t
  misc_feature (532)..(532): n is a, c, g, or t
  misc_feature (609)..(609): n is a, c, g, or t
  misc_feature (669)..(669): n is a, c, g, or t
aattcncttggagataaaaaatcttgtccccactcctcccccaatcccacacatctgtgctcttctgcctgagtaaattcagctttgctgaccctcctgcaanacctctgccccccnnnnncctcanccctganggcgaaggtgagcgtgcgccgctggtagtgcctagggtcacactccaagtcctcgntcacctcagccagcnggggggcccgntccacgcctgngnggggggcctcgnnggncaggggggngnagngcacatgcaggtggtagtgaggggggcnggtagtgcaggtgatgangggggggnggnctccctngcggnnggnggggngggagggnggggnggngggggnggngggggatgtgggtggggggggggagagtgntcnggagtgaggtgcgngtaggggtctgatgttccggcgatggcgagagggggatcaagtggaagtgatggngcngcgngtgggntgnanttggggtgagggatgngggggagagagcatnagagggagtgtgggtggtngaaaacaatcccggtccgcttcagccttctttgtcgagaatgttatacacccactggatgctgaggctctgggactncaggtggggtaaagtaatattcctgtagtcatctcccgtctctcggatcaggcggaggtnctggcg

SEQ ID NO: 633902 - DNA, 122 bp, Homo sapiens
aggatcccggttcactttctacacataaaactagacagaagaattctgacaaacttctttgtgatgtgtgcattcagctcatgaagttgaacatttcttttgatggagcagtttctttctgt

SEQ ID NO: 633903 - DNA, 341 bp, Homo sapiens
gtcctttccttttcctccctgtcgccaccgaggtcgcacgcgtgagacttctccgccgcctccgccgcagacgccgccgcgttatcagtgagctgaatggaaaaaacattgaagacgtcattgcccagggtattggcaagcttgccagtgtacctgctggtggggctgtagccgtctctgctgccccaggctctgcagcccctgctgctggttctgcccctgctgcagcagaggagaagaaagatgagaagaaggaggagtctgaagagtcagatgatgacatgggatttggcctttttgattaaattcctgctcccctgcaaataaagcctttttacaca

SEQ ID NO: 633904 - DNA, 2914 bp, Homo sapiens
  misc_feature (2087)..(2087): n is a, c, g, or t
ggcacgaggccaccactgctgcctgtaagggctgttttggatacagaaaatgtgccctttctaacccaaaaaatgcttgaaatgtgtaaaagtggccagactaacagtcccaaagagggctgccctctaagaggaagcgtcccaaatctgttcagttttagagactacgtgactggggtacgtggtggggccttaccagacatccacgaggagaatccaggccttggtttggctccagctgggcctgcctggtggctgccacttattgacttaagtcccagtgattcagctcctcatctggaacacctcgggtcacccccgacaacggtggtgggagggagagcggcctcctcctccctggtggggcctgtctgggtgaagcccctctgttcccgccgaggaggatcgtctgccttattgaaaccatctaattggagatccgcagattaggctaccaagacacagctgcctccagcagaatttgtgtagtggacacttgtacgtgcactttggagacagcaagcatgaggcctgcagctgacagctttgagtggctgtgaacctgactatggaaaagatgtgactcccaacccccagccgggtgctccgagccatggccgacaccatcttcggcagcgggaatgatcagtgggtttgccccaatgaccggcagcttgcccttcgagccaagctgcagacgggctggtccgtgcacacctaccagacggagaagcagaggaggaagcagcacctcagcccggcggaggtggaggccatcctgcaggtcatccagagggcagagcggctcgacgtcctggagcagcagagaatcgggcggctggtggagcggctggagaccatgaggcggaatgtgatggggaacggcctgtcccagtgtctgctctgcggggaggtgctgggcttcctgggcagctcgtcggtgttctgcaaagactgcaggaagaaagtctgcaccaaatgtgggatcgaggcctcccctggccagaagcggcccctgtggctgtgtaagatctgcagtgagcaaagagaggtctggaagaggtcgggggcctggttctacaaagggctccccaagtatatcttgcccctgaagacccctggccgagctgatgacccccacttccgacctttgcccacggaaccggcagagcgagagcccagaagctctgagaccagccgcatctacacgtgggcccgaggaagagtggtttccagtgacagtgacagtgactcggatcttagctcctccagcctagaggacagactcccatccactggggtcagggaccggaaaggcgacaaaccctggaaggagtcaggtggcagcgtggaggcccccaggatggggttcacccacccgccgggccacctctctgggtgccagagcagcctggccagtggtgagacggggacaggctctgctgacccgccagggggaccccgccccgggctgacccgaagggccccggtaaaagacacacctggacgagcccccgctgctgacgcagctccagcaggcccctccagctgcctgggctgaggtgtctggtgcctggaacagacttccctgtggaggattcctgccagaccctgcccggctcctccctgaccggtccttgtgccctcaccagacaccctgttggccatgactcaacaaaccagtgttgggagccgtctgcctccccagctcagtgcctttctgcaccccttctctcctggggagctgtctgcatccgccaccccctccaaccactgccctcagcccccgaccttatttattaccctcccctcccacacccccaatctacctggtgatgattttaagtttgcgcgtgtcttgggttgggctggggggtttcccacatgcagtgtcagaggggccgcccggtggggctatctccgttgctatattaatggcaagactaaatgaaacctagggcacggcctccgaagctgcgtgtggccccttagaggtgagcatcagagccagagcagtgagggggagactcacccaccctctccctctcccttcagctctgggaggcaggcgcagtgcccccctcccntgggctggcccaggaccgcgggtgaaacctgggtctgtttagtttctttggtttttgtatgtttgtttgtttttgacacagtctcgctttgttgcccaggctggggtgcagtggcacgatcgcggctcactgcaacctccacctcccgggctcaagcgattctctcacctcagcctcctgagtaggtgggattacagatgcccgccaccacacccagttaatttttgtatttttagaagagatggggtttctccatgttggccaggctggtcttgaactcctggtctcaagtgatccgcccgcctcggcctcccaaagtgctgggattacaggtgtgagccaccgcacccaatcctattaggtttctttgaatcccctcatggcctgcctggtttttgctcagcctgtcttcagcttgaggagctgggaagctctggtggatgctatgaactcacttgctgaagagcagcgttcaggtgcatccccagccagggcacgtggctccctcagccatgaattcacttctcttcaggaggtttggcttggcatgaaaatacttcattcagagtatgggcaaatgcttctggaaaacccttccctgaagagagagaacgtgtgtgtgtgtgtcggtgatcacaccctcccatccttcctgcctcctgccccaaaccccgggttcctgggtctggaagggccttctctccaagctgggagctcctgggcccccaccattcactttttgtccttgctgctggcaaacagtaaagaaactcactttccctgtggcacgttatgcttcagaattaaaacaatgaagattaaaattt

SEQ ID NO: 633905 - DNA, 132 bp, Homo sapiens
cacgatgcagacgatctcgcgggcatgcacggtcagcgacaggtcctgcaccgcatagcggcggtcgccgccgccgggcagccggacgtggagatgcggatgtccaggatgggcggtgcggagccggccggc

SEQ ID NO: 633906 - DNA, 492 bp, Homo sapiens
gtgagatgccctgtgtccttttgtcagtcctaagtctaagaaagctagtgtccatttatttttatatcacttcccaagtgaggctggtggctccctttgggcagtgcagttctggaaacttcagggcctattcccatgtggggaacccagtcctgctgtgactctgggagggagagggccggggatacaatcgtacattcctggtaacagccctgtgattgtctgcttcaggttatcagtgagctgaatggaaaaaacattgaagacgtcattgcccagggtattggcaagcttgccagtgtacctgctggtggggctgtagccgtctctgctgccccaggctctgcagcccctgctgctggttctgcccctgctgcagcagaggagaagaaagatgagaagaaggaggagtctgaagagtcagatgatgacatgggatttggcctttttgattaaattcctgctcccctgcaaataaagcctttttacaca

SEQ ID NO: 633907 - DNA, 1901 bp, Homo sapiens
ttttgcttatattttggaggggttgtctttttcttaacgattcgtaagagttccttacgtattcgatcattttgtatttttgtgggttacgtatctctttgtagcttgtcttttcacattagggcatttgatgtagattaaaaatttgtatattaacagaatcttgatatttatcttcatagtttgtgcttcttatgtcttgatttgtaatgacatctctatattgggttttcatagattcatggggtgctaatgtttaaatctgtaattataactatttttagtttcattataatttttccctatttaattcagtactttatttcccccactaccccccaccccccaagagacggggtcttcctttgttggccaggctgaagtgagtgcagtgacacgatcacagctcactgcaaccttgaactcctgatatcaagtgatcctcccacctcagcctccagaagaattaggagtacaggcacgtgccaccatgtctggcttatatatatttttggggggtggtgggggagagtagagatgaggtttcgctatgttgtccaggctggtctcgacctcttgggctgaagtggtcctcctgcctcagcctcccaaagtacaggattgcaggtgtgagccaccacgcctagcccttttataattccttctatttgttcattcattcaacaattcagtcagaaatactgagtgcccattacacactagatatgctgctaggtgctgggattacaggcatgagctactgtgcccagccagtttttgtatttttagaagagatggggtttctccatgttggccaggctggtcttgaactcctggtctcaagtgatccgcccgcctcggcctcccaaagtgctgggattacaggcatgagccaccatgcccggccgataaattttttaaaatcttctttctttatacatgtttctgtgctctgtttagacagtctcatagatatatttatttgttacgaattgtcccttcatcaggaaaatgattcctttttccctatttaaggtatttgttacgaattctagttttatattatctactatatcttacccttaacttttctgagtcattttcagtgtatcttttatagaaggctatggttggaatttttttaaaacctgagtatcattgtcttctgatacagaatctgaaaaccttttaaaaattagtgaggcgaaaaaaattagccaggcatggtgacgggtgcctgtggtcccagctactcgggaggctgaggcaggagaatggcacgaacccggaagccagagcttgcagtgagccgagatcgcgccactgcactccagcctgggcgacagagtgagactccggctcaaaaaaaaaaaaaaaaaaaaaaagtattcaggctgggattacaggtgtgagccaccgcacccaatcctattaggtttctttgaatcccctcatggcctgcctggtttttgctcagcctgtcttcagcttgaggagctgggaagctctggtggatgctatgaactcacttgctgaagagcagcgttcaggtgcatccccagccagggcacgtggctccctcagccatgaattcacttctcttcaggaggtttggcttggcatgaaaatacttcattcagagtatgggcaaatgcttctggaaaacccttccctgaagagagagaacgtgtgtgtgtgtgtcggtgatcacaccctcccatccttcctgcctcctgccccaaaccccgggttcctgggtctggaagggccttctctccaagctgggagctcctgggcccccaccattcactttttgtccttgctgctggcaaacagtaaagaaactcactttccctgtggcacgttatgcttcagaattaaaacaatgaagattaaaattt

SEQ ID NO: 633908 - DNA, 455 bp, Homo sapiens
  misc_feature (23)..(23): n is a, c, g, or t
  misc_feature (25)..(25): n is a, c, g, or t
ccgcccacgcgtccgcggacgcntnggcgccaccgaggtcgcacgcgtgagacttctccgccgcacgccgcccgatgcgctacgtcgcctcctacctgctggctgccctagggggcaactcctcccccagcgccaaggacatcaagaagatcttggacagcgtgggtatcgaggcggacgacgaccggctcaacaaggttatcagtgagctgaatggaaaaaacattgaagacgtcattgcccagggtattggcaagcttgccagtgtacctgctggtggggctgtagccgtctctgctgccccaggctctgcagcccctgctgctggttctgcccctgctgcagcagaggagaagaaagatgagaagaaggaggagtctgaagagtcagatgatgacatgggatttggcctatgttttttatttttaagttaataaataaataattattcaaat

SEQ ID NO: 633909 - DNA, 2946 bp, Homo sapiens
  misc_feature (2119)..(2119): n is a, c, g, or t
ggcacgaggccaccactgctgcctgtaagggctgttttggatacagaaaatgtgccctttctaacccaaaaaatgcttgaaatgtgtaaaagtggccagactaacagtcccaaagagggctgccctctaagaggaagcgtcccaaatctgttcagttttagagactacgtgactggggtacgtggtggggccttaccagacatccacgaggagaatccaggccttggtttggctccagctgggcctgcctggtggctgccacttattgacttaagtcccagtgattcagctcctcatctggaacacctcgggtcacccccgacaacggtggtgggagggagagcggcctcctcctccctggtggggcctgtctgggtgaagcccctctgttcccgccgaggaggatcgtctgccttattgaaaccatctaattggagatccgcagattaggctaccaagacacagctgcctccagcagaatttgtgtagtggacacttgtacgtgcactttggagacagcaagcatgaggcctgcagctgacagctttgagtggctgtgaacctgactatggaaatcatctcagatgtgactcccaacccccatctcagatgtgactcccaacccccagccgggtgctccgagccatggccgacaccatcttcggcagcgggaatgatcagtgggtttgccccaatgaccggcagcttgcccttcgagccaagctgcagacgggctggtccgtgcacacctaccagacggagaagcagaggaggaagcagcacctcagcccggcggaggtggaggccatcctgcaggtcatccagagggcagagcggctcgacgtcctggagcagcagagaatcgggcggctggtggagcggctggagaccatgaggcggaatgtgatggggaacggcctgtcccagtgtctgctctgcggggaggtgctgggcttcctgggcagctcgtcggtgttctgcaaagactgcaggaagaaagtctgcaccaaatgtgggatcgaggcctcccctggccagaagcggcccctgtggctgtgtaagatctgcagtgagcaaagagaggtctggaagaggtcgggggcctggttctacaaagggctccccaagtatatcttgcccctgaagacccctggccgagctgatgacccccacttccgacctttgcccacggaaccggcagagcgagagcccagaagctctgagaccagccgcatctacacgtgggcccgaggaagagtggtttccagtgacagtgacagtgactcggatcttagctcctccagcctagaggacagactcccatccactggggtcagggaccggaaaggcgacaaaccctggaaggagtcaggtggcagcgtggaggcccccaggatggggttcacccacccgccgggccacctctctgggtgccagagcagcctggccagtggtgagacggggacaggctctgctgacccgccagggggaccccgccccgggctgacccgaagggccccggtaaaagacacacctggacgagcccccgctgctgacgcagctccagcaggcccctccagctgcctgggctgaggtgtctggtgcctggaacagacttccctgtggaggattcctgccagaccctgcccggctcctccctgaccggtccttgtgccctcaccagacaccctgttggccatgactcaacaaaccagtgttgggagccgtctgcctccccagctcagtgcctttctgcaccccttctctcctggggagctgtctgcatccgccaccccctccaaccactgccctcagcccccgaccttatttattaccctcccctcccacacccccaatctacctggtgatgattttaagtttgcgcgtgtcttgggttgggctggggggtttcccacatgcagtgtcagaggggccgcccggtggggctatctccgttgctatattaatggcaagactaaatgaaacctagggcacggcctccgaagctgcgtgtggccccttagaggtgagcatcagagccagagcagtgagggggagactcacccaccctctccctctcccttcagctctgggaggcaggcgcagtgcccccctcccntgggctggcccaggaccgcgggtgaaacctgggtctgtttagtttctttggtttttgtatgtttgtttgtttttgacacagtctcgctttgttgcccaggctggggtgcagtggcacgatcgcggctcactgcaacctccacctcccgggctcaagcgattctctcacctcagcctcctgagtaggtgggattacagatgcccgccaccacacccagttaatttttgtatttttagaagagatggggtttctccatgttggccaggctggtcttgaactcctggtctcaagtgatccgcccgcctcggcctcccaaagtgctgggattacaggtgtgagccaccgcacccaatcctattaggtttctttgaatcccctcatggcctgcctggtttttgctcagcctgtcttcagcttgaggagctgggaagctctggtggatgctatgaactcacttgctgaagagcagcgttcaggtgcatccccagccagggcacgtggctccctcagccatgaattcacttctcttcaggaggtttggcttggcatgaaaatacttcattcagagtatgggcaaatgcttctggaaaacccttccctgaagagagagaacgtgtgtgtgtgtgtcggtgatcacaccctcccatccttcctgcctcctgccccaaaccccgggttcctgggtctggaagggccttctctccaagctgggagctcctgggcccccaccattcactttttgtccttgctgctggcaaacagtaaagaaactcactttccctgtggcacgttatgcttcagaattaaaacaatgaagattaaaattt

SEQ ID NO: 633910 - DNA, 456 bp, Homo sapiens
acctaagatccggatagtgcatgtgtcggtatcttcacgctgtcggtggcacattccccgctgctagtgctgtagaaattggcatcgtgtgtggacacacgccatgaggtcacgggcgctttgctgtttgctatgccgctgtctggacggtgggcgtggcggcagtgacagcaggcccttgcctcaccaacacggtgactgcggtgaagaatgctcagattgctcagtccccaatccttcttctgggtggggctgccagcactcttgtgcagaaccggggtgcgccccagggtgttgatcaggtgtcccttttccggccactctgtaagttttgggtgtcctgtgcggagggtggcggacaattgtgcccacccttaggggccgcgatggttgccgcccagtcgggcaacccaggtccggtgtttgtggagctgcccgttgacgtgctttaccccc

SEQ ID NO: 633911 - DNA, 647 bp, Homo sapiens
  misc_feature (90)..(90): n is a, c, g, or t
  misc_feature (270)..(270): n is a, c, g, or t
tcgtttaaggagaactgaagttttttgtcatctgctgtggctgttctatgaaccaccttcttctttctgcgagcagttcctgtgcccacncaatgcgcacttgtgcctgcagtttggcgagtttttcctggttcatgattgtttctttcattctttgttcgggagcgaaaattatacgggtggcccgcgtcgggggactagggttggtgctcaaggggtctcgcggtggaccaccgtgagattatggcgcacacacgcggggacgcaagncaccgaggtcgcacgcgtgagacttctccgccgcctccgccgcagacgccgccgcgatgcgctacgtcgcctcctacctgctggctgccctagggggcaactcctcccccagcgccaaggacatcaagaagatcttggacagcgtgggtatcgaggcggacgacgaccggctcaacaaggttatcagtgagctgaatggaactgtagccgtctctgctgccccaggctctgcagcccctgctgctggttctgcccctgctgcagcagaggagaagaaagatgagaagaaggaggagtctgaagagtcagatgatgacatgggatttggcctttttgattaaattcctgctcccctgcaaataaagcctttttacaca

SEQ ID NO: 633912 - DNA, 2852 bp, Homo sapiens
  misc_feature (2025)..(2025): n is a, c, g, or t
ggcacgaggccaccactgctgcctgtaagggctgttttggatacagaaaatgtgccctttctaacccaaaaaatgcttgaaatgtgtaaaagtggccagactaacagtcccaaagagggctgccctctaagaggaagcgtcccaaatctgttcagttttagagactacgtgactggggtacgtggtggggccttaccagacatccacgaggagaatccaggccttggtttggctccagctgggcctgcctggtggctgccacttattgacttaagtcccagtgattcagctcctcatctggaacacctcgggtcacccccgacaacggtggtgggagggagagcggcctcctcctccctggtggggcctgtctgggtgaagcccctctgttcccgagatgtgactcccaacccccagccgggtgctccgagccatggccgacaccatcttcggcagcgggaatgatcagtgggtttgccccaatgaccggcagcttgcccttcgagccaagctgcagacgggctggtccgtgcacacctaccagacggagaagcagaggaggaagcagcacctcagcccggcggaggtggaggccatcctgcaggtcatccagagggcagagcggctcgacgtcctggagcagcagagaatcgggcggctggtggagcggctggagaccatgaggcggaatgtgatggggaacggcctgtcccagtgtctgctctgcggggaggtgctgggcttcctgggcagctcgtcggtgttctgcaaagactgcaggaagaaagtctgcaccaaatgtgggatcgaggcctcccctggccagaagcggcccctgtggctgtgtaagatctgcagtgagcaaagagaggtctggaagaggtcgggggcctggttctacaaagggctccccaagtatatcttgcccctgaagacccctggccgagctgatgacccccacttccgacctttgcccacggaaccggcagagcgagagcccagaagctctgagaccagccgcatctacacgtgggcccgaggaagagtcgtaggaagaaagtgctgatccacgctgcagcctggatgagccttgaaaacaccatgcgaagtggaagaagccggagacgaaaggccgcgtgtgtgtgatctcatctatatgagcagtggtttccagtgacagtgacagtgactcggatcttagctcctccagcctagaggacagactcccatccactggggtcagggaccggaaaggcgacaaaccctggaaggagtcaggtggcagcgtggaggcccccaggatggggttcacccacccgccgggccacctctctgggtgccagagcagcctggccagtggtgagacggggacaggctctgctgacccgccagggggaccccgccccgggctgacccgaagggccccggtaaaagacacacctggacgagcccccgctgctgacgcagctccagcaggcccctccagctgcctgggctgaggtgtctggtgcctggaacagacttccctgtggaggattcctgccagaccctgcccggctcctccctgaccggtccttgtgccctcaccagacaccctgttggccatgactcaacaaaccagtgttgggagccgtctgcctccccagctcagtgcctttctgcaccccttctctcctggggagctgtctgcatccgccaccccctccaaccactgccctcagcccccgaccttatttattaccctcccctcccacacccccaatctacctggtgatgattttaagtttgcgcgtgtcttgggttgggctggggggtttcccacatgcagtgtcagaggggccgcccggtggggctatctccgttgctatattaatggcaagactaaatgaaacctagggcacggcctccgaagctgcgtgtggccccttagaggtgagcatcagagccagagcagtgagggggagactcacccaccctctccctctcccttcagctctgggaggcaggcgcagtgcccccctcccntgggctggcccaggaccgcgggtgaaacctgggtctgtttagtttctttggtttttgtatgtttgtttgtttttgacacagtctcgctttgttgcccaggctggggtgcagtggcacgatcgcggctcactgcaacctccacctcccgggctcaagcgattctctcacctcagcctcctgagtaggtgggattacagatgcccgccaccacacccagttaatttttgtatttttagaagagatggggtttctccatgttggccaggctggtcttgaactcctggtctcaagtgatccgcccgcctcggcctcccaaagtgctgggattacaggtgtgagccaccgcacccaatcctattaggtttctttgaatcccctcatggcctgcctggtttttgctcagcctgtcttcagcttgaggagctgggaagctctggtggatgctatgaactcacttgctgaagagcagcgttcaggtgcatccccagccagggcacgtggctccctcagccatgaattcacttctcttcaggaggtttggcttggcatgaaaatacttcattcagagtatgggcaaatgcttctggaaaacccttccctgaagagagagaacgtgtgtgtgtgtgtcggtgatcacaccctcccatccttcctgcctcctgccccaaaccccgggttcctgggtctggaagggccttctctccaagctgggagctcctgggcccccaccattcactttttgtccttgctgctggcaaacagtaaagaaactcactttccctgtggcacgttatgcttcagaattaaaacaatgaagattaaaattt

SEQ ID NO: 633913 - DNA, 985 bp, Homo sapiens
  misc_feature (529)..(529): n is a, c, g, or t
  misc_feature (532)..(532): n is a, c, g, or t
  misc_feature (537)..(537): n is a, c, g, or t
  misc_feature (539)..(539): n is a, c, g, or t
  misc_feature (565)..(565): n is a, c, g, or t
ctaggagactcacaagttcccaccccttttcctttgggccttcttccccccaggtattacacagccggatttcccataatccctccggggatttcttccagcgttctcgggccttaccttagcgggttttagcatttccatcgaagggtttttcgatggagagggattcttcttcatacatccaccgaccttccttcttctgttgtgttcctcggttttctttgtggggtcgttggtcatttccttcaaagggctcttcacttgcttctctttggtattccttcgtctctacttactctctcattttttgttatgctcatcctggggtaggtcctagtaactcgggcctgctagagcctgaagtgtggtgttggctcttagttcttctttaagattaggtatattggtctcgtttgcattcttttttgggtttagttgttctttttggttttttttttctgcttattgttttctttgttgtgctggttgttgtttgttttgtttttttgttgttttgttttttggttgnccnttggngntgggggaggagttgccccctaggcanccagcaggtaggaggcgacgtagcgcatcgcggcggcgtctgcggcggaggcggcggagaagtctcacgcgtgcgacctcggtggcgacagggaggaaaagaagatcttggacagcgtgggtatcgaggcggacgacgaccggctcaacaaggttatcagtgagctgaatggaaaaaacattgaagacgtcattgcccagggtattggcaagcttgccagtgtacctgctggtgggggggaaggtgtgtggggtggcccagggtggccagcacccgtggccggttctggccctggtgcagtacatcataaggaacatgaggtgaagggggagtgtggacaggcccatgacctctcggcagtcagccgcatgttggtagggaggaggtgccctgcttgtaaatccttttttctcctctgga

SEQ ID NO: 633914 - DNA, 2969 bp, Homo sapiens
  misc_feature (2142)..(2142): n is a, c, g, or t
ggcacgaggccaccactgctgcctgtaagggctgttttggatacagaaaatgtgccctttctaacccaaaaaatgcttgaaatgtgtaaaagtggccagactaacagtcccaaagagggctgccctctaagaggaagcgtcccaaatctgttcagttttagagactacgtgactggggtacgtggtggggccttaccagacatccacgaggagaatccaggccttggtttggctccagctgggcctgcctggtggctgccacttattgacttaagtcccagtgattcagctcctcatctggaacacctcgggtcacccccgacaacggtggtgggagggagagcggcctcctcctccctggtggggcctgtctgggtgaagcccctctgttcccggtaggtgtctcggggtctcatggctccaaggacattggaagatgcctctgttttcctggagtcaggggcccagttcatgcaggggttttcacagaactttgctaacttccggggaaaagatgtgactcccaacccccagccgggtgctccgagccatggccgacaccatcttcggcagcgggaatgatcagtgggtttgccccaatgaccggcagcttgcccttcgagccaagctgcagacgggctggtccgtgcacacctaccagacggagaagcagaggaggaagcagcacctcagcccggcggaggtggaggccatcctgcaggtcatccagagggcagagcggctcgacgtcctggagcagcagagaatcgggcggctggtggagcggctggagaccatgaggcggaatgtgatggggaacggcctgtcccagtgtctgctctgcggggaggtgctgggcttcctgggcagctcgtcggtgttctgcaaagactgcaggaagaaagtctgcaccaaatgtgggatcgaggcctcccctggccagaagcggcccctgtggctgtgtaagatctgcagtgagcaaagagaggtctggaagaggtcgggggcctggttctacaaagggctccccaagtatatcttgcccctgaagacccctggccgagctgatgacccccacttccgacctttgcccacggaaccggcagagcgagagcccagaagctctgagaccagccgcatctacacgtgggcccgaggaagagtcgtaggaagaaagtgctgatccacgctgcagcctggatgagccttgaaaacaccatgcgaagtggaagaagccggagacgaaaggccgcgtgtgtgtgatctcatctatatgagcagtggtttccagtgacagtgacagtgactcggatcttagctcctccagcctagaggacagactcccatccactggggtcagggaccggaaaggcgacaaaccctggaaggagtcaggtggcagcgtggaggcccccaggatggggttcacccacccgccgggccacctctctgggtgccagagcagcctggccagtggtgagacggggacaggctctgctgacccgccagggggaccccgccccgggctgacccgaagggccccggtaaaagacacacctggacgagcccccgctgctgacgcagctccagcaggcccctccagctgcctgggctgaggtgtctggtgcctggaacagacttccctgtggaggattcctgccagaccctgcccggctcctccctgaccggtccttgtgccctcaccagacaccctgttggccatgactcaacaaaccagtgttgggagccgtctgcctccccagctcagtgcctttctgcaccccttctctcctggggagctgtctgcatccgccaccccctccaaccactgccctcagcccccgaccttatttattaccctcccctcccacacccccaatctacctggtgatgattttaagtttgcgcgtgtcttgggttgggctggggggtttcccacatgcagtgtcagaggggccgcccggtggggctatctccgttgctatattaatggcaagactaaatgaaacctagggcacggcctccgaagctgcgtgtggccccttagaggtgagcatcagagccagagcagtgagggggagactcacccaccctctccctctcccttcagctctgggaggcaggcgcagtgcccccctcccntgggctggcccaggaccgcgggtgaaacctgggtctgtttagtttctttggtttttgtatgtttgtttgtttttgacacagtctcgctttgttgcccaggctggggtgcagtggcacgatcgcggctcactgcaacctccacctcccgggctcaagcgattctctcacctcagcctcctgagtaggtgggattacagatgcccgccaccacacccagttaatttttgtatttttagaagagatggggtttctccatgttggccaggctggtcttgaactcctggtctcaagtgatccgcccgcctcggcctcccaaagtgctgggattacaggtgtgagccaccgcacccaatcctattaggtttctttgaatcccctcatggcctgcctggtttttgctcagcctgtcttcagcttgaggagctgggaagctctggtggatgctatgaactcacttgctgaagagcagcgttcaggtgcatccccagccagggcacgtggctccctcagccatgaattcacttctcttcaggaggtttggcttggcatgaaaatacttcattcagagtatgggcaaatgcttctggaaaacccttccctgaagagagagaacgtgtgtgtgtgtgtcggtgatcacaccctcccatccttcctgcctcctgccccaaaccccgggttcctgggtctggaagggccttctctccaagctgggagctcctgggcccccaccattcactttttgtccttgctgctggcaaacagtaaagaaactcactttccctgtggcacgttatgcttcagaattaaaacaatgaagattaaaattt

SEQ ID NO: 633915 - DNA, 595 bp, Homo sapiens
ggggaacaaaaaaaaaaaaaaaaaaaaaaaaaaacatttgttcggcgcgcgcgcctcggggccctctggaaaaacgctttctctaaacaccattcgcggtgtgggggcgggggccccaagtgatgggtaaggtgagaaacggtggctcaaatgcgtgtgttcccataggagagaactcggggctcagagacactaagggctgtgggttttcttcaccaaattaaaaaagcccggggggaaaacgggagggttttgggcaaaaattcccagaagggggagttccgggggggatcaataggggggaacttatattcaaaggggggatcccaagggagaaaccgggaaaatattaaatttaggcccccggccggggggtgaaaaaacagggaatggagaagagaagaaaaaagagagaaggagggaaagaaacaaaagacgagcaaggacagaaaaagaaagaacaacagaaagagaaacgaaggagaagggagggggagagaagacgagagaaagcggaagacacaccgacagagaaaaacaaggagacgcaagacacagaaagaagaaagacaaaaagagagaaaaaaataagaac

SEQ ID NO: 633916 - DNA, 522 bp, Homo sapiens
  misc_feature (1)..(1): n is a, c, g, or t
  misc_feature (7)..(7): n is a, c, g, or t
  misc_feature (13)..(13): n is a, c, g, or t
  misc_feature (21)..(21): n is a, c, g, or t
  misc_feature (37)..(37): n is a, c, g, or t
  misc_feature (43)..(43): n is a, c, g, or t
  misc_feature (451)..(451): n is a, c, g, or t
  misc_feature (460)..(460): n is a, c, g, or t
  misc_feature (472)..(472): n is a, c, g, or t
  misc_feature (475)..(475): n is a, c, g, or t
nccctgncgctgnacggaatngggcacgaggtaaatntggccncggggcctgtacccatatccccagcaggtctcctcccccagcgccaaggacatcaagaagatcttggacagcgtgggtatcgaggcggacgacgaccggctcaacaaggttatcagtgagctgaatggaaaaaacattgaagacgtcattgcccagggtattggcaagcttgccagtgtacctgctggtggggctgtagccgtctctgctgccccaggctctgcagcccctgctgctggttctgcccctgctgcagcagaggagaagaaagatgagaagaaggaggagtctgaagagtcagatgatgacatgggatttggcctttttgattaaattcctgctcccctgcaaataaagcctttttacacatcaaaaaaaaaaaaaaaaaaaaaaaaaaaaaaaaaactngaggggggncccggtacccanttnggcctatagtgagtcgtattcaatttacttgccgtcgtttttcaacg

SEQ ID NO: 633917 - DNA, 2918 bp, Homo sapiens
  misc_feature (2091)..(2091): n is a, c, g, or t
ggcacgaggccaccactgctgcctgtaagggctgttttggatacagaaaatgtgccctttctaacccaaaaaatgcttgaaatgtgtaaaagtggccagactaacagtcccaaagagggctgccctctaagaggaagcgtcccaaatctgttcagttttagagactacgtgactggggtacgtggtggggccttaccagacatccacgaggagaatccaggccttggtttggctccagctgggcctgcctggtggctgccacttattgacttaagtcccagtgattcagctcctcatctggaacacctcgggtcacccccgacaacggtggtgggagggagagcggcctcctcctccctggtggggcctgtctgggtgaagcccctctgttcccgagatgtgactcccaacccccagccgggtgctccgagccatggccgacaccatcttcggcagcgggaatgatcagtgggtttgccccaatgaccggcagcttgcccttcgagccaagcactgactgcacagcagtgaacaggaccaacacagtccctggtcttaaagcacaggtgggcagaggctgcagacgggctggtccgtgcacacctaccagacggagaagcagaggaggaagcagcacctcagcccggcggaggtggaggccatcctgcaggtcatccagagggcagagcggctcgacgtcctggagcagcagagaatcgggcggctggtggagcggctggagaccatgaggcggaatgtgatggggaacggcctgtcccagtgtctgctctgcggggaggtgctgggcttcctgggcagctcgtcggtgttctgcaaagactgcaggaagaaagtctgcaccaaatgtgggatcgaggcctcccctggccagaagcggcccctgtggctgtgtaagatctgcagtgagcaaagagaggtctggaagaggtcgggggcctggttctacaaagggctccccaagtatatcttgcccctgaagacccctggccgagctgatgacccccacttccgacctttgcccacggaaccggcagagcgagagcccagaagctctgagaccagccgcatctacacgtgggcccgaggaagagtcgtaggaagaaagtgctgatccacgctgcagcctggatgagccttgaaaacaccatgcgaagtggaagaagccggagacgaaaggccgcgtgtgtgtgatctcatctatatgagcagtggtttccagtgacagtgacagtgactcggatcttagctcctccagcctagaggacagactcccatccactggggtcagggaccggaaaggcgacaaaccctggaaggagtcaggtggcagcgtggaggcccccaggatggggttcacccacccgccgggccacctctctgggtgccagagcagcctggccagtggtgagacggggacaggctctgctgacccgccagggggaccccgccccgggctgacccgaagggccccggtaaaagacacacctggacgagcccccgctgctgacgcagctccagcaggcccctccagctgcctgggctgaggtgtctggtgcctggaacagacttccctgtggaggattcctgccagaccctgcccggctcctccctgaccggtccttgtgccctcaccagacaccctgttggccatgactcaacaaaccagtgttgggagccgtctgcctccccagctcagtgcctttctgcaccccttctctcctggggagctgtctgcatccgccaccccctccaaccactgccctcagcccccgaccttatttattaccctcccctcccacacccccaatctacctggtgatgattttaagtttgcgcgtgtcttgggttgggctggggggtttcccacatgcagtgtcagaggggccgcccggtggggctatctccgttgctatattaatggcaagactaaatgaaacctagggcacggcctccgaagctgcgtgtggccccttagaggtgagcatcagagccagagcagtgagggggagactcacccaccctctccctctcccttcagctctgggaggcaggcgcagtgcccccctcccntgggctggcccaggaccgcgggtgaaacctgggtctgtttagtttctttggtttttgtatgtttgtttgtttttgacacagtctcgctttgttgcccaggctggggtgcagtggcacgatcgcggctcactgcaacctccacctcccgggctcaagcgattctctcacctcagcctcctgagtaggtgggattacagatgcccgccaccacacccagttaatttttgtatttttagaagagatggggtttctccatgttggccaggctggtcttgaactcctggtctcaagtgatccgcccgcctcggcctcccaaagtgctgggattacaggtgtgagccaccgcacccaatcctattaggtttctttgaatcccctcatggcctgcctggtttttgctcagcctgtcttcagcttgaggagctgggaagctctggtggatgctatgaactcacttgctgaagagcagcgttcaggtgcatccccagccagggcacgtggctccctcagccatgaattcacttctcttcaggaggtttggcttggcatgaaaatacttcattcagagtatgggcaaatgcttctggaaaacccttccctgaagagagagaacgtgtgtgtgtgtgtcggtgatcacaccctcccatccttcctgcctcctgccccaaaccccgggttcctgggtctggaagggccttctctccaagctgggagctcctgggcccccaccattcactttttgtccttgctgctggcaaacagtaaagaaactcactttccctgtggcacgttatgcttcagaattaaaacaatgaagattaaaattt

SEQ ID NO: 633918 - DNA, 743 bp, Homo sapiens
tacatgatacgactcgagctgagtaccctcgataagggggcaagccatgaacacagcgttgtggccagagatgtggatactggggcagcacactcattccctacctagttaggaacatgtctgtccagtggacctctgagggtggaggtggggaaattgggcaggcaggcagtgtgggcctaattcctagaaggcaagtccctggataggaaaggtggggaagagaagtccccgttgaggagtggctcagggagggagtgttcaggaagaacgggagacactggcatatggtgggtccagatatgttgggtgccatgtgccatctctggtgccatctaacttccctgtggaacagcctcccaggctgggcagctgctctggtctcacctctctgctttctgtaggtattggcaagcttgccagtgtacctgctggtggggctgtagccgtctctgctgccccaggctctgcagcccctgctgctggttctgcccctgctgcaggtaagctggtggcctggtgagtgggcaaggggctggggctcagacggtgttaaaacagtggggtcttcatggggggactggcctggcacttgggcagtgctcaccatgcctctcctctgttccacagcagaggagaagaaagatgagaagaaggaggagtctgaagagtcagatgatgacatgggatttggcctttttgattaaattcctgctcccctgcaaataaagcctttttacaca

SEQ ID NO: 633919 - DNA, 3119 bp, Homo sapiens
  misc_feature (2025)..(2025): n is a, c, g, or t
  misc_feature (2929)..(2929): n is a, c, g, or t
  misc_feature (3010)..(3010): n is a, c, g, or t
  misc_feature (3012)..(3012): n is a, c, g, or t
  misc_feature (3081)..(3081): n is a, c, g, or t
  misc_feature (3093)..(3093): n is a, c, g, or t
  misc_feature (3101)..(3101): n is a, c, g, or t
  misc_feature (3119)..(3119): n is a, c, g, or t
ggcacgaggccaccactgctgcctgtaagggctgttttggatacagaaaatgtgccctttctaacccaaaaaatgcttgaaatgtgtaaaagtggccagactaacagtcccaaagagggctgccctctaagaggaagcgtcccaaatctgttcagttttagagactacgtgactggggtacgtggtggggccttaccagacatccacgaggagaatccaggccttggtttggctccagctgggcctgcctggtggctgccacttattgacttaagtcccagtgattcagctcctcatctggaacacctcgggtcacccccgacaacggtggtgggagggagagcggcctcctcctccctggtggggcctgtctgggtgaagcccctctgttcccgagatgtgactcccaacccccagccgggtgctccgagccatggccgacaccatcttcggcagcgggaatgatcagtgggtttgccccaatgaccggcagcttgcccttcgagccaagctgcagacgggctggtccgtgcacacctaccagacggagaagcagaggaggaagcagcacctcagcccggcggaggtggaggccatcctgcaggtcatccagagggcagagcggctcgacgtcctggagcagcagagaatcgggcggctggtggagcggctggagaccatgaggcggaatgtgatggggaacggcctgtcccagtgtctgctctgcggggaggtgctgggcttcctgggcagctcgtcggtgttctgcaaagactgcaggaagaaagtctgcaccaaatgtgggatcgaggcctcccctggccagaagcggcccctgtggctgtgtaagatctgcagtgagcaaagagaggtctggaagaggtcgggggcctggttctacaaagggctccccaagtatatcttgcccctgaagacccctggccgagctgatgacccccacttccgacctttgcccacggaaccggcagagcgagagcccagaagctctgagaccagccgcatctacacgtgggcccgaggaagagtcgtaggaagaaagtgctgatccacgctgcagcctggatgagccttgaaaacaccatgcgaagtggaagaagccggagacgaaaggccgcgtgtgtgtgatctcatctatatgagcagtggtttccagtgacagtgacagtgactcggatcttagctcctccagcctagaggacagactcccatccactggggtcagggaccggaaaggcgacaaaccctggaaggagtcaggtggcagcgtggaggcccccaggatggggttcacccacccgccgggccacctctctgggtgccagagcagcctggccagtggtgagacggggacaggctctgctgacccgccagggggaccccgccccgggctgacccgaagggccccggtaaaagacacacctggacgagcccccgctgctgacgcagctccagcaggcccctccagctgcctgggctgaggtgtctggtgcctggaacagacttccctgtggaggattcctgccagaccctgcccggctcctccctgaccggtccttgtgccctcaccagacaccctgttggccatgactcaacaaaccagtgttgggagccgtctgcctccccagctcagtgcctttctgcaccccttctctcctggggagctgtctgcatccgccaccccctccaaccactgccctcagcccccgaccttatttattaccctcccctcccacacccccaatctacctggtgatgattttaagtttgcgcgtgtcttgggttgggctggggggtttcccacatgcagtgtcagaggggccgcccggtggggctatctccgttgctatattaatggcaagactaaatgaaacctagggcacggcctccgaagctgcgtgtggccccttagaggtgagcatcagagccagagcagtgagggggagactcacccaccctctccctctcccttcagctctgggaggcaggcgcagtgcccccctcccntgggctggcccaggaccgcgggtgaaacctgggtctgtttagtttctttggtttttgtatgtttgtttgtttttgacacagtctcgctttgttgcccaggctggggtgcagtggcacgatcgcggctcactgcaacctccacctcccgggctcaagcgattctctcacctcagcctcctgagtaggtgggattacagatgcccgccaccacacccagttaatttttgtatttttagaagagatggggtttctccatgttggccaggctggtcttgaactcctggtctcaagtgatccgcccgcctcggcctcccaaagtgctgggattacaggtgtgagccaccgcacccaatcctattaggtttctttgaatcccctcatggcctgcctggtttttgctcagcctgtcttcagcttgaggagctgggaagctctggtggatgctatgaactcacttgctgaagagcagcgttcaggtgcatccccagccagggcacgtggctccctcagccatgaattcacttctcttcaggaggtttggcttggcatgaaaatacttcattcagagtatgggcaaatgcttctggaaaacccttccctgaagagagagaacgtgtgtgtgtgtgtcggtgatcacaccctcccatccttcctgcctcctgccccaaaccccgggttcctgggtctggaagggccttctctccaagctgggagctcctgggcccccaccattcactttttgtccttgctgctggcaaacagtaaagaaactcactttccctgtggcacgttatgcttcagaattaaaacaatgaagattaaaatttgcaccgagccagtgtgttgatcgaagaccacgattgcctgtgtttctgagatgcgtccatggaaaaatggaaaaaantgtggtgcgttgacttgctggaacccttcctaagccgcagtgaaaggaggggctagatctgtgtgtgttcatgcagctcananacctgatgctgaacggataagcaaggccatctacatacaaaagtacacacaaattaattcagaattgangttcttgcaaanacattacngtatgtatgcaaaaatcn

SEQ ID NO: 633920 - DNA, 109 bp, Homo sapiens
ttttttatagtgcttggcattttacgggtaacatattaccaaaaagctttatctgcgtagctttattctatgtacaatgcagtagaggatggcatgctaacaggtacag

SEQ ID NO: 633921 - DNA, 1793 bp, Homo sapiens
  misc_feature (708)..(708): n is a, c, g, or t
ccaacctgttccctcccaggacccgagaatgtagcggggtccctgaggtgctgatgtccacatggacaccgaggtcagttccgggccaaagcggccagcgcaggggctgaccactcagacctcactcctcgcaggggtgagcgggcgacgctgcctcacgtcattgtcctgccctccaaggcccgcgctcgtcctctgacaggatgccctgacaccgcagtgcgggggcggcctcccagatagggccgcagtcgctaagtccgaggcggctggctcacctcactgagcccggctggacgtgggaccaccggtcgccgcggccagggaaccaccaaggagtcaaggcgagcctaccgccagcagcttctgcccgggcccacgcgccgttccgggtaggcccgcggcgcaggccacttccggcagcggtgcaccatgggacttgcagttcgctggcaaaggttgagtcccgggcgtggcggccgcgctccatgttgggagctgtaggcgccgcgtggcatgctgggggtgctaggtaccgaaggcagatgccgtccctttggactcgcttcgtccaacgcccccacgagtttcggtggcccttcgccccacgctataagagcagtcacttccggaactgctgcccttcgcctttgccgcgaaaagtgcctgacgggggctgggaagggggagggggaaggagtcaacgantccctccccgtcgtcattggctgagcgcctcgtgacgtcactctgaggcgcctcatgcggcgccgcgcacgggtcccagagccttctgggtagcggtttaaccccgcctcttgcgtcggcgccttccttttcctccctgtcgccaccgaggtcgcacgcgtgagacttctccgccgcctccgccgcagacgccgccgcgatgcgctacgtcgcctcctacctgctggctgccctagggggcaactcctcccccagcgccaaggacatcaagaagatcttggacagcgtgggtatcgaggcggacgacgaccggctcaacaaggttatcagtgagctgaatggaaaaaacattgaagacgtcattgcccagggtattggcaagcttgccagtgtacctgctggtggggctgtagccgtctctgctgccccaggctctgcagcccctgctgctggttctgcccctgctgcagcagaggagaagaaagatgagaagaaggaggagtctgaagagtcagatgatgacatgggatttggcctttttgattaaattcctgctcccctgcaaataaagcctttttacacatctaaaaaaaaaaaaaaaaaaaaaaaaaaaaaaaaaaaaaaaaaaaaaaaaaaaaaatcaaaaaaaaaaaaaaaaaaaaaaaaaaaaaaaaaaaggggggggggccgcggcaaaaaaaaaagggggggggggggggggggggggggggcccccccactatttctaggagaattgaagcacagacggcgagtattttgtggggatacatgccattctggagagcgagaaatcgtgctccgaaacagtacgtatttgtgtggagaaggagacgaccttctcatcacacagaggagagaggtgggcggaggtgtgtaaaagcacgacgggaggtaggttggggacggcaggaaaaattgtttgtcatgggggggagcccgaggagggggggtgcaagattacatctacggcggggggagcgagggagttgttcttcaacaaatttgtgggggaaaaccagacgtgggttttgcgtgagaatgtgacctctaagaaagaggggcgc

SEQ ID NO: 633922 - DNA, 1642 bp, Homo sapiens
  misc_feature (29)..(29): n is a, c, g, or t
  misc_feature (55)..(58): n is a, c, g, or t
  misc_feature (815)..(815): n is a, c, g, or t
ggggaactggactgagatcaccccgtctnggtttgagatccacggggcccaaacnnnntttcccacaggtggcagcgtggaggcccccaggatggggttcacccacccgccgggccacctctctgggtgccagagcagcctggccagtggtgagacggggacaggctctgctgacccgccagggggaccccgccccgggctgacccgaagggccccggtaaaagacacacctggacgagcccccgctgctgacgcagctccagcaggcccctccagctgcctgggctgaggtgtctggtgcctggaacagacttccctgtggaggattcctgccagaccctgcccggctcctccctgaccggtccttgtgccctcaccagacaccctgttggccatgactcaacaaaccagtgttgggagccgtctgcctccccagctcagtgcctttctgcaccccttctctcctggggagctgtctgcatccgccaccccctccaaccactgccctcagcccccgaccttatttattaccctcccctcccacacccccaatctacctggtgatgattttaagtttgcgcgtgtcttgggttgggctggggggtttcccacatgcagtgtcagaggggccgcccggtggggctatctccgttgctatattaatggcaagactaaatgaaacctagggcacggcctccgaagctgcgtgtggccccttagaggtgagcatcagagccagagcagtgagggggagactcacccaccctctccctctcccttcagctctgggaggcaggcgcagtgcccccctcccntgggctggcccaggaccgcgggtgaaacctgggtctgtttagtttctttggtttttgtatgtttgtttgtttttgacacagtctcgctttgttgcccaggctggggtgcagtggcacgatcgcggctcactgcaacctccacctcccgggctcaagcgattctctcacctcagcctcctgagtaggtgggattacagatgcccgccaccacacccagttaatttttgtatttttagaagagatggggtttctccatgttggccaggctggtcttgaactcctggtctcaagtgatccgcccgcctcggcctcccaaagtgctgggattacaggtgtgagccaccgcacccaatcctattaggtttctttgaatcccctcatggcctgcctggtttttgctcagcctgtcttcagcttgaggagctgggaagctctggtggatgctatgaactcacttgctgaagagcagcgttcaggtgcatccccagccagggcacgtggctccctcagccatgaattcacttctcttcaggaggtttggcttggcatgaaaatacttcattcagagtatgggcaaatgcttctggaaaacccttccctgaagagagagaacgtgtgtgtgtgtgtcggtgatcacaccctcccatccttcctgcctcctgccccaaaccccgggttcctgggtctggaagggccttctctccaagctgggagctcctgggcccccaccattcactttttgtccttgctgctggcaaacagtaaagaaactcactttccctgtggcacgttatgcttcagaattaaaacaatgaagattaaaattt

SEQ ID NO: 633923 - DNA, 343 bp, Homo sapiens
  misc_feature (1)..(1): n is a, c, g, or t
natccaatctgttcacctcaatacatggaaaaactatatttgaccaaaaacaataattatggagtattagaaattgatatgaacttttttttcccccccgagacagagtctcgctgtgtcgcctaggctggagtacaatggcagtgatctcggctcactgcaacttccgcctcccaggttcaacaattctccctgcctcagcctcccgagtatctaagatttcagtcaactgccaccatgcccggctaatttttgtatttttttttcagtagagacagggttttgccacgttggccaggctggtcttgaactcctaagaaagggcatgagattgcggtgtttg

SEQ ID NO: 633924 - DNA, 1640 bp, Homo sapiens
  misc_feature (708)..(708): n is a, c, g, or t
ccaacctgttccctcccaggacccgagaatgtagcggggtccctgaggtgctgatgtccacatggacaccgaggtcagttccgggccaaagcggccagcgcaggggctgaccactcagacctcactcctcgcaggggtgagcgggcgacgctgcctcacgtcattgtcctgccctccaaggcccgcgctcgtcctctgacaggatgccctgacaccgcagtgcgggggcggcctcccagatagggccgcagtcgctaagtccgaggcggctggctcacctcactgagcccggctggacgtgggaccaccggtcgccgcggccagggaaccaccaaggagtcaaggcgagcctaccgccagcagcttctgcccgggcccacgcgccgttccgggtaggcccgcggcgcaggccacttccggcagcggtgcaccatgggacttgcagttcgctggcaaaggttgagtcccgggcgtggcggccgcgctccatgttgggagctgtaggcgccgcgtggcatgctgggggtgctaggtaccgaaggcagatgccgtccctttggactcgcttcgtccaacgcccccacgagtttcggtggcccttcgccccacgctataagagcagtcacttccggaactgctgcccttcgcctttgccgcgaaaagtgcctgacgggggctgggaagggggagggggaaggagtcaacgantccctccccgtcgtcattggctgagcgcctcgtgacgtcactctgaggcgcctcatgcggcgccgcgcacgggtcccagagccttctgggtagcggtttaaccccgcctcttgcgtcggcgccttccttttcctccctgtcgccaccgaggtcgcacgcgtgagacttctccgccgcctccgccgcagacgccgccgcgatgcgctacgtcgcctcctacctgctggctgccctagggggcaactcctcccccagcgccaaggacatcaagaagatcttggacagcgtgggtatcgaggcggacgacgaccggctcaacaaggttatcagtgagctgaatggaaaaaacattgaagacgtcattgcccagggtattggcaagcttgccagtgtacctgctggtggggctgtagccgtctctgctgccccaggctctgcagcccctgctgctggttctgcccctgctgcagcagaggagaagaaagatgagaagaaggaggagtctgaagagtcagatgatgacatgggatttggcctttttgattaaattcctgctcccctgcaaataaagcctttttacacatctaaaaaaaaaaaaaaaaaaaaaaaaaaaaaaaaaaaaaaaaggggggggcggcaaaaaaaaccccgggggggcccagtgcgggacccacccatttttttggtacaggggggcccccatatagggggggccgcatataaaaaaacaaaagagaacgggcgggggttaaaaccaagcctcgggcgtgggggacacgtggccctggggacactctgggaagagaaccctatctctggggggggcaccatgcggaaccaccccacagagaattaccgcccaggggaaataaatcacgcggtatggggcaacaacgaatatgcgcggctgaaatggcagggtgttaacattc

SEQ ID NO: 633925 - DNA, 2647 bp, Homo sapiens
  misc_feature (1820)..(1820): n is a, c, g, or t
ggcacgaggccaccactgctgcctgtaagggctgttttggatacagaaaatgtgccctttctaacccaaaaaatgcttgaaatgtgtaaaagtggccagactaacagtcccaaagagggctgccctctaagaggaagcgtcccaaatctgttcagttttagagactacgtgactggggtacgtggtggggccttaccagacatccacgaggagaatccaggccttggtttggctccagctgggcctgcctggtggctgccacttattgacttaagtcccagtgattcagctcctcatctggaacacctcgggtcacccccgacaacggtggtgggagggagagcggcctcctcctccctggtggggcctgtctgggtgaagcccctctgttcccgagatgtgactcccaacccccagccgggtgctccgagccatggccgacaccatcttcggcagcgggaatgatcagtgggtttgccccaatgaccggcagcttgcccttcgagccaagctgcagacgggctggtccgtgcacacctaccagacggagaagcagaggaggaagcagcacctcagcccggcggaggtggaggccatcctgcaggtcatccagagggcagagcggctcgacgtcctggagcagcagagaatcgggcggctggtggagcggctggagaccatgaggcggaatgtgatggggaacggcctgtcccagtgtctgctctgcggggaggtgctgggcttcctgggcagctcgtcggtgttctgcaaagactgcaggaaggtctggaagaggtcgggggcctggttctacaaagggctccccaagtatatcttgcccctgaagacccctggccgagctgatgacccccacttccgacctttgcccacggaaccggcagagcgagagcccagaagctctgagaccagccgcatctacacgtgggcccgaggaagagtggtttccagtgacagtgacagtgactcggatcttagctcctccagcctagaggacagactcccatccactggggtcagggaccggaaaggcgacaaaccctggaaggagtcaggtggcagcgtggaggcccccaggatggggttcacccacccgccgggccacctctctgggtgccagagcagcctggccagtggtgagacggggacaggctctgctgacccgccagggggaccccgccccgggctgacccgaagggccccggtaaaagacacacctggacgagcccccgctgctgacgcagctccagcaggcccctccagctgcctgggctgaggtgtctggtgcctggaacagacttccctgtggaggattcctgccagaccctgcccggctcctccctgaccggtccttgtgccctcaccagacaccctgttggccatgactcaacaaaccagtgttgggagccgtctgcctccccagctcagtgcctttctgcaccccttctctcctggggagctgtctgcatccgccaccccctccaaccactgccctcagcccccgaccttatttattaccctcccctcccacacccccaatctacctggtgatgattttaagtttgcgcgtgtcttgggttgggctggggggtttcccacatgcagtgtcagaggggccgcccggtggggctatctccgttgctatattaatggcaagactaaatgaaacctagggcacggcctccgaagctgcgtgtggccccttagaggtgagcatcagagccagagcagtgagggggagactcacccaccctctccctctcccttcagctctgggaggcaggcgcagtgcccccctcccntgggctggcccaggaccgcgggtgaaacctgggtctgtttagtttctttggtttttgtatgtttgtttgtttttgacacagtctcgctttgttgcccaggctggggtgcagtggcacgatcgcggctcactgcaacctccacctcccgggctcaagcgattctctcacctcagcctcctgagtaggtgggattacagatgcccgccaccacacccagttaatttttgtatttttagaagagatggggtttctccatgttggccaggctggtcttgaactcctggtctcaagtgatccgcccgcctcggcctcccaaagtgctgggattacaggtgtgagccaccgcacccaatcctattaggtttctttgaatcccctcatggcctgcctggtttttgctcagcctgtcttcagcttgaggagctgggaagctctggtggatgctatgaactcacttgctgaagagcagcgttcaggtgcatccccagccagggcacgtggctccctcagccatgaattcacttctcttcaggaggtttggcttggcatgaaaatacttcattcagagtatgggcaaatgcttctggaaaacccttccctgaagagagagaacgtgtgtgtgtgtgtcggtgatcacaccctcccatccttcctgcctcctgccccaaaccccgggttcctgggtctggaagggccttctctccaagctgggagctcctgggcccccaccattcactttttgtccttgctgctggcaaacagtaaagaaactcactttccctgtggcacgttatgcttcagaattaaaacaatgaagattaaaattt

SEQ ID NO: 633926 - DNA, 1309 bp, Homo sapiens
gattctacacaagtggtgtttgccgtcagaacacaggtgtcgtgacaagactaccgcctagaaagccaaaatgggatcggcaaagatctcatatcaagcattcgtcgtgcattggacacgtagattcgggtcgaagtcgcaccaatactggaccatctgatgctatacaatgcccgtggtcgtacgagcaatagagaagccatttgaaaagatcttgagaagtgaggctagctagatgtatgcgcgcacaaggtgcgctctatttcaaggtgatagccgtggcgatctatggaataaaagttggatagagtcttgaagcagtcgcaaaccgtagcgtcagttcacccatttgactatcatcccttgatcgtgaacatgtatggacgaccaagcaaggtactaatgttgacttatgcatctcgatgtcgcccagtgagcacagtagtaacatattattccacaaaatgatgcatctaagctggtgaccatctccaggggctgaatttggttgcttgtcccctgatgttgttcgcatggcggggaagctggggttgaaggtacggaaagcctgggataatcgtcccaaacgaaatttgcggcaagaaacccctgacgcaagtcattggagcacctttaattgtgactaaacctctgctggagggtggttgcaaaccgcgagttagacttagaaccgggatggattggaaccaaaagctggaattttcccaactaggatgctcaggccctaaacactgggccaggacacgacgagtactgacgcaagacacgcggtctcaacggaaacgttcagcccactttgtacctttttccgcgaaatttgggggcaaatggaacacccgtaaccaacaagaagaccggttagatgccaagaaaatctgggagtggggacctggtgcaccagcactgcttggagacactaaggagtgacaaccgggtgcccatgagggtcacaggggactgctgcaaaccgtgcgcccccgtacagtggactgtgccacggtgtgccaagatgtggatggtcgcaccgtcatgtattttgaaagggtatctggtgacaatgtgaagtgcctataagaagaggagttggtgatgacactggtaaaaagcgccacttgtgtgcgcatgtgattatgacaaggacatgtttgttaacacaaagatgggggtggggaaatgggtaaagggccaaatttttggtaccagttggaagaaagggggtgatcagtaaaacgcgtggtatttgatgtgtgaacatagagggatgctggagttgatggaataagaagtt

SEQ ID NO: 633927 - DNA, 222 bp, Homo sapiens
gcggccgcctactactactactactgctcgaattcaagcttctaacgatgtacggggacatggtgaaaccctatctctactaaaaatacaaaaattagcctgtagtcccagctactccagaggctaaggagggaggatcgcttgaacccgggagggagaggttgcagtgaaccgagatcacaccgctgcactccagcctgggcgagactccgtcccaaaaaa

SEQ ID NO: 633928 - DNA, 1013 bp, Homo sapiens
gaccgccagacaggagttataggtaatatatagtatatatatagtagtatatccttgttatttatagctatgtaattagggaattcagctttactggtaacttccttatttagtatatttagtaggtcaactctaataaaatgaaactagggctgagctaagttagccctcactagccaaactgaaactctatgcaacattaaacagaagagatccatcatgtagcttgtgacacttttattttattagtcaccgggaaaacttttcagtgatgaaaatacacagggtacataaaccttcacatggcttcaaaaaggaaaaccaagcaaatcttctctaatctactcttactataatttcctaagtgtacaccagaactctggatttaaaaatctgaagtactatacgaacattaccgttgacagaattggaaattacagagtacgtattcatggttaagtctttcttatgctatggagttcgtgaacacatctaggtggacatgcatctgagagtaagggctggattgtaatccttcataagaaaccagccttgaagagttaagcaatactctacgattggtattctagacttcctaggatattcaggctacctgtacattacaagctgttaacagcctaaatttacaggactatatagaattcctatccatctcactttcacctacgactcgtctgaccctctgccatattgacaacacgtaccctgcaagaaatatacacagcccaacctatagttacactatactcctctaaaccggtgaaggactggaacaagattcaagaaatacggaaatatcacccggacaggtttaacagggaagaaatggacatgaatagggtataacagacccacttgggtgtacatactagagacactgacaacaagacaacaaacatggggcaaatgagcatttacctatactggggaactcagaaatgaataaggggaagagtacgcacaacaaacaaagagctagacgaatctacggg

SEQ ID NO: 633929 - DNA, 1025 bp, Homo sapiens
ggtcgttcaccgggaatcggtattctaaatgggtcgacacatcgtaaccactctccatggtgaggtatagttgcgcgtaccctggatatacattccctgaggtagtagactaaagcagacctccgagtatcggtcgaggcatctcgggagaactcaccgaaccactgagcgctcagctgatctcttgagccagaatatggttgcctgttgcccataagtagtctttatgactcgcactgtgatccttcccgcttgttcggctctgcctaacaggatctaggatgcgcgcaacgaatgatggcaatacggacatacatagagtcaaaacgaaggggcatacttcacttgggggaagcactttacattacgggccacaacacagatgttatgaacctagccactgatggatggttactggggaatgggcctcctttgtgtgctcctacacacagggtaagccaggcaggcctttggctattgatgaatttgctctttcgcttataatatgttctctcagaaaagagggacaagttacccgtaatgtacatgagccgcaaaaagcggttggatttcagcaggacccttaggatcccatttgcttgataattgcaaggtgtgagcaccggatgactctattccccctgtccatgttgccacagcacgtgtgactgtggtatcccgtatctggaaatgggcattccaactcatcagggatcttcatcgtccccctttcttgtacagtgtacataactttatgatgactatatgcagtaacttacctgccttcacagaaggaacggttacctataacttctacttccaggaaggatcactggtgaaagccagtataggcattgttctgggacagcgatatgtgaccctgcatgtcaatgggtttacagcacagacattggagaggtctcaaaggtgtttacctaatagcgatatatcagaacccccattgtgccacaagcgttgtcgcgcccgcgagatagtattaccgccaattgaccgtacagaacacc

SEQ ID NO: 633930 - DNA, 1111 bp, Homo sapiens
gctggctctggccctgggccccgcgcgatgcttgtcgggtcccgtcaagtcacgctaccagactgttgctgcagcacagcaggctctgtgtgccgccagcacggcccctatgtgtgtgctgtgcagaaggttattaggccactaataggaagtacttcacgcaacatgctaagcaagtggtaccaaaggaaaatctgtggcaaatcagacagatcatcatgctacgagatgctgtcctggatatgacaaggtccctggggcaggaaggtgctgtccagccatgactaccactctcaatctcgctttaccaaagagcctgggcagtctgattggatcctcctagccactctagctagtacatcaggaccgccacgtgaagaaagctgtacggctctgatgatgcgtagcgggccatggctagcgttctagcatcttcttcccttaacaagggagggcactagcgcgctcctgttgctagcttgaagttgcctgagaacctccccgtgggtcaggcaaggtgatccaaccctttgcagctgtctccaagtgtccctccggcatacgcactattgcgtgggcacggcgacctacctgatctgaatgactccgtgaataacgacgtgcattggacacccttcactctttctaatgtagccaaaaaaagatcccaatcaattccatgagtcgcaacacactattcctctactggggactccggtaacttggtgaacgtgttcccgcgagcttgctgcgacaggccgcacccacccatcgcaagcagaactgcgcgatagcgtaggcaccctccattagcatgtaaaagggtacacgcctcccaacccaatcgacccaaacgaaccatctccaaccacagaatcagctcgcggaatccgaggaaccacctctaggaaagcaagccgtgtcgggggcatgcatggtcgcctgcaagtcaaagggatacaaccccggatatgcgtctcgaaacggggtacaccggaacatagtaacaagcccatacaggaccccccacacccacacgacgcgcccctccaacccacgcatcccctaccttgacacctccgcacaccggtcaccctgcggccaaaccgac

SEQ ID NO: 633931 - DNA, 847 bp, Homo sapiens
aatcatgatccaggtaaaaactatgactgaatgagattgatctgctaatacggtgatgttgttatttacagtgatctttggaacatttgtaactgtaacatgtattgtcttaaagcaggagatctggtaatgtcctagtggattcattctacgctgcctgagtgggaaattgatgttgttcatcaacttaaaagggttgtcacactgtagtccacattgaacagttatgcatccactactgatgtgtcgagtgtagagtgcgaggggaggaaaagagatgaaattagtgacatacttttgctcgttgaggcgttcaacaccactgagcgagggatgagtgtgtttttatatcttctagacactcgtacttattgaaagcatatgtagggtctatggtagcaatcttcgaggtgtacgtcatagtttcagccacgctgtcttgttgcacttcgtatattattgttgcgttattccttgcctggtctaaatttctcccttggatactctaacagggactaaacttggaaaacatcactttgacctataagctcctagtacttcccaaataaattccatatctagcattttcaaacaaagccccaagatgaagtctaattctgaaaatatctcacaatttttgaatgttctttttatcttaccgacctaacttctcttttccctcccaattggctcccacacgttccatttcattttggccattatagtcacatccgtttgacattaggttgtgacatcttcctttcaggatgatggcaattcagatgcagtctgtctatgagtgagaattggtcaccattcagaggagttccctaagtgaagtgactaa

SEQ ID NO: 633932 - DNA, 1255 bp, Homo sapiens
gtggtacccgcattccaacatggcggcgggggcggtatctggtgctctatggccggaagaggcgctggagtgctcctggcatgtagggactgcctgccctgtgagaccccggtgtcgagaatgctcatgggtgctgttagacttccagtgcgttcagcgtttgtgggctataggtcattgatgactgagcacgaggcaggtacgacaccgcaacttcagtatgtctcagtacgcactacttgatgacattagagggacagaaataacagcgtgattccagagtgtcttcgtcattgcaccgcgcccaaggatactaacatgacgcaatgcgggcggtcagacggaatgaagtgatgtggactatttggcaaacgtgatggacgccctgacggaagaccaacggcatggctgtgacggtgaagcctaattggaggctggtgacaccgtggcagaacggagatggtaggacgtcaatgaagggccgcatgtgtaatgataagggacgtcccaaagagccgtcgttgcgaagtcgaccttgccaaggattgtgatgaaacgttgcatggagtagtgcaaaaggaaagcggaatgtgacataagaaggcggtaacgtaccttgcataggttgagatagaaacccatggtgacaggataacacggaggcctacaaacagcggatgacggacgaaagaacaccatgggaaggccaccaaatacggtgcggaaagggaaaaggcgggccaaacgcgggaccccaagtacgtgacaggaaaagggaatcccggtaagtccggacgagaccgagtggcacagcagtgagagaacgagagaacggtggaaaaaactatgaatagaaatcgccatgaaagcaggaaggaaaacaaacgagggcgacagcaagagaacagcgtacaagggaaatacagaacaaaagacacatacaatacaaaacaaagagatccccagaataacaagagccaagaagaacacaaggaagaaaaacacgaaaaaggatggacaaaaacgaaaggagaagaaaaaaaaacggacaagaaggaaaacgaaagaaacaaaagaggaaaaaaaaacaacatagagagaacacaaccagaccagaaaacacaaagagatagagaagggcaccagagcaaagaaaaaacacaacaaaaagaacaaagaaggaatgcaatggaagcgggaaacacacacaaacgagaaacataaaaaagaaaaagaggaaagaacaccaagcgaa

SEQ ID NO: 633933 - DNA, 113 bp, Homo sapiens
ttggtccgctcgagacattgggctgtcgtgattccacatcgaggtcgtcaaccctattgttgatttggcgtctagaataggattgcgcgtgttatcccgtgggtccgagggga

SEQ ID NO: 633934 - DNA, 910 bp, Homo sapiens
  misc_feature (251)..(251): n is a, c, g, or t
  misc_feature (270)..(271): n is a, c, g, or t
  misc_feature (639)..(639): n is a, c, g, or t
  misc_feature (724)..(724): n is a, c, g, or t
  misc_feature (730)..(730): n is a, c, g, or t
  misc_feature (733)..(733): n is a, c, g, or t
  misc_feature (908)..(908): n is a, c, g, or t
ggcggcgggaacagggctgccccgggccacctgtcatctcctccgccacccttccaacagttgcttcagactcaggagagaggccgccctggccccaggagcatgctgtcagctcatttctcgactcgccgccctgcccaaaggcggctgcaggagggcgcgcggcggcgtgggtggcagcggcgggaagctgcccgccaggacccctggccgagccggctcccgcggatcgcgcgccgcagccggaggtngaggcccgggcgacccgtnncccggcccgggaccccagccccgctgccccgccgccccggccgactcggacgcccgccgccgcccactcaccgccgcactcggcagagtactggtccccccagtccccggactgcgggctgcagccgccgccgcccgccggggcctcctgctgctgccggtgctgcagctcctgcttgagcagggagagcggcgagtagtgctcggtggccagggcgcctggccgcagccgggcggacaggacccccagcagcagcagcagcaggacacgccgggcggcgcccgcggcggccacagcgccgccccagaagcagcagcagcagcagcagccggcaggtgccatcttccctcaaggcgcatgtgcgacancccttgcccggctctcaggcctccccgcctctaacctacggcgggcaggtggaccgtggcaagggggcgggacaaggggagaagntttttntgntgggaatggtagtcccagctcggccagcccggggccgccttgccggtgccgggactacgaatcccaataagcccgcgcggcgcaagtcttccggtctggcgtctgacgtcttaccctccacagaatcggaagttctggactgcagttgagtggaaatgggcaacggcgggcggangg

SEQ ID NO: 633935 - DNA, 872 bp, Homo sapiens
tctgtgcacgagtgtccccccagcctcccctccccatacaaagtgctgacaggcctccgtcacctcccaccctggtccgcctccctggctggtcagccgagtgcctccgacccccctcctcagccctcccccacccacaggcccagcctcctcggtctcctgtctcgttgcttgcttctgcctgtgacttgtgggggagagaggcctgcagaccatgagcctctgcttgccctatatacttgtgcgcccccaggttctatctccccgtcacaccctgattgcctggcgttacagggagggagcggaccagccatacatccaggcccctgtaggttagcccctggactgtgtgcgctcttgcttgctccggggggtcggaggcatggcgatggtgtgtgatgcacggcctccgttgtcgcggccgcggcgcggtcccgtccgaggccccggcttgcatccccgtgtccaccaggccgcgccgttgatcagcttgattcgggctcccggtcgtagccgcagttagtgccattaacagtgctgtgaggttgtagcacggtgggggccttccaggtagagcgctcgtaggccttcctcgttgttatctttgcgtttagggcacaatgttggggccatccccctgtcccccatttcccccgtgataggggcggaagagcccgagaggtagaacccgagggtcgacgcggcggctcgtgtggtgtacgcaatgaatggacttgcatccccccgagggcgcagccaggttgcctttgggccagtcggtggccgggattacccagtaggacagggggcttgatgcaggagtggcatacaggaagggatcgcgggaacagccaggattgcgcaataggcag

SEQ ID NO: 633936 - DNA, 687 bp, Homo sapiens
  misc_feature (319)..(319): n is a, c, g, or t
ggcgacctcaaccagttcctcagtgcccaccagctggaggacaaggctgccgagggggcccctgtggacgggcaggctgcgcaggggcccaccatcagactacccaatgctgctgcatgtggcatgccagatcggctccggcatgcgctatctggccacactcaacttttgtacatctgggacctggctcacgctggaactgcctatagttggcgcgaagagatattccacgcgatcgatgcatccgcagcacgtttggagcatgaagcacggagactctctcatggctgcggtgagctacttacacgtgttgcagggnccagtggacagatgtctgcccatcctggtggatggcctgggagtgcatcctcatggggaagttcacgactgcgagtgacgtgtgggcctttggtgtgaccctgtgggaggtgctgatgcgtctgtagggcccaggccctttggtgcagcatcactcgacagagcaggtcatcggagaacgcaggggtgagttcttcctgggaccctgggctcggccggtgtacctgtcccggccaggctgcctgcccgctgggcctatatgaggctgatggcttcgggtgctaggaagcccggggatgtctggaggcagcgagcacccttttcccgagctgcatcggttcctgtgcctgaggatgctgtcaacacggg

SEQ ID NO: 633937 - DNA, 150 bp, Homo sapiens
ctcctcatactgtcagtgaacggctggtgtgtatgggctggtgtgtgacccatgtgccatcatggatgcggtgatgccacctgatgtatctcaaatgaccttttcctgcccgtggtcctatccttgtcctgtgcctccatgtggtggcac

SEQ ID NO: 633938 - DNA, 142 bp, Homo sapiens
cacgatgggttttccacgctggttttagctctcggcgtctgcaaaatgaacattgaggaggtgaagagcactacgatgacgcagtgcatcgcctcccacagccacgtgaaagggctggggctggtacatagcggcttggtca

SEQ ID NO: 633939 - DNA, 135 bp, Homo sapiens
atgaaaagtatgattaagctagctagaaaatataaggaaaaaattaacaaaataagtcattctttagatgctatataagatgacataagtaaagtagttgaagctataagataaaatatgtaaaatatactctta

SEQ ID NO: 633940 - DNA, 218 bp, Homo sapiens
ggggggggttttttttttttccttttgggttggggtgttggccccccccccccaaagaggggccctttcctttttccggggttttttttttggggggggggggggcccccccccccggggttttttggtgggccggggggtttttgggggggccccctttttttttttttccgggcccccccgtgggttttttgcccccccccccccccgggggggga

SEQ ID NO: 633941 - DNA, 264 bp, Homo sapiens
ccgttcgggtgggaggatcacttgagtccagaagttcaaggctgcaatgagccatgattacaccacggcactacaactctggtggcacagtgagaacctgactcttaaaaaaaaaaaaaaaaaaaaaaaaaaataactaaactttctaaaacattcttgtttcacgtttacccagaaactatacaagttggtttaccatgctttatcttactcaatccatacaaaattcttatggaggttgtagcacctctttattgataaccg

SEQ ID NO: 633942 - DNA, 922 bp, Homo sapiens
tctacggtcgagtccggttccgcgtgagaccccttcggggggtttccccgcgtcccccaaagtgtccttgtcttggcaatctcccgacgtccgcccgcccaagtcacacgtgtgctccggccggtctactttctgggggggtagaactgcgcccaccacccatttttcggcgccctaaaatgtcctccatctgtgcttggggagagttctggccgatagccccccttcatctcgcgcaccccttcgtgtggggggtctttctcgcctcgccgcccacctcaagtatgcggtgccccctacgccacattttacagcctttgggccaccattgcctcgcgcgcgctctctaccatttttggggctccactcgtggagcaccctctgaagcatacctggtccgcgcgccgaagcattttccctggaaggccccttcggtcgccacgtaatacctgggggggcaccgacagaccccccctgtctccaccgcttgtgtgcggtctctaccaccaactacgtcccgctcctttgctttcagcactccaggccgcgttcgttggagtctcctccgcggcgcacagacaccgctgtacgccggggccccttcaaatgctcgcccccccccgcccattggtggtttcagtaccctccttccctgaagtggacctttctctccagaacccctcggtccacctgtggagccccccgtatgccggcacctctcatttcctttggcacacttgctggcttgacatgcggccccacggacgcaattcttgtttcttcccgccactgcttcccgccccacatgttcttgtcgagtggttgacaacccggcccctggatgaccatttccaccgggcgggccccccaggaaaacccccggggttttttgctccaaaaaaacccccccgcccacataaca

SEQ ID NO: 633943 - DNA, 146 bp, Homo sapiens
gtgacctccagcaaacacatgaatggttatttcatggagaaggaagcacttgggggtcgtggtaattccagtgttttctgtgtcatagttttacactttctaacactgtcatttttgaagttttgatatatccacatctattgacc

SEQ ID NO: 633944 - DNA, 536 bp, Homo sapiens
cacagattatacatgatagacctcaacagacagtaaccagcttacgaatgtggatataggccgtctgctaatacatgggagactgtgcttatggtcacctttagggcgaaacactttagaagttgacagcatttaagccatgagtggtgtctagagcctgcatcaccaacattgcctcaagacagtcacgatgccattactcccatcagttgcttagacaatgaatcctgtgtctgagactcacttatgtcttcttacatcactgtcttcattgccagtgcagttcttgcatggtgacaatactcataggcatactaattcttccacgaatgggggataattttcaagggaccagattttaggatttttccaagttagagcatgcatccctttttagttatggcagatggtatacaatagatcccacttctgccaccatgaacaaccagcatgtgaaacagacaagaccttgcaagcaatactctagttccctttaggaagtgactttttactcaactctaccgcacaatgccatt

SEQ ID NO: 633945 - DNA, 413 bp, Homo sapiens
agaggaaccatataccaggatacgggtttacggacaataccattaaagcatgagatatatatgcatgaatcactgatatacacaggagactctaaaaaaactatctgcagccataacttgacagtacagttttaaagcagtgactacaagatatcacaaaaattcaaacagttaatacaagaaaatgaagtgaatagttcatgacactaaactgaactgttcgtgacacaaagtctctaaaaaaacaaatctcggctgggccagcactttgtgaggtcaaggccagcagatgacttgaggtcaggattttgagaccagcctgggtgacagagtgagactccatctcaaaaactgaaaataaaaataaaaatatgtattctcctaactgaaatatttacctaatctggaaagtg

SEQ ID NO: 633946 - DNA, 1001 bp, Homo sapiens
gctcctcactttcaggaacaagcactgacctgcgacagtgaatagatcatgactttgttctgtgctcgtgccggcattctcctgctgtaccattgctattggtgtcttgtctaggttcctcttgctttccccttgtgctgtagagaattactcgtggcaagactggatgaccacgagcgagaagatctatcatactcgaccagaggatctcgagggagtcactttcgtacccattctaaccatggagtcactcgcagaatttgggcttgagttctgtacttcaagccataatatcgacaagcgtagtctaaaacacgtctcagagacacggaacacctcatttacttctttccattgtcttcgacacccaggatagaaggcagtcaggatacgatgaacatctttgcatgatgtacatcatcgcccattgtggggagacccctacaacggttctattaacatcctctgacgtagatgatcaatccattgagaccgagagacctttttagaatattgacccagcgcctgtcaaaccgggattgaaatttcgctgcggagggaactcaagtattctcagatgggaaaagagctttatctccagagaggaaaaactgttccctgttcaccatcttgaacctctttcaaaaaccacaaggtgcaaacgaaaccaaagggttaagtttcctcaaccatagtttttgtggccacagagcaagggtcaataattggaggactctttcgatatactattacctacgacagaaaggggaagtctccggtttggaaaagagccctataggagtagaggaaattaaagacgttgttaactggcggcgcgcaaggggcattttggtataagaggccaaacaaggtttggggtccaacgcgggaacaatcccatttagatacggcaccattgttacccaacgcttgtgggctttccgcacaacccttttttccccgcggtgttggaactaacttcccaacactttcgacaggag

SEQ ID NO: 633947 - DNA, 323 bp, Homo sapiens
tattttggacacctagcccgaaacctcacttccttcaacctgtctcccagtcatcttcaatatgtggacgaccttcttctttgcagcccctctctaaaagactctcaaactcacacggacactgctctcttaaactttctcgctatcaaagggtatcgggtctccccctccaaggcccaactctccatctccatgatgacttacttaggaattcaactttcccctggggaacaggctatgactccagccagggcagcattaatagacaatctacccccaccctcctccaaaagcgaaatcctttccttcccagggctagcagg

SEQ ID NO: 633948 - DNA, 469 bp, Homo sapiens
cctagaaaggtgctgacagaaaataagtgcagtatggtcgtactattaaactctagtatcctatatgcttgcttcttacccccttacctaggtgaatactcccacagtggtctagtatctcaacattttctatatttaaaggaaaaaatatatatattatagtttcttttaatatgatcaggtctgtaaatgtgtactaaaaaaatcagagtatatttataaacagaatagtttatttaaagagaaggtctcttccttattgatatacatggtatagcattaattccatttgttactattgtgcacaaaagccctgttcacaggggaatggtgtaaacatttatactgttttgttcactgtatatagtagacataaactgttgaatagttactgaatcatgatgtacagaatatgtgaccatcttcaggtatgggatttctgaacgtttcaaatttcaatcaatgagca

SEQ ID NO: 633949 - DNA, 337 bp, Homo sapiens
agtgtaacgcttatctactgaggaacgtctcagttgcttcgacttttggtaattatgaaattatgaacaaggttcggtaattatgaataaggctgccgtaaatatctgtgtgcaggattttgtgtggacataaattttcaattcatttgggtaaatacaaagggacaaaactgctggatcacatggtaaaggtatgtttagttttgtaagactgtcgaactgtcttccagagtgaccaccgttttgcatccccacctgcaatgaatcagagttcctgttccacatcttggccagcactgggggttatcagtggtgtggattttggccattctaagcg

SEQ ID NO: 633950 - DNA, 512 bp, Homo sapiens
actctgatgtttctctgactgatcttcctctgttcctggatcagtgtagagaacagaagtagaacaagatcagagtgctgtcactctgagtcagaagcctcattgactaggaagattgtgcttccgtttattcttctttatcttttcttaattactttacttatgctaatctttcttcttctttttcttgtgtatctctataacttcaaaggaactggagctgatcctatcctcatctgaggtagaatcctccagataactgttttaaatgctgtatccttacgtccttttcatgtcgattattgtcatcgatatgatgtcatacatgggatcttcatgtgacactctgaactgctctaacttttggttgacttagataaagcaaagggcattcttagtcacccgatcggtgaccatcagcgttagcaacgccaacactgcataacttagcacttctttccccagtggcatccaaagtcctttaattggtgcaggagaacgcgtcaaaatcg

SEQ ID NO: 633951 - DNA, 115 bp, Homo sapiens
ctaggttttcttctccatgatgcagtgagaggagatggtgagaggggccaggtagagggcaacaccacggatgaagaaggtacagagaatggtcacctgggaggaggtccgctct

SEQ ID NO: 633952 - DNA, 393 bp, Homo sapiens
ttgtagaaagtattatttaatttaaatggatgcaggttgtctactaaaagaaagattatatataactatgctaattgttcataatcaacagaaaccaagatagagctacaaactcagctgtacagttcgtacactaaactcttcttgcttttgcattataaggaattaagtctccgattattaggtgatcaccctggatgatcagttttctgctgaaggcacctactcagtatcttttcctctttatcactctgcattggtgaatttaatcctctcctttgtgttcaacttttgtgtgcttttaaaatcagctttattctaagcaaatctgtgtctactttaaaaaactggaaatggaaaaaaaaataaatctttgcccaatccttcaaaaaa

SEQ ID NO: 633953 - DNA, 112 bp, Homo sapiens
aggatacccccagatgtggcacagtttatcagtttggtcctgggggtgaatggattcagaaatcatttgcactgtgctgttaatttgagttttaatgtttcaaaaattctaa

SEQ ID NO: 633954 - DNA, 331 bp, Homo sapiens
ctcgtagaggaggatgcttctttaccatttccctacaccctgattcccaaaacctatttgctttcacctggactgaccctgacaccctccagtcacaacaactcacatggactgtcctccctcagggcttcagggatagccctcatttctttggacaagctctagcccgaaacctcacttccttaaacctgtctcccagtcatcttcaatatgtggacgaccttcttctttgcagcccctctctaaaagactctcaaactcacacggccactgctctcttaaactttctcgctatcaaagggtatagggtctccccccctccaaggcccaa

SEQ ID NO: 633955 - DNA, 1499 bp, Homo sapiens
  misc_feature (708)..(708): n is a, c, g, or t
ccaacctgttccctcccaggacccgagaatgtagcggggtccctgaggtgctgatgtccacatggacaccgaggtcagttccgggccaaagcggccagcgcaggggctgaccactcagacctcactcctcgcaggggtgagcgggcgacgctgcctcacgtcattgtcctgccctccaaggcccgcgctcgtcctctgacaggatgccctgacaccgcagtgcgggggcggcctcccagatagggccgcagtcgctaagtccgaggcggctggctcacctcactgagcccggctggacgtgggaccaccggtcgccgcggccagggaaccaccaaggagtcaaggcgagcctaccgccagcagcttctgcccgggcccacgcgccgttccgggtaggcccgcggcgcaggccacttccggcagcggtgcaccatgggacttgcagttcgctggcaaaggttgagtcccgggcgtggcggccgcgctccatgttgggagctgtaggcgccgcgtggcatgctgggggtgctaggtaccgaaggcagatgccgtccctttggactcgcttcgtccaacgcccccacgagtttcggtggcccttcgccccacgctataagagcagtcacttccggaactgctgcccttcgcctttgccgcgaaaagtgcctgacgggggctgggaagggggagggggaaggagtcaacgantccctccccgtcgtcattggctgagcgcctcgtgacgtcactctgaggcgcctcatgcggcgccgcgcacgggtcccagagccttctgggtagcggtttaaccccgcctcttgcgtcggcgccttccttttcctccctgtcgccaccgaggtcgcacgcgtgagacttctccgccgcctccgccgcagacgccgccgcgatgcgctacgtcgcctcctacctgctggctgccctagggggcaactcctcccccagcgccaaggacatcaagaagatcttggacagcgtgggtatcgaggcggacgacgaccggctcaacaaggttatcagtgagctgaatggaaaaaacattgaagacgtcattgcccagggtattggcaagcttgccagtgtacctgctggtggggctgtagccgtctctgctgccccaggctctgcagcccctgctgctggttctgcccctgctgcagcagaggagaagaaagatgagaagaaggaggagtctgaagagtcagatgatgacatgggatttggcctttttgattaaattcctgctcccctgcaaataaagcctttttacacatctaaaaaaaaaaaaaaaaaaaaaaaaaaaaaaaaaaaaaacccggggggattttatgtgggggggggggaaaaaaggggtataaaaaaggggccaggggaaaacggggttcccggccccagtttctgggcaccacagggggaacacacggggggaccccaataagggggggggaataaaatgcgaaaaagcccggtaaccgggaaaa

SEQ ID NO: 633956 - DNA, 168 bp, Homo sapiens
agctcaggtcaggctatatacgtctatccgcgttaaaatctgacatgcagcttgccgaactagctatgaggaaacagttagtaataacttaccaaaacacacaagttaaggttaccaattaggtgggctctaacagaatgattgtgttgtaccaaaaaaaaaaactag

SEQ ID NO: 633957 - DNA, 1945 bp, Homo sapiens
  misc_feature (708)..(708): n is a, c, g, or t
  misc_feature (1945)..(1945): n is a, c, g, or t
ccaacctgttccctcccaggacccgagaatgtagcggggtccctgaggtgctgatgtccacatggacaccgaggtcagttccgggccaaagcggccagcgcaggggctgaccactcagacctcactcctcgcaggggtgagcgggcgacgctgcctcacgtcattgtcctgccctccaaggcccgcgctcgtcctctgacaggatgccctgacaccgcagtgcgggggcggcctcccagatagggccgcagtcgctaagtccgaggcggctggctcacctcactgagcccggctggacgtgggaccaccggtcgccgcggccagggaaccaccaaggagtcaaggcgagcctaccgccagcagcttctgcccgggcccacgcgccgttccgggtaggcccgcggcgcaggccacttccggcagcggtgcaccatgggacttgcagttcgctggcaaaggttgagtcccgggcgtggcggccgcgctccatgttgggagctgtaggcgccgcgtggcatgctgggggtgctaggtaccgaaggcagatgccgtccctttggactcgcttcgtccaacgcccccacgagtttcggtggcccttcgccccacgctataagagcagtcacttccggaactgctgcccttcgcctttgccgcgaaaagtgcctgacgggggctgggaagggggagggggaaggagtcaacgantccctccccgtcgtcattggctgagcgcctcgtgacgtcactctgaggcgcctcatgcggcgccgcgcacgggtcccagagccttctgggtagcggtttaaccccgcctcttgcgtcggcgccttccttttcctccctgtcgccaccgaggtcgcacgcgtgagacttctccgccgcctccgccgcagacgccgccgcgatgcgctacgtcgcctcctacctgctggctgccctagggggcaactcctcccccagcgccaaggacatcaagaagatcttggacagcgtgggtatcgaggcggacgacgaccggctcaacaaggttatcagtgagctgaatggaaaaaacattgaagacgtcattgcccagggtattggcaagcttgccagtgtacctgctggtggggctgtagccgtctctgctgccccaggctctgcagcccctgctgctggttctgcccctgctgcagcagaggagaagaaagatgagaagaaggaggagtctgaagagtcagatgatgacatgggatttggcctttttgattaaattcctgctcccctgcaaataaagcctttttacacatctaaaaaaaaaaaaaaaaaacccaggcgttccgcccaggcgttccgaaagaggtcccttagtcgggtgtgggctcgagggattcggggcctccaggaccaggggcccacccttttgcccagggagctcctagggttcccttgaggtcttcccgaagggcctctcagacccagttttcacgggttgttgtggcccgaggaaccctggacagcgccggtgggcctgctgaggcctctcttgaggctgtgcccggggggtccttgcttaccagtggctgacccagttgccctggggaccctctgacacacccttgggctgccccactgcccccctgtgtgcaaccctcttctacggtggccacggcaaaattgggcccttttgaaggggacatctgcgcggtacaacccgggtgtcgcgatgaggagcctcccaagagcccctcttcgagaggagaccccaggagataccccgggcagcggtgatcacgcgaacaagtatcctccgtgcgggaagagggcggactgccgcccgtgattcaccccactgattaaggaagcaccggtgtccttcaataaagagaaggtgcagcccccctgtggtgcagaacacagatgcgaccaagatacgaacctctctggtgatgcaattggacgn

SEQ ID NO: 633958 - DNA, 120 bp, Homo sapiens
acgttggctaatttgaatcattgatgaccacagagctgggacaattgttgtgaacctcacaggcaggctaaacaagtgtggggtgatcagccccagatttgacgtgcaactcaaatgacc

SEQ ID NO: 633959 - DNA, 125 bp, Homo sapiens
cagatagatcacctgacacctgctctggacactggatctccacaaggtagatggctccatgaggcgtggctgggcggtcagcacactggcgtagaggcatgcgccgtgccgttaggccgatctga

SEQ ID NO: 633960 - DNA, 1545 bp, Homo sapiens
  misc_feature (708)..(708): n is a, c, g, or t
ccaacctgttccctcccaggacccgagaatgtagcggggtccctgaggtgctgatgtccacatggacaccgaggtcagttccgggccaaagcggccagcgcaggggctgaccactcagacctcactcctcgcaggggtgagcgggcgacgctgcctcacgtcattgtcctgccctccaaggcccgcgctcgtcctctgacaggatgccctgacaccgcagtgcgggggcggcctcccagatagggccgcagtcgctaagtccgaggcggctggctcacctcactgagcccggctggacgtgggaccaccggtcgccgcggccagggaaccaccaaggagtcaaggcgagcctaccgccagcagcttctgcccgggcccacgcgccgttccgggtaggcccgcggcgcaggccacttccggcagcggtgcaccatgggacttgcagttcgctggcaaaggttgagtcccgggcgtggcggccgcgctccatgttgggagctgtaggcgccgcgtggcatgctgggggtgctaggtaccgaaggcagatgccgtccctttggactcgcttcgtccaacgcccccacgagtttcggtggcccttcgccccacgctataagagcagtcacttccggaactgctgcccttcgcctttgccgcgaaaagtgcctgacgggggctgggaagggggagggggaaggagtcaacgantccctccccgtcgtcattggctgagcgcctcgtgacgtcactctgaggcgcctcatgcggcgccgcgcacgggtcccagagccttctgggtagcggtttaaccccgcctcttgcgtcggcgccttccttttcctccctgtcgccaccgaggtcgcacgcgtgagacttctccgccgcctccgccgcagacgccgccgcgatgcgctacgtcgcctcctacctgctggctgccctagggggcaactcctcccccagcgccaaggacatcaagaagatcttggacagcgtgggtatcgaggcggacgacgaccggctcaacaaggttatcagtgagctgaatggaaaaaacattgaagacgtcattgcccagggtattggcaagcttgccagtgtacctgctggtggggctgtagccgtctctgctgccccaggctctgcagcccctgctgctggttctgcccctgctgcagcagaggagaagaaagatgagaagaaggaggagtctgaagagtcagatgatgacatgggatttggcctttttgattaaattcctgctcccctgcaaataaagcctttttacacatctaaaaaaaaaaaaaaaaaagaaagaagaagaaaagaagaaaaagacgacgagaacaaaaacaaaaccaccacgagggagcacaaaatatgaggcggggggggaaaaaaaagggaggatatatagcggagaacgacggaacaacgacgggtcacacggcgccacaggttagtggacacgagggggagaaacggggggacccccaaaggggagacgagaaaaaagcaagaagagccgaggaaaccgcgtagaag

SEQ ID NO: 633961 - DNA, 794 bp, Homo sapiens
gggctgcaggaattcggcacgagcaccgaggtcgcacgcgtgagacttctccgccgcctccgccgcagacgccgccgcgatgcgctacgtcgcctcctacctgctggctgccctagggggcaactcctcccccagcgccaaggacatcaagaagatcttggacagcgtgggtatcgaggcggacgacgaccggctcaacaaggttatcagtgagctgaatggaaaaaacattgaagacgtcattgcccagggtattggcaagcttgccagtgtacctgctggtggggctgtagccgtctctgctgccccaggctctgcagcccctgctgctggttctgcccctgctgcagcagaggagaagaaagatgagaagaaggaggagtctgaagagtcagatgatgacatgggatttggcctttttgattaaattcctgctcccctgcaaataaagcctttttacacatctaaaaaaaaaaaaaaaaaaaaaaaaaaaaaaaaaaaaaaaaaaaaaaaaaaaaaagagaggggggggcgcgcgcccaagagagagttctccccgcggggggcgccccggatttagcagcggcatcaccccagatttggtgggaacacaaggaggcccccaaaaggggaggacagccctatatataaagaccagaggagaggggcgcgcagagtaaacacacagctcggagacggggaaacacacggggcacacgcaggaccaccctggggagagaagcgccccttcagcccgcgggggggcggccacatcaggggacaacatacccaga

SEQ ID NO: 633962 - DNA, 387 bp, Homo sapiens
ctctggcagtgcagtttcagagtctcctaaatttacggcaagacgaaggtgcgacaagggccctgtggtttcctggtgttcgtatgtgaatgtgctccagttagagcaacaggatgtatggggaatgaagggataagagctatggtatcactggatggggagaggtgatgagatcacaagaggaatttggagcccagggtcagccctctcatcctgcccaaatgttggcagaatctgggtcttagactagcataagtgaagtctggggagggccgaactccaaggcagaagaaagaatatctctcagcactaatgctccccttccctccccctaacccagaacatcccttgggttatcgcaggtgaatactccaatcagatgccaca

SEQ ID NO: 633963 - DNA, 800 bp, Homo sapiens
  misc_feature (29)..(29): n is a, c, g, or t
cttcgaggccaaagaaattcggccaaccnaagtgtcgccaccgaggtcgcacgcgtgagacttctccgccgcagacgccgccgcgatgcgctacgtcgcctcctacctgctggctgccctagggggcaactcctcccccagcgccaaggacatcaagaagatcttggacagcgtgggtatcgaggcggacgacgaccggctcaacaaggttatcagtgagctgaatggaaaaaacattgaagacgtcattgcccagggtattggcaagcttgccagtgtacctgctggtggggctgtagccgtctctgctgccccaggctctgcagcccctgctgctggttctgcccctgctgcagcagaggagaagaaagatgagaagaaggaggagtctgaagagtcagatgatgacatgggatttggcctttttgattaaattcctgctcccctgcaaataaagcctttttacacatctaaaaaaaaaaaaaaaaaaaaaaaaaaaaaaaaaaaaaaaaaaaaaaaaaaaaaagagaggggggggcgcgcgcccaagagagagttctccccgcggggggcgccccggatttagcagcggcatcaccccagatttggtgggaacacaaggaggcccccaaaaggggaggacagccctatatataaagaccagaggagaggggcgcgcagagtaaacacacagctcggagacggggaaacacacggggcacacgcaggaccaccctggggagagaagcgccccttcagcccgcgggggggcggccacatcaggggacaacatacccaga

SEQ ID NO: 633964 - DNA, 800 bp, Homo sapiens
  misc_feature (18)..(18): n is a, c, g, or t
  misc_feature (24)..(25): n is a, c, g, or t
  misc_feature (33)..(33): n is a, c, g, or t
taagcttacggctaggtncgggcnnggtgttantcgccacgcgaggtcgcacgcgtgagacttctccgccgcagacgccgccgcgatgcgctacgtcgcctcctacctgctggctgccctagggggcaactcctcccccagcgccaaggacatcaagaagatcttggacagcgtgggtatcgaggcggacgacgaccggctcaacaaggttatcagtgagctgaatggaaaaaacattgaagacgtcattgcccagggtattggcaagcttgccagtgtacctgctggtggggctgtagccgtctctgctgccccaggctctgcagcccctgctgctggttctgcccctgctgcagcagaggagaagaaagatgagaagaaggaggagtctgaagagtcagatgatgacatgggatttggcctttttgattaaattcctgctcccctgcaaataaagcctttttacacatctaaaaaaaaaaaaaaaaaaaaaaaaaaaaaaaaaaaaaaaaaaaaaaaaaaaaaagagaggggggggcgcgcgcccaagagagagttctccccgcggggggcgccccggatttagcagcggcatcaccccagatttggtgggaacacaaggaggcccccaaaaggggaggacagccctatatataaagaccagaggagaggggcgcgcagagtaaacacacagctcggagacggggaaacacacggggcacacgcaggaccaccctggggagagaagcgccccttcagcccgcgggggggcggccacatcaggggacaacatacccaga

SEQ ID NO: 633965 - DNA, 473 bp, Homo sapiens
ctctaccggatccttttttttagacagagttacctctgtcatccaggcaggactgctgtggtgcaatctcaattcagcgcaactcaggctcgtggattcaagcgatcctgtgcttcagcctcctgagtagccaggattacaggcttgtgccaccataccaggctaatattattgtgtcttcagtagagacaggtttcaccgtgttggtcaggctggtctcaaactcctgatctcaaacgatccacccgcctcggcctcccaaagtgctggttttacaggcacgagccaccgcatccggccactgttactacttttttaagaaaaaaacttttaacctaccattttcataggctttacctgtgagcttgccttagtgctgaaccctgtgacttttcaaggcttcttccaggtctgtgtaactgcctaaaataccctgttaaatcttggtgacgattgtctacagacacttctga

SEQ ID NO: 633966 - DNA, 311 bp, Homo sapiens
  misc_feature (108)..(108): n is a, c, g, or t
tacctaaatggctgtggctgtagcacataggactttttacatggattactatctagaacatataaagagctcatatacatagattagaaaacatcaagacttccattntgctaattgtaaaacagaacaattagtcaaataaacacagcatggaacatgttcccatctctgagcagggatcacaaggaatgaaaaactttaaaaaccaaaagagccctatataaatttagccaaaaaaaatagttaagtccccacacattattaacgatcgaaagctagaagacaattctatatactcacttaggttaaca

SEQ ID NO: 633967 - DNA, 1041 bp, Homo sapiens
  misc_feature (90)..(90): n is a, c, g, or t
  misc_feature (270)..(270): n is a, c, g, or t
tcgtttaaggagaactgaagttttttgtcatctgctgtggctgttctatgaaccaccttcttctttctgcgagcagttcctgtgcccacncaatgcgcacttgtgcctgcagtttggcgagtttttcctggttcatgattgtttctttcattctttgttcgggagcgaaaattatacgggtggcccgcgtcgggggactagggttggtgctcaaggggtctcgcggtggaccaccgtgagattatggcgcacacacgcggggacgcaagncaccgaggtcgcacgcgtgagacttctccgccgcctccgccgcagacgccgccgcgatgcgctacgtcgcctcctacctgctggctgccctagggggcaactcctcccccagcgccaaggacatcaagaagatcttggacagcgtgggtatcgaggcggacgacgaccggctcaacaaggttatcagtgagctgaatggaaaaaacattgaagacgtcattgcccagggtattggcaagcttgccagtgtacctgctggtggggctgtagccgtctctgctgccccaggctctgcagcccctgctgctggttctgcccctgctgcagcagaggagaagaaagatgagaagaaggaggagtctgaagagtcagatgatgacatgggatttggcctttttgattaaattcctgctcccctgcaaataaagcctttttacacatctaaaaaaaaaaaaaaaaaaaaaaaaaaaaaaaaaaaaaaaaaaaaaaaaaaaaaagagaggggggggcgcgcgcccaagagagagttctccccgcggggggcgccccggatttagcagcggcatcaccccagatttggtgggaacacaaggaggcccccaaaaggggaggacagccctatatataaagaccagaggagaggggcgcgcagagtaaacacacagctcggagacggggaaacacacggggcacacgcaggaccaccctggggagagaagcgccccttcagcccgcgggggggcggccacatcaggggacaacatacccaga

SEQ ID NO: 633968 - DNA, 853 bp, Homo sapiens
cggccgcgttgtactccaccggtcaggttgtactccaccggcaggttgtactccaccggcaggttgtactccaccggcaggttgtactccacgggaatggttgtactctccgccgcctccgccgcagacgccgccgcgatgcgctacgtcgcctcctacctgctggctgccctagggggcaactcctcccccagcgccaaggacatcaagaagatcttggacagcgtgggtatcgaggcggacgacgaccggctcaacaaggttatcagtgagctgaatggaaaaaacattgaagacgtcattgcccagggtattggcaagcttgccagtgtacctgctggtggggctgtagccgtctctgctgccccaggctctgcagcccctgctgctggttctgcccctgctgcagcagaggagaagaaagatgagaagaaggaggagtctgaagagtcagatgatgacatgggatttggcctttttgattaaattcctgctcccctgcaaataaagcctttttacacatctaaaaaaaaaaaaaaaaaaaaaaaaaaaaaaaaaaaaaaaaaaaaaaaaaaaaaagagaggggggggcgcgcgcccaagagagagttctccccgcggggggcgccccggatttagcagcggcatcaccccagatttggtgggaacacaaggaggcccccaaaaggggaggacagccctatatataaagaccagaggagaggggcgcgcagagtaaacacacagctcggagacggggaaacacacggggcacacgcaggaccaccctggggagagaagcgccccttcagcccgcgggggggcggccacatcaggggacaacatacccaga

SEQ ID NO: 633969 - DNA, 810 bp, Homo sapiens
  misc_feature (23)..(23): n is a, c, g, or t
  misc_feature (25)..(25): n is a, c, g, or t
ccgcccacgcgtccgcggacgcntnggcgccaccgaggtcgcacgcgtgagacttctccgccgcacgccgcccctccgccgcagacgccgccgcgatgcgctacgtcgcctcctacctgctggctgccctagggggcaactcctcccccagcgccaaggacatcaagaagatcttggacagcgtgggtatcgaggcggacgacgaccggctcaacaaggttatcagtgagctgaatggaaaaaacattgaagacgtcattgcccagggtattggcaagcttgccagtgtacctgctggtggggctgtagccgtctctgctgccccaggctctgcagcccctgctgctggttctgcccctgctgcagcagaggagaagaaagatgagaagaaggaggagtctgaagagtcagatgatgacatgggatttggcctttttgattaaattcctgctcccctgcaaataaagcctttttacacatctaaaaaaaaaaaaaaaaaaaaaaaaaaaaaaaaaaaaaaaaaaaaaaaaaaaaaagagaggggggggcgcgcgcccaagagagagttctccccgcggggggcgccccggatttagcagcggcatcaccccagatttggtgggaacacaaggaggcccccaaaaggggaggacagccctatatataaagaccagaggagaggggcgcgcagagtaaacacacagctcggagacggggaaacacacggggcacacgcaggaccaccctggggagagaagcgccccttcagcccgcgggggggcggccacatcaggggacaacatacccaga

SEQ ID NO: 633970 - DNA, 135 bp, Homo sapiens
  misc_feature (18)..(18): n is a, c, g, or t
  misc_feature (51)..(51): n is a, c, g, or t
  misc_feature (75)..(75): n is a, c, g, or t
  misc_feature (110)..(110): n is a, c, g, or t
tcccgggctgcccccaanactccgggccctgccccctcccactcttgaagnggaggccgcctcctcggggctccnggctggcttgcccgcgctctttcttccctcgtgancagtggtgtgtggtgtcgtctgtga

SEQ ID NO: 633971 - DNA, 1723 bp, Homo sapiens
  misc_feature (708)..(708): n is a, c, g, or t
  misc_feature (926)..(926): n is a, c, g, or t
  misc_feature (994)..(994): n is a, c, g, or t
  misc_feature (1006)..(1006): n is a, c, g, or t
ccaacctgttccctcccaggacccgagaatgtagcggggtccctgaggtgctgatgtccacatggacaccgaggtcagttccgggccaaagcggccagcgcaggggctgaccactcagacctcactcctcgcaggggtgagcgggcgacgctgcctcacgtcattgtcctgccctccaaggcccgcgctcgtcctctgacaggatgccctgacaccgcagtgcgggggcggcctcccagatagggccgcagtcgctaagtccgaggcggctggctcacctcactgagcccggctggacgtgggaccaccggtcgccgcggccagggaaccaccaaggagtcaaggcgagcctaccgccagcagcttctgcccgggcccacgcgccgttccgggtaggcccgcggcgcaggccacttccggcagcggtgcaccatgggacttgcagttcgctggcaaaggttgagtcccgggcgtggcggccgcgctccatgttgggagctgtaggcgccgcgtggcatgctgggggtgctaggtaccgaaggcagatgccgtccctttggactcgcttcgtccaacgcccccacgagtttcggtggcccttcgccccacgctataagagcagtcacttccggaactgctgcccttcgcctttgccgcgaaaagtgcctgacgggggctgggaagggggagggggaaggagtcaacgantccctccccgtcgtcattggctgagcgcctcgtgacgtcactctgaggcgcctcatgcggcgccgcgcacgggtcccagagccttctgggtagcggtttaaccccgcctcttgcgtcggcgccttccttttcctccctgtcgccaccgaggtcgcacgcgtgagacttctccgccgcacgccgccgcgtgagtgtggtgaccgggcccggggtgccgnctggggacgcggagtcgtggggatgcggggtgggcggcggggtatttttgggacggaggctacgggcnagccacgcgccntcgcccggcggccccgggatgggccggcaggaggccgccggggtaactccgccgtcgcgtcctctccgcccgcctcaggatgcgctacgtcgcctcctacctgctggctgccctagggggcaactcctcccccagcgccaaggacatcaagaagatcttggacagcgtgggtatcgaggcggacgacgaccggctcaacaaggttatcagtgagctgaatggaaaaaacattgaagacgtcattgcccagggtattggcaagcttgccagtgtacctgctggtggggctgtagccgtctctgctgccccaggctctgcagcccctgctgctggttctgcccctgctgcagcagaggagaagaaagatgagaagaaggaggagtctgaagagtcagatgatgacatgggatttggcctttttgattaaattcctgctcccctgcaaataaagcctttttacacatctaaaaaaaaaaaaaaaaaagaaagaagaagaaaagaagaaaaagacgacgagaacaaaaacaaaaccaccacgagggagcacaaaatatgaggcggggggggaaaaaaaagggaggatatatagcggagaacgacggaacaacgacgggtcacacggcgccacaggttagtggacacgagggggagaaacggggggacccccaaaggggagacgagaaaaaagcaagaagagccgaggaaaccgcgtagaag

SEQ ID NO: 633972 - DNA, 438 bp, Homo sapiens
ttacaccagatgctcccacctggtgaggacaaatacattcgaaccatagcagcaggattcactatatggaccacgtcacatcatactctagtgccagcgtcactgtgtagtcccacccttgtgaaactagcattgcatctcgtggagctctggcttgctcggacacagtgctcaggatggaatcaggtagccaccaagtatataggtactagttgaccttggggcaggcatataagctaccccaaggctcaatatccccatccctacatggggatagtcagttgtaattacctacgtatgatagctttgcaggatataataagctgattacatggaaaattgttagctccatgtcttgtcatagaccgatttccacagctctgagctctgattgctgagatacgcttgtgtcttgcaccttccagggccggtgcctgg

SEQ ID NO: 633973 - DNA, 477 bp, Homo sapiens
ggtgtctctagaggatccgatcctacatagtgttgtcaagttaacggggcaaacacggagactaggggcagagcggtggattaggccaggtatgtaacagggtagttgtaggaggtgagagagtgctacaagatagcttggaaaagcgctccccaaattggttgactcgagacgatacacacacactataagagacgggaacagactcaagccactcatacatccgtggccatcagaagctgcacatgcagagatttcgagagaatccggcagagagcaaaagccagggaagagttggaactggcctgaagtaagaacgcacttccagcgcacatacagatccattagcagagagctgtgcgtttacgggccgggggtgtaaactaaaaatctcttaccaatctgactgatccctaaataatggagacagagaacccaaggaagccaattgatatcatagctcagaccatacctatg

SEQ ID NO: 633974 - DNA, 449 bp, Homo sapiens
gcaggcctctacctcatcgccacttccagcaccaggcaatgctaacatcttccacacggatcccggatgtgaacatgcggcacgtgttggtctggggcgaagggcagcccatcgagtacggcaagaagaagctgaattaccggccctacaatcaccagcacgaatacttcttccggatggggccgccgctgctcatccccatgtatttccagtaccagatcatcatgaccatgatcgtccataagaacggggtggacctgggccggggccgtcagctactacatcgggttcttcatcacctacatccctttcaacggcatcgggggagccctctttttcctcaatttcatcaggttcctgggagagccacgggtgggggtgggtcacacagatgaatcacatcgtcagggagatggaccaggaggcctaccgtgacgggtacagtagcc

SEQ ID NO: 633975 - DNA, 220 bp, Homo sapiens
gggttttttttttttaaccccccaaaaaaaaaaaattttttttttttggggccccgccccgctttttaaatttttgggggggtttccaaagaaaaaccctttttgtcccccccccccccaaaggggaaaattaaaaaggccccccgggcgggggtggacccccctttttgggttttggtggggcccccccggggggaaaaaaagtttttttttttttcca

SEQ ID NO: 633976 - DNA, 920 bp, Homo sapiens
  misc_feature (72)..(72): n is a, c, g, or t
  misc_feature (895)..(895): n is a, c, g, or t
cttgctctgtgcctcaggaggccctgagtccggcacctggccatgtgcaaccctgaggaggcagctctgctnggctggaggaggtcttctcagccaccctcgcccatgtcaacagccttgtcctccagcccctgctcccagccgccccagatccctcggatccctggggcagagagtgcctgcggctcttgcaacagctgcacaagagctcccagcaactctgggaggtgacggaggaaagcctgcactcactgcaggagaggctgcgttacccggactccaccggtctggagtccctgctgctgctgcgaggtgctgaccgtgtactgcaggcccacatagagtacattgagtcctacacaagctgcatggtggtgcaggccttccagaaggcagcaaagaggagaagcgagtactggcggggccagcggaaggcgctgcggcagctgctttcaggtgtgagctcagagggctcggtgggcgcatcgctgggccaggccctccaccagccactcgcccatcacgtgcaacagtacgtgctcctcctgctgagcctcggggacaccattggggagcatcacccaacccgggagctggtggtgaacgcagtcaccctctttgggaacctgcagtccttcatgaagcaggagttggaccaggctgtggccacacaggctctctggcacaccctgagaggccggctgagggatgtgctctgcacccctgctcacagactccttcaggacagccaggacgtacccgtgacggtcgcaccgttgcgggctgagcgtgtgctgctctttgatgatgccctcgtcctgctgcagggccacaatgtccacacctttgatctgaagctggtgtgggtggatctgggcaggacgggtgcacgttnacctctcacgcccgagaagagtctc

SEQ ID NO: 633977 - DNA, 337 bp, Homo sapiens
  misc_feature (4)..(4): n is a, c, g, or t
gtantattcctgaagctctatgccagatctatcaggcctgctttctcagctcacaacgccatcctttaggttgctggagcagttcccaccgtctccggccttggtggaaatggggggaggggagacagctggctgctgaaatggagcagctgttcggtttcactagctttgttactagaactttacgtgaggggaggataccttgtatatttccttatgcattttgagcccaaaatctaagagaaagttggggcacacaccctcatgtgaacgggctcatgggaagagcattactctatactttgcagagttttggattaatactagatgcttaagc

SEQ ID NO: 633978 - DNA, 347 bp, Homo sapiens
tcaagccccgagttgtccctagaatactctctgtaaccatatctttccttctccttccttggttttttcaaagggcccaagacctccacaaagctactacctgcatttgtttgtcaatgtgtctccatgtccctggagaactcacctgtgccctgtgtggtcagagaggaatctatttcttacatcctattggagcctcatttgaaatcaaacactaaaaaaaaaaaaaaaaagggagcactcaggccttggatatctttgggacacttcacaaaagaagatcccgggaccccataggatgcaggcaacacagagatgtgaggtgagagggggcacacattatggag

SEQ ID NO: 633979 - DNA, 391 bp, Homo sapiens
tgtggaaactaattgccaggttcgctgggagctttttcagctaggattctgtctcatcagtgatgatgaagttgatgatgttatgtataagaaatggtcttgagtttactctgcaccttcctaagtactttatacacatcaactcatttgtaaccacaactccatataccaaactattataatctcatgctcacaaatgaagaaactgaggattaaagatgttaaatatccttcccaagatcaaagaattgaaaagctggcatatgctggaactggaatttgatatttggccagactctggaacctgtgctcttattcactattagcttgtatatcagaactaatgaaatgtgtgtttggcaagaactaataaaaacaaaggcagtagaaa

SEQ ID NO: 633980 - DNA, 575 bp, Homo sapiens
  misc_feature (537)..(537): n is a, c, g, or t
  misc_feature (549)..(549): n is a, c, g, or t
agagacagggtcccattatgttgcccaggctggtctcaaactcctgagctcaggtgatcctcttgtctcagcctctcaaagtgctgggattgcaggtgtgagacactgtgcccagcccccaaaattaatttttaaaataaaattttcaatttgttctgaaatcctttaaaatgtaaccaactatgaaaatatttttatacaaaaaaaaatttaaaaatatttaaagacccactctttttcatgttatttttgttagtagcagctttagtgggggaaatgacaatatgtgtgtaaaggaaatctacatttgttctgtttcatctgctttgagttactttttaaaagtctgggaattggtggctggatgtagtggctcacgcctggtaatcccattgctttaggaggccagggtggggagaatcacttgagcccgggagtttgagggtgcagtgagctgtgtttgtgccactgcccttcagcctaggtgacagaataagaccctgtctcaaaaaaaaaaagtctggggaatggtttgcnccacctggctcngagacccaagatgagcaccagttatt

SEQ ID NO: 633981 - DNA, 393 bp, Homo sapiens
ccagtgggtccggcctcttgggccttccagttatgccccttagatggcccccgtccaaaaaaccgggggtccctttttagattgtgggtcttcagaaaaattttgcccttttcctttcccttcctgaaaggcaggggcggcttgttaaaaggtgtttaaccacctgcttaatgtgaaatgtccaccccccctttaaaccttccctggtcagagcctccgatgaagacttccttggggtttatagtggcctttttatttttggtaggccctttaaaaagggggttttaaagttgttgtattctgtttacgattgtctgcccctgtcccgcccgaaaaaccctgattgtttttgggaaggatcttttataaaactggaaaccgtttggcttggga

SEQ ID NO: 633982 - DNA, 323 bp, Homo sapiens
cggcacgagggtgagcgccagggtgagtgtggcagcctccccaacccccacctgtttgaaatggttttcaaatgccaaagccagattgcccgggtttcaaaagttgcaaacagttggagtaaaacacgtgtgcggccctccagccccaaaggaatccgcggagtccagggcactgaaagaaaaggagagaggataggggttcaggaagggttgggggggagttgccttctcccggcaggtcggttttaggacccatcgggaagcacgttggaatctctcccttcggggaggaggggaggggtgggccggccggcttgcggccg

SEQ ID NO: 633983 - DNA, 1930 bp, Homo sapiens
atgcgtggtgcctgtgtcctgctctcgcccgctctctgcccgctcgccagcctggctctcctccctgcctgcaggacccgctgctgccgcgctcggggtgccatgcagctgcctgtgccatggacctgcggatgttgtcccggtgagctctccctctacctggaacaccaagtccgggtggggttctatcggctcgggggtgggcttatcccttatcctgccgcttcagcagtcgcttatgccttactaatacctgagacagcattgccaagaaaccccagttagtgaccgggggtgagagtttcagcccgacttccttcaagaccacttgtcccgtggttccagacacgtactacccgacggttctggtgctgggcagggtcggaggacagaccctgctttagacctttcatcacttccgaaggcccacggtgccagtacaggactgcacctcattaacacctgcagcatggacggacagattacactggactgtcttgatcctgatcaacagtaccgtgataatatgagatgccagaaaccgagagccaactatcaaatggtgacagggactaacgggcacacacgcaaggagtacaaactctccatatgaaacaacataatagaaagctaggacaacgaagcgcaggctacaaacaacacaagactgggagcacgatcctgccgccgcacaatgtaggcatcacgacgaccacgaaccaacccatgacagcagaccagcacacgcacgtcagagaagaccaacaaccccgaggcatcgcgacaggactctgccactatctaaaaacgccgccctccagtacaccagccacaacgcatcacacacagtcaaagacaaatcacgccagacgaccgcgcatgagagaagagaaacgacaaacgcaaacagatcacacgcaggagccatgaatcaaacacgacacgagcaaggaccacacgactacgacatgaccagtatgcacacacacgccgatcaccacacacatcacagccaacaagccacaagacccacaacaacgaagaaggcgcgagcgcgacatgacaacgccgagacacggaggagagcgacggaagaagacagagggatgaggagggacagaccgatcgcgagagagtacacgacacccacgacgacggagcagcgccaggacgcaacaggtcacaagcagggcgggagagctaacatgagatgggaggagagctgaggaatgaagagagcgggaggcagagaggaatggaagaaacgaaggaggagcggacgggagagaggagagaacagaacgaggcacgagcaacctatacaatgcaaccacccgaataagccctaaacaacaatgacactctacaaacgagaacgcacactatcaatgaatagagacactaatatccactaaacaaatcctgcatgattccagacatacaagctagtcaaataatatataacacaaagataaacactacatcgaaatcacaaaaagatctcaaagacaaccacactaatctaaaaaacaatacaatccatacttaacaaacaacaataacagagacacaacagaccaccgacacacaaccatacaacgagatatcacgactaatcgacactaacatcatcataacaaactacacccacgacgaagacagcacatgacggtaatcatgcgacaatagagagccacatccaagaatgacaaatataaagacatagtactagcacatcacaacacaagacgaaagacacttagaaaacacaacagaacgataagaacgagagacaatcaatacaactacatagactagactatcaacacaagccaacaaagacgacttctactacacaaaacgaatcgcaatactaaatgcagcgaaagtatcgacagatagagactgaaagccatagagagaaactaat

SEQ ID NO: 633984 - DNA, 656 bp, Homo sapiens
  misc_feature (656)..(656): n is a, c, g, or t
tagagttaccagtcccttctctaaactgcagggttaagggcatgagggctggactcccaaggccttgggcaggtctgcacctgtgtctttgcagttttcagtccccacagctgccctcatgggctttgctggtgcagagtgcctgtagtctttacccacagagggtacaaagctcttggtgggtccatgaatctggggtctgcatgatggtggcctccagtgtggaggctccaaccccatattttccttctgcactgccctagtagaggtttcccaggaggctctgcttttttggcagctttctgtctggacatccaggcattttcatacatcttccaaaatctatatgaaggctctgaagcctctgggctagtgctctatggactcgctggcttaagactatgtggaagccgtgaagccttatagcttgtaccctctgaagcagtgatgcaatctgtacctgtgcatctttcagccaaggtcggagcaggagctgcggctgctgggatgcaggcagcagtatcctgaggctgcacacagcagcagggccatggggctggcccccggaaaccattcttctctcctaaggcccagggtctgtgacaccaagggctgctgcaaccatctctgaaatgcctccaaggctttttccccan

SEQ ID NO: 633985 - DNA, 440 bp, Homo sapiens
  misc_feature (298)..(298): n is a, c, g, or t
  misc_feature (400)..(400): n is a, c, g, or t
tgccatatccaattacaaataccctttgtagaattaaaatgacctactgtaaggattaagtactgttgtgtatccagaggagttgatccccaatacatggccacaaagaaaatactggtgagtatggtttgtaagtaaaaaaaattcagggcccgggccgcaagttgtcacgccctgcaatccccagcacccttgggaggccgaggcgggcggatcacgaggtcaggagatcgagacccatcctgggcaacacggcgaaaccccatctctactaaaaatacaaaaaattagccggggngttgctgggcgcctgtagtcccagctactcaggaggctgaggcaggagaatggcatgaacacgggaggcggagcttgcagtgagccgacatagcgccaactncgtccggcctaggtaagagatcccagactctgtctccaca

SEQ ID NO: 633986 - DNA, 548 bp, Homo sapiens
taatataaattagaagaaacaatctgggctgtgacaggcaattcacttgcgacaagctgtccaggtctaatcgacaggattccgattcctgaagagtgtcattcgaatcagaatgtcagagctgagtctgctgtcctgacttaaggaacaacttgactcagtctcttgatggctggagaatgcacatcctagctgtcactggggctacaggcaggtcagtgagcacgctaaaattttccgttctcaattacacttcaaatagcaggcatattactcgtataagatgctatctgatgatactaacctttctgctggtaccctcccactgctcctaaagccacaccttaatatacattctggtgctgtgtactaatgtagttccactgtcaagtcttaacattcttcaaaccagtgtctggggtagatagactatttgtttgacatggcacaatgttttgaattgggtgggaatctcttcccccagttagaataacagatttaaattacttgtgctactgaaatccatttgacgggaaaatgagatgtgc

SEQ ID NO: 633987 - DNA, 553 bp, Homo sapiens
  misc_feature (35)..(35): n is a, c, g, or t
  misc_feature (363)..(363): n is a, c, g, or t
  misc_feature (404)..(404): n is a, c, g, or t
  misc_feature (471)..(471): n is a, c, g, or t
  misc_feature (479)..(479): n is a, c, g, or t
  misc_feature (549)..(549): n is a, c, g, or t
ccattgccaacaagactcctcccagcacctgtagnacctgtgtcaggttttgacactgaactgggcgattactcctcagctggccccctaccaaacaatgagcccggctgtgtgcgccttccttccccactcactgaccggctcagccagtgtaggcttccagagggagtcatcttcagccagccccaagacagcagagcagaaaagcctggatttatgaagaggcagatatgggagccccggtgacacctaagaacagtctctgaagggttgttgtgtggtgggtggtgagcaaccactcccctttccacttaaaattagagtaagaggaaatgaacgggaaggacagtgggtaggattganagtaagccctgcggataaagggaaacggtagaaggctcttnaggggtggtggtgtgtgagttctccatataactaaggaagattttcacggggcggggggtttgcctngcacacancaggaacccgacttacatctgataaaaaaaaaaaaaaaaaaaaaaaaaaaaaaaagggataaaattaaanaaaa

SEQ ID NO: 633988 - DNA, 892 bp, Homo sapiens
atgcctggtaattttgggattttagtagagaccgggtttcaccctgttggccaggctgtctcgaacccctgacctctagtgatcttcccgcctggcctcccaaagtgctgggatataggtgtgagccacagtgcccagcctgtgttttggttggtcgtttggacagtctgtcacctctgtcacccaggctggagtgcagtggtgcgatctcacctcacttcagcctctgcctcccaggttcaagtgatttctcctgtctcagcctcctgagtagctggggattgcaggcgtgcccacacgcccagctattttgtaatttcattaaaagacagggtttcccccatgttggtgaggctggtctcgaactcctggctcaggtgatccacctgtttcagctcccaaagtgcaggcataacagggcatgagccatttgtgcctggcctcaagctatcttgaatgctggagaattaaatcctttctgtctaagcggtggcagtcctaagggctgggcaaaaacagtggatttatagacatagagtcttgctcagtagctccttgaattctgcacctgatgatcaggttctggccaacagttaactcagatggcagcccaagaaggaagtctgcagtgcttcttacatggcatcagccttgatcactcaggtcggctagccgtagtaatgacgggggtatcagccactaacatgcatgctcttaagggtggccctgaatcccgatacggcagtccacggcgccctggagcgtggcaaaaattgccggcgcgttcagggaagcgattgagcctaaaggaggtgcccctatataaagaagggggggggggcacacacaccgagaggcggcacacgggcacaaaaacaggggcggaatcgga

SEQ ID NO: 633989 - DNA, 708 bp, Homo sapiens
caacgacgatggatgcctttctctaatgtgcgcacagccaggccgctcctctgaaggcgctgagccgcctctaatcacagcgccacactggccacaggtcgctgggtataggatgaacccagctgtgaataggatgcatttcctgggaggtttctgtgaagttactgaactgccaaaaggtaagcagttttaattgatttgtgagtcttcaattaagcacagcagaatgctaattaaatattctctgttctttaaatagagaatgctttaaataattcagcacaatctttgcataaatcacaccattcagctgaggtgcctgtcagcagtcaagtgattgagagcacaaactgtcccaaagacacagcccccttccccctggagacgcgcacagcctgcagaagagatgtcacctgatgcagcgttgtggtttaaaaactcattatgggaagcatgaggctggacccaggggaccctggaggtgatgcaggggctttggcagcctggaagctgttggaggaggggcccttggtggaagtggggacagtttgagcctccggcctccaattccctcccgctggcttctgggccgcacctccaggaatccagctagacccgcagggctctgactccagactttattaaatgtttcctctaacggttctggccattctgctgggccattaaaggctaccccagggcctcaga

SEQ ID NO: 633990 - DNA, 205 bp, Homo sapiens
gatcccccgtctttaccctcgaccagcagcaccgcctgctggccgccacccactcggtcggcgtgcgcttcatctgcgcctgcctcccgacccggccaggcttgtcggctcggacaatctatgcctacccagctggcctgttctggcgcgctgctgccacgaattaggtaccgcgcccgacgcattgcgtgcccagcccagccag

SEQ ID NO: 633991 - DNA, 1135 bp, Homo sapiens
  misc_feature (937)..(937): n is a, c, g, or t
  misc_feature (1115)..(1115): n is a, c, g, or t
  misc_feature (1120)..(1121): n is a, c, g, or t
caacgacgatggatgcctttctctaatgtgcgcacagccaggccgctcctctgaaggcgctgagccgcctctaatcacagcgccacactggccacaggtcgctgggtataggatgaacccagctgtgaataggatgcatttcctgggaggtttctgtgaagttactgaactgccaaaaggtaagcagttttaattgatttgtgagtcttcaattaagcacagcagaatgctaattaaatattctctgttctttaaatagagaatgctttaaataattcagcacaatctttgcataaatcacaccattcagctgaggtgcctgtcagcagtcaagtgattgagagcacaaactgtcccaaagacacagcccccttccccctggagacgcgcacagcctgcagaagagatgtcacctgatgcagcgttgtggtttaaaaactcattatgggaagcatgaggctggacccaggggaccctggaggtgatgcaggggctttggcagcctggaagctgttggaggaggggcccttggtggaagtggggacagtttgagcctccggcctccaattccctcccgctggcttctgggccgcacctccaggaatccagctagacccgcagggctctgactccagactttattaaatgtttcctctaacggttctggccattctgctgggccattaaaggctaccccagggcctcagatatgagcgtggtgtctgtatgtggtcctttcatggagggcaggaagcatcataattacttttttttttaacggttttcaatttgtgttgacaaagagccttagtgaatctgttggaagaagagtgacttcaaaatgaacctgactccctgtatgttaggagtccatattctctgatacagttaacgttttccttccaacctcttcactgttcaagcaaagtggtatttnagctattcactgtttgacactttaataggagttttgatgagcaatttcaggatgtggaattgctacactgcaccaggttcctgcaggagcagcagcctcagcctgtggatgggacgtgagatcttggtgtttctcctggaggaaacgctgtgctgctgtgttgatgacggggcgtgtntgggnntgatgagtgggtga

SEQ ID NO: 633992 - DNA, 297 bp, Homo sapiens
caaaaaatttaaaaatggggaattagggggggagggggtccttaacaattgtcccccgggctcggggtttatgaaaaagtagaataaaaattccctcccccctttgggccggggtttatttaaagaatgccccagccccgttcaatgggcaaatttcccaactgttttttttttttttttttcattactggggtccaatttttttttcataaacctttttcaacccgctttttccaagtgggttgggttaattagggtcctccccttggttaataaaaaaaaggggttgtgctttta

SEQ ID NO: 633993 - DNA, 103 bp, Homo sapiens
ctgactagaggatcccggtcggctatctgtgctttctcgtgtacatcgcgccatcattggtatatggttagtgtgttgagttagtaggcctagtatagagtga

SEQ ID NO: 633994 - DNA, 336 bp, Homo sapiens
  misc_feature (1)..(1): n is a, c, g, or t
ngagagagtctctgtcgcccaggctggagtgcagtggcacaatctcggctcactgcaacctccacctctgggttcaagcagttctcctccctcagcctcccaagtagctgggattacaggtgtgcaccacccacacctggctaatttttgtatttttggtagagacggggtttcaccatgttggccaggctggcctgagactcctgacctcaggcgatccggccatctcgacctcccaaagtgctgggattacaggcgtgagccaccacacccagcctcctcaccaacttttgatattactagttttttacttttcagcccttctgtcgtcttctc

SEQ ID NO: 633995 - DNA, 666 bp, Homo sapiens
gtgtgtgccttaaagacaagacagcatatgtgtgttacaaatgtaactgtggttaaaatcgcggtagataatgaaaaaaaacaaaaaaaaaaaccttggggatgattcttaacatgaccaaatttaaaagtcaagctctcagagcttaattaccggcatcagcaagaaactggagtattttttggcaataagaaaacaacaataataaggggaaagctggggtttcattggggttcttaataattccaataatggtatgaggcaactattggcggcatccaaccatgagtgggaagggttggggaaagactggggggacctttcacttagaaaggtggaaatggtatgtagaagtctcaagtaccccttctacagttttactgggagaaaactaagagccatattcatgacaactggcacagtttggaggttggagactttggatatggggtaagtggcatagaggaggatattatcatgcaaatcaggagcaattatcacataaacttttttagaatgtggccatgaacatggctataaaattcacatggagtggcacagggcttaaaataaagctaagtatgtgtattcccaattgccatggcaaaaatggatgatatccatcgaaatgggagggagatctcccagaaggtgtctaatgaaagg

SEQ ID NO: 633996 - DNA, 863 bp, Homo sapiens
ggaggattacttgagaccaggagtttgagactaccatggacaacatagcaagaccccatctttacaaaaaatttaaaaattagccagacacctatagtaccagctacttaggagtctaacagtgggagaatgggcttgaccctgggaggttgaagcagcagtgagcttgtgatcatgccactgcttccagcctggtaacaagagtgagactgtctcaaaaaacaaaacaaaacaaaaaaatgggttttgggtgtgttggtcttttacttaggacacctgctctagaggctagataacaaatagatggtaatggccgggtgcggtggctcacaatttgtaatcccagcactgtggaggctgaggtgggcggactccacttgaggtcaggagtacgagaccagtctgggcaacatgttgaaaccccatctctactaaaaatacaaaaaattagtgtggcgtgttgatgcgcacctgtagttctagctacttggagcctgaggcaggagaatcactgcaactccgctcctggttccagatgattttcctgcctcgcctcctggggtgactgggactgcaggtgcccgccaccacgcctgactaattgtgaatttccagtagagacggggttcaccatctggggcaggtgggtctccgaactcttgactcgtaatcacccggctggcctccaaagtgcggattacgtgttgcccgggccagccaatattattcgaagaagactttaatcttatattggttacccctcacccgaggttatgggcaccatggcaaggcaattactcccaaaagggaaaaacggccgcgggatagcaacaaacctcaaaaggggccacccgtttccacaa

SEQ ID NO: 633997 - DNA, 115 bp, Homo sapiens
agaaagcgttcaagctcaacacccactacctaaaaaatcccaaaccatataactgaactcctcacacccatttggaccaatctatcaccgtttagaggacctattgtaggattag

SEQ ID NO: 633998 - DNA, 712 bp, Homo sapiens
  misc_feature (23)..(23): n is a, c, g, or t
  misc_feature (25)..(25): n is a, c, g, or t
ccgcccacgcgtccgcggacgcntnggcgccaccgaggtcgcacgcgtgagacttctccgccgcacgccgcccgatgcgctacgtcgcctcctacctgctggctgccctagggggcaactcctcccccagcgccaaggacatcaagaagatcttggacagcgtgggtatcgaggcggacgacgaccggctcaacaaggttatcagtgagctgaatggaaaaaacattgaagacgtcattgcccagggtattggcaagcttgccagtgtacctgctggtggggctgtagccgtctctgctgccccaggctctgcagcccctgctgctggttctgcccctgctgcagcagaggagaagaaagatgagaagaaggaggagtctgaagagtcagatgatgacatgggatttggcctttttgattaaattcctgctcccctgcaaataaagcctttttacacatctaaaaaaaaaaaaaaaaaagaaagaagaagaaaagaagaaaaagacgacgagaacaaaaacaaaaccaccacgagggagcacaaaatatgaggcggggggggaaaaaaaagggaggatatatagcggagaacgacggaacaacgacgggtcacacggcgccacaggttagtggacacgagggggagaaacggggggacccccaaaggggagacgagaaaaaagcaagaagagccgaggaaaccgcgtagaag

SEQ ID NO: 633999 - DNA, 200 bp, Homo sapiens
  misc_feature (96)..(96): n is a, c, g, or t
ccatatccattagcagccatttcccattaactctccttggccccttcttttttttttttgcaaccactaatttgctttctatctctatggatttgnctattctggatgtttcagataaatggaatcatgtaacatgtggacttttgtaacttgcttttttcacttagtgtgtgtgtgtgtttctttttgagactgagtct

SEQ ID NO: 634000 - DNA, 474 bp, Homo sapiens
  misc_feature (282)..(282): n is a, c, g, or t
  misc_feature (397)..(397): n is a, c, g, or t
  misc_feature (436)..(436): n is a, c, g, or t
gtatggcaactgatcatctttgtggagtcgggaaatctatttttatcacctttattcagccagctcctgattgtgattctctcactgagctacagccgttttcttcatggtgctgaatagaccaaatgtctcaggagtctgaaacttctctcctgccactcccagagtggctgattcagcagtcccgggagaaggggtttgtcctgtgctgcgcgggtgggttccgcacaaggtgaaggtcaaataaaaccgagaggctgcaagtgtcagcagccagccttngactcaggaatcctgcctgagggtatgtgccactctgctctcctgctctctcttgtaaggtgacttagaagggtgacttgggcagcccataactcctccaatttgggaagacctncccaagggaagaagggggaaagattaagccaccctcctnacaggttgccaatacatctcctcaatcttaatcatcgg

SEQ ID NO: 634001 - DNA, 262 bp, Homo sapiens
gggggcgacaaccttaccagcggtggggatagctggttttccaaaataaattcttggttcactttttaattttgcccccagaacacctttaaaaccctttggaaaataaaacggtgggccccaaaggggaaacctttttttgtgacctttgggaaaaaaccttgttggggggggggggaaaattttttccccccttgtgggggcgttataaacgcccccccatttaaaaaaggggggtgtggttttcacccccccttttttt

SEQ ID NO: 634002 - DNA, 1630 bp, Homo sapiens
  misc_feature (708)..(708): n is a, c, g, or t
  misc_feature (1322)..(1322): n is a, c, g, or t
  misc_feature (1421)..(1421): n is a, c, g, or t
  misc_feature (1423)..(1424): n is a, c, g, or t
  misc_feature (1431)..(1431): n is a, c, g, or t
  misc_feature (1436)..(1436): n is a, c, g, or t
  misc_feature (1439)..(1439): n is a, c, g, or t
  misc_feature (1443)..(1443): n is a, c, g, or t
  misc_feature (1445)..(1445): n is a, c, g, or t
  misc_feature (1496)..(1496): n is a, c, g, or t
  misc_feature (1502)..(1502): n is a, c, g, or t
  misc_feature (1508)..(1508): n is a, c, g, or t
  misc_feature (1523)..(1523): n is a, c, g, or t
  misc_feature (1532)..(1532): n is a, c, g, or t
  misc_feature (1536)..(1537): n is a, c, g, or t
  misc_feature (1553)..(1553): n is a, c, g, or t
  misc_feature (1575)..(1575): n is a, c, g, or t
ccaacctgttccctcccaggacccgagaatgtagcggggtccctgaggtgctgatgtccacatggacaccgaggtcagttccgggccaaagcggccagcgcaggggctgaccactcagacctcactcctcgcaggggtgagcgggcgacgctgcctcacgtcattgtcctgccctccaaggcccgcgctcgtcctctgacaggatgccctgacaccgcagtgcgggggcggcctcccagatagggccgcagtcgctaagtccgaggcggctggctcacctcactgagcccggctggacgtgggaccaccggtcgccgcggccagggaaccaccaaggagtcaaggcgagcctaccgccagcagcttctgcccgggcccacgcgccgttccgggtaggcccgcggcgcaggccacttccggcagcggtgcaccatgggacttgcagttcgctggcaaaggttgagtcccgggcgtggcggccgcgctccatgttgggagctgtaggcgccgcgtggcatgctgggggtgctaggtaccgaaggcagatgccgtccctttggactcgcttcgtccaacgcccccacgagtttcggtggcccttcgccccacgctataagagcagtcacttccggaactgctgcccttcgcctttgccgcgaaaagtgcctgacgggggctgggaagggggagggggaaggagtcaacgantccctccccgtcgtcattggctgagcgcctcgtgacgtcactctgaggcgcctcatgcggcgccgcgcacgggtcccagagccttctgggtagcggtttaaccccgcctcttgcgtcggcgccttccttttcctccctgtcgccaccgaggtcgcacgcgtgagacttctccgccgcctccgccgcagacgccgccgcgatgcgctacgtcgcctcctacctgctggctgccctagggggcaactcctcccccagcgccaaggacatcaagaagatcttggacagcgtgggtatcgaggcggacgacgaccggctcaacaaggttatcagtgagctgaatggaaaaaacattgaagacgtcattgcccagggtattggcaagcttgccagtgtacctgctggtggggctgtagccgtctctgctgccccaggctctgcagcccctgctgctggttctgcccctgctgcagcagaggagaagaaagatgagaagaaggaggagtctgaagagtcagatgatgacatgggatttggcctttttgattaaattcctgctcccctgcaaataaagcctttttacacaaaaaaaaaaaaaaaaaatctcgagactagtnctcggggggtggagaagccatgagcagcaaagtctctcgggaacctggtacgagggggggcggggaagtcctggcgggggaaccagcgcaagcggccgnanngtcccgnggganacngggngnagtggcagatcagtggaagaattatgatccccagaggacaaggcgcttccnggggcnccgccnggctaaagtccactnccccgcccnaagnnctctgggtgtggtcgngggggacccagcagcctgtgancgaggcaaggcggggaatccccaatggactcgagggcgaaaaccacaagaatccg

SEQ ID NO: 634003 - DNA, 387 bp, Homo sapiens
tgggggaccggggtttttttacccccggggggggggggcaaaaaaaaattcccaaaaaaagggggcaaatccccccccccattttttttaaaaggggccacaaaaaaaaaggttttttttaaaaaaattttgggggccccaaaaacaaaaaggggggggaaaaatttaaaaaaaaaacccccggggaaaaaaaaaattaaaacccccctgaacgggggggggtttttttaaggggggggaaattaaaagtttttttccggggccactgggggagaaaaatggttcctcacagggggccaaaggggggggaaaaaaaaaaaacccccttttccgggggggtatcacccccccgggagaccgggggctataaaagggggccccccccca

SEQ ID NO: 634004 - DNA, 134 bp, Homo sapiens
gctcataaggggatggacaatggctaggtttatagatagttgggtggttggtgcaaatgagtgaggcaggagtggaagtgaaatcacatggctaggccggaggtcattacgagggctgagagggcccctgttag

SEQ ID NO: 634005 - DNA, 1542 bp, Homo sapiens
  misc_feature (708)..(708): n is a, c, g, or t
  misc_feature (1294)..(1294): n is a, c, g, or t
ccaacctgttccctcccaggacccgagaatgtagcggggtccctgaggtgctgatgtccacatggacaccgaggtcagttccgggccaaagcggccagcgcaggggctgaccactcagacctcactcctcgcaggggtgagcgggcgacgctgcctcacgtcattgtcctgccctccaaggcccgcgctcgtcctctgacaggatgccctgacaccgcagtgcgggggcggcctcccagatagggccgcagtcgctaagtccgaggcggctggctcacctcactgagcccggctggacgtgggaccaccggtcgccgcggccagggaaccaccaaggagtcaaggcgagcctaccgccagcagcttctgcccgggcccacgcgccgttccgggtaggcccgcggcgcaggccacttccggcagcggtgcaccatgggacttgcagttcgctggcaaaggttgagtcccgggcgtggcggccgcgctccatgttgggagctgtaggcgccgcgtggcatgctgggggtgctaggtaccgaaggcagatgccgtccctttggactcgcttcgtccaacgcccccacgagtttcggtggcccttcgccccacgctataagagcagtcacttccggaactgctgcccttcgcctttgccgcgaaaagtgcctgacgggggctgggaagggggagggggaaggagtcaacgantccctccccgtcgtcattggctgagcgcctcgtgacgtcactctgaggcgcctcatgcggcgccgcgcacgggtcccagagccttctgggtagcggtttaaccccgcctcttgcgtcggcgccttccttttcctccctgtcgccaccgaggtcgcacgcgtgagacttctccgccgcctccgccgcagacgccgccgcgatgcgctacgtcgcctcctacctgctggctgccctagggggcaactcctcccccagcgccaaggacatcaagaagatcttggacagcgtgggtatcgaggcggacgacgaccggctcaacaaggttatcagtgagctgaatggaaaaaacattgaagacgtcattgcccagggtattggcaagcttgccagtgtacctgctggtggggctgtagccgtctctgctgccccaggctctgcagcccctgctgctggttctgcccctgctgcagcagaggagaagaaagatgagaagaaggaggagtctgaagagtcagatgatgacatgggatttggcctttttgattaaattcctgctcccctgcaaataaagcctttttacacatcnacagatcatgaaaaacgcatagacacaacaagaagatatgactcgacgggatgaaaggccaataggaggtagacgagaaggccacaacgggagcaactacagctgacattgtagtgtagggacaagcagaataccaggagcatggtggaggacaatggtctagccaatgaaccacaaggagatgtagacaacgggggatcgagctccccaggggggggagaatagacccaaggagggagcctctgtgg

SEQ ID NO: 634006 - DNA, 185 bp, Homo sapiens
ggacttggacagaaataagatgaaagacatcccaaagaggccttctctcagtgtttatctacattatttctcctctgtttgcagagttgaaggagaagagccaggcgtgcggagggaacttggggtcattgaagagctgcgaggcactactagcgagagcgtgcctgcattcgacacatgtgcag

SEQ ID NO: 634007 - DNA, 900 bp, Homo sapiens
  misc_feature (19)..(19): n is a, c, g, or t
  misc_feature (85)..(86): n is a, c, g, or t
  misc_feature (94)..(94): n is a, c, g, or t
  misc_feature (103)..(103): n is a, c, g, or t
  misc_feature (106)..(106): n is a, c, g, or t
  misc_feature (114)..(114): n is a, c, g, or t
  misc_feature (119)..(119): n is a, c, g, or t
  misc_feature (123)..(123): n is a, c, g, or t
  misc_feature (125)..(126): n is a, c, g, or t
  misc_feature (145)..(146): n is a, c, g, or t
  misc_feature (150)..(150): n is a, c, g, or t
  misc_feature (179)..(179): n is a, c, g, or t
  misc_feature (185)..(185): n is a, c, g, or t
  misc_feature (211)..(211): n is a, c, g, or t
  misc_feature (283)..(283): n is a, c, g, or t
  misc_feature (289)..(289): n is a, c, g, or t
  misc_feature (299)..(299): n is a, c, g, or t
  misc_feature (308)..(308): n is a, c, g, or t
  misc_feature (311)..(311): n is a, c, g, or t
  misc_feature (316)..(317): n is a, c, g, or t
  misc_feature (339)..(339): n is a, c, g, or t
  misc_feature (345)..(345): n is a, c, g, or t
  misc_feature (348)..(348): n is a, c, g, or t
  misc_feature (354)..(354): n is a, c, g, or t
  misc_feature (356)..(357): n is a, c, g, or t
  misc_feature (369)..(369): n is a, c, g, or t
  misc_feature (374)..(374): n is a, c, g, or t
  misc_feature (377)..(377): n is a, c, g, or t
  misc_feature (421)..(421): n is a, c, g, or t
  misc_feature (427)..(427): n is a, c, g, or t
  misc_feature (434)..(434): n is a, c, g, or t
  misc_feature (459)..(459): n is a, c, g, or t
  misc_feature (464)..(464): n is a, c, g, or t
  misc_feature (548)..(548): n is a, c, g, or t
  misc_feature (584)..(584): n is a, c, g, or t
  misc_feature (601)..(601): n is a, c, g, or t
  misc_feature (631)..(631): n is a, c, g, or t
  misc_feature (649)..(649): n is a, c, g, or t
  misc_feature (761)..(761): n is a, c, g, or t
  misc_feature (811)..(811): n is a, c, g, or t
  misc_feature (818)..(818): n is a, c, g, or t
  misc_feature (830)..(830): n is a, c, g, or t
  misc_feature (896)..(896): n is a, c, g, or t
aactcctgtgacataaaangtggaaagtgaggcaatccatcttttcggcaataaatcttctcttcttataataatgccatcttcnnggaaagtncagataatnccnggccaggnacggnggcncnngtctgtgatcatagcactnngggnggctgaggtaggagaattgcttgaacctnggaggnggaggttgcagtaagctgagatagtnccactggattccagcctgggtgacagatttagattctgtctcaaaaaaaaaaaaaaaaaaaaaaaagtccanaaaatnccttgaaaanaaggttttnaanaaatnncaaatatgtaaaaggtttttanccaccnccnccccancnncccaatgcattnttgcntancaacagtttttttctgcttcttctttgtgggaagtctgagagtntgaaanctgcatnggcttggttgagcttgggaattttnctggnaccaggggggcaaatatccattgtagaagtcagtggcggtaagtgattccttgagcatcactgaccgaacaccaatccaaccanccttgcaataaaccaatagtatttgtgactgtttgngggaaattactgacccnggaataagagcctgtcccgttaattttggntcagcaaggactgaactnttaacttctaccaaatccagaagtttaatggtattcgccatccagagcgtctgcaacggaattatatttccaatggcacggtaaagtctgaatatttgttctgaagtttgtncctcccattttatacaactggtaccagcagaaatcttaggggcgtaagtngcccccnccattggctgcngccttccattgctcagactttcaggcaaatttttcaaaactgaaatgagcatgtgggcacccagtnttga

SEQ ID NO: 634008 - DNA, 2030 bp, Homo sapiens
  misc_feature (708)..(708): n is a, c, g, or t
ccaacctgttccctcccaggacccgagaatgtagcggggtccctgaggtgctgatgtccacatggacaccgaggtcagttccgggccaaagcggccagcgcaggggctgaccactcagacctcactcctcgcaggggtgagcgggcgacgctgcctcacgtcattgtcctgccctccaaggcccgcgctcgtcctctgacaggatgccctgacaccgcagtgcgggggcggcctcccagatagggccgcagtcgctaagtccgaggcggctggctcacctcactgagcccggctggacgtgggaccaccggtcgccgcggccagggaaccaccaaggagtcaaggcgagcctaccgccagcagcttctgcccgggcccacgcgccgttccgggtaggcccgcggcgcaggccacttccggcagcggtgcaccatgggacttgcagttcgctggcaaaggttgagtcccgggcgtggcggccgcgctccatgttgggagctgtaggcgccgcgtggcatgctgggggtgctaggtaccgaaggcagatgccgtccctttggactcgcttcgtccaacgcccccacgagtttcggtggcccttcgccccacgctataagagcagtcacttccggaactgctgcccttcgcctttgccgcgaaaagtgcctgacgggggctgggaagggggagggggaaggagtcaacgantccctccccgtcgtcattggctgagcgcctcgtgacgtcactctgaggcgcctcatgcggcgccgcgcacgggtcccagagccttctgggtagcggtttaaccccgcctcttgcgtcggcgccttccttttcctccctgtcgccaccgaggtcgcacgcgtgagacttctccgccgcctccgccgcagacgccgccgcgatgcgctacgtcgcctcctacctgctggctgccctagggggcaactcctcccccagcgccaaggacatcaagaagatcttggacagcgtgggtatcgaggcggacgacgaccggctcaacaaggttatcagtgagctgaatggaaaaaacattgaagacgtcattgcccagggtattggcaagcttgccagtgtacctgctggtggggctgtagccgtctctgctgccccaggctctgcagcccctgctgctggttctgcccctgctgcagcagaggagaagaaagatgagaagaaggaggagtctgaagagtcagatgatgacatgggatttggcctttttgattaaattcctgctcccctgcaaataaagcctttttacacatcaaaaaaaaaaaaaaaaaaaaaaaaaaaaaaaaaataaataacaacaaaaaaaaacaaagagagggcgcgcgccgcgcctctctaaaagatattatcctccgcgaggaggcgcccccactatcatttagacgcgcaatcaccgcgccgatttttctgttggactcacaaggaggtggcgccccctattatatgggaggaaggctcttattatataacagcgcagagaccgaccgcggggacgcgctcgttttttataacaccaagctcgctctgagagactgtgcggacacaaacagacttctcgacaaacggctggagcgaacactactttgcggagaaagaagacacaccacttctcgctctctgggggggggagggagcagagacaccaatatgtgtgcgtgagagaaacgcacctcccaaagagacagagagatttatatagcaggcggcctctacgggcgggagagacatctttctacaaacacgttctgatacaagctgcgtgtgtatatagacgggtgtgtgtgtacacacacaatcacgcgggggcgagaatctatgatcggcctggttggcgggctgttgatgacaagaaaccacctctgctcgtactcaacccgcgcgcgggtctaacctgagtgatgtctggccgggagacaacagttatggttatcacacacgccggaggtggcgaccgtccccattgtgcaatcgagacaagatggatggataat

SEQ ID NO: 634009 - DNA, 986 bp, Homo sapiens
aggccagaatgtagtggctcatgcctgtggtccgagcggctttgggaggccaaggcgggcggatcacgaggtcaggagatcgagaccatcctggctaacacggtgaaaccccgtctctactaaaaatacaaaaaattggccgggcatggtggcgggcgcctgtagttccagctgactgggcggctgaggcaggagaatggcgtgggcctgggaggtggagcttgcagtgagccgagatatcgccactgcactccagcctgggtgacagagcgagactccatctcaaaaaaaaaaaaaaaaaaagaatttttggccggaagaatagagaggaggcttgaaggaaccagcaatgaaaaggccggaaaagaaagagctgaaaatggagaaagcccaagagttgaccacgtgggatacgggaaaagaaccgggggctccacttacagacccagccccaggttcaatgtcctccgaaggaatgaagtctttccctggtgatggtccccgtgccctgtcttccagcatccactctccctttgtcctcgtgggggcatatctccagtcaggcaggggctcctgatgatggcagggggtgttgccatgtgatgggtcccctccaggttctaagggtgcatgtccctgtttgaacctgaggccggtgttggcatggcaggtcgccagatgaggagcggtgtcctgagaaacaaatttccgagagtttttagacccacccatgaaaaagggccgtcggtccttaccggatggtaccggtcgaaattcgcttgaaagcgttaccttggcgaggcacatcttaaggtttgtgcgcagatgcctgtgtagcccaatccttcttaaagaaaaggggctaaataccagggcgcacgtaccctttaaggcgaataagttataacggcggcacatcggagaggggttgcgccctgtgggaccacccaattattattcgcggcttagtaccaggtgaatactgc

SEQ ID NO: 634010 - DNA, 2026 bp, Homo sapiens
  misc_feature (708)..(708): n is a, c, g, or t
ccaacctgttccctcccaggacccgagaatgtagcggggtccctgaggtgctgatgtccacatggacaccgaggtcagttccgggccaaagcggccagcgcaggggctgaccactcagacctcactcctcgcaggggtgagcgggcgacgctgcctcacgtcattgtcctgccctccaaggcccgcgctcgtcctctgacaggatgccctgacaccgcagtgcgggggcggcctcccagatagggccgcagtcgctaagtccgaggcggctggctcacctcactgagcccggctggacgtgggaccaccggtcgccgcggccagggaaccaccaaggagtcaaggcgagcctaccgccagcagcttctgcccgggcccacgcgccgttccgggtaggcccgcggcgcaggccacttccggcagcggtgcaccatgggacttgcagttcgctggcaaaggttgagtcccgggcgtggcggccgcgctccatgttgggagctgtaggcgccgcgtggcatgctgggggtgctaggtaccgaaggcagatgccgtccctttggactcgcttcgtccaacgcccccacgagtttcggtggcccttcgccccacgctataagagcagtcacttccggaactgctgcccttcgcctttgccgcgaaaagtgcctgacgggggctgggaagggggagggggaaggagtcaacgantccctccccgtcgtcattggctgagcgcctcgtgacgtcactctgaggcgcctcatgcggcgccgcgcacgggtcccagagccttctgggtagcggtttaaccccgcctcttgcgtcggcgccttccttttcctccctgtcgccaccgaggtcgcacgcgtgagacttctccgccgcctccgccgcagacgccgccgcgatgcgctacgtcgcctcctacctgctggctgccctagggggcaactcctcccccagcgccaaggacatcaagaagatcttggacagcgtgggtatcgaggcggacgacgaccggctcaacaaggttatcagtgagctgaatggaaaaaacattgaagacgtcattgcccagggtattggcaagcttgccagtgtacctgctggtggggctgtagccgtctctgctgccccaggctctgcagcccctgctgctggttctgcccctgctgcagcagaggagaagaaagatgagaagaaggaggagtctgaagagtcagatgatgacatgggatttggcctttttgattaaattcctgctcccctgcaaataaagcctttttacacaaaaaaaaaaaaaaaaaaaaaaaaaaaaaaaaaaaaaaaaaaaaaaaaaaaagagaggggcggcgggcgcgcgcgtcccacaaaatattcttctcccctcgggggggcgccccagtttttcgcgcgcgcgtcccccacggtttttttgtgtgtgacaaagagggggggcgctccccatatatgggagaggagccgcattatattatatacgggcacagaggcaggcgcgggccgcgcgctgcatttatacaacaaccgccgctctgcaggaagtccgggaacaacagggcgcgcccacacgcttggggagcaaactctcttgctggaagcgaagaggggcaccctccctacttactctgtgcggggggggcggcgggcgaacactatatgtggcggacacacaacacactcactcccctatacgcgagaaagtatatttttataaagcgcgccatcctactggaggaggggggacatcatctatataataacacattcttgtacagagcggcgcgtgcttagactggcgggggcgtgtcctatccaacccaagcagcgcgcgccgcatatatatgtgccgtgcgggccgcgctgctgtgatgaagaacaaatgtttgtgtgccgcctacctaacgcggcgagcgaactgtatgttgatctcttctgtggcgtacaacgaccactttttttttttatatcactcgcgcggaggcgcccgggtgtgcaaatcagcacc

SEQ ID NO: 634011 - DNA, 789 bp, Homo sapiens
atggcacatgcagcgcaagtaggtctacaagacgctacttcccctatcatagaagagcgttatcaccgtttcagtgaatcacgcccgtcataatcatttgccttatcgtggcgttccgtaggtccatggtatgcccgtttgtccgtaagcactcacaagcgaaaacgtaactaagtacgtaaacatcgtcagacgctcagggaaatagaaaccgtctgaactagtccgtgcccggccagtcatccatagatccgtcatcgacgccatcccaatcccctacggcagtccgtttagcataagcaggagcgaaggatccaacggaatcccgtccacgttacgcagtacaagaatcaagtagggacaaccaacatgggtcacatgaaaaccgtaacggagataccagccgcacctcacgcggcgggcacttaaatgccttcgaaacctccgtacgcatacgtgtccacgcccagttacttacctaggagaccccagggcggaaccctggcgaaacagacccatgtgcaacgattgaagcaaaactccgcacggaacagggctaccatcacccacggaaatatgggcaaagtcacccacgcaaatgtccccgcggagtctaaagtagaagtgtaaccagaatgccccacctaaacgcaaccgacgccactcgggcaaccgcccagactggcaagccctaggtgacaccgccaacgaacttgtagcagggccccatgacgacgccagacacaggggacggacgccacatgtacacccagcgaaccaagatccgca

SEQ ID NO: 634012 - DNA, 435 bp, Homo sapiens
taagtgatacttcaactccttactgatacttcacatcaacacgtgcttcaaacttaatctgcacaaagtaatcagctggcgttctatatttgactgcgggctctgatttggataggtcttgactgggacaagcctggtcgggatttctactaaactcttaggtgatgctcaagcacactgtccatgaatcatattttgagtagcaaagttatattttattttgttttatttatttattttttgagacagagtctcactctattgcccaggctgcagtgaagtggcctgatcttggctcactgcaactctgcctcctgggttcacgtgattctcctgcctcagcctcctgagtagctgggattacctgcatgtacaaccatgcctggctaattcttttgtctctctagtagcgatggggttttgccatttggccag

SEQ ID NO: 634013 - DNA, 1428 bp, Homo sapiens
  misc_feature (708)..(708): n is a, c, g, or t
ccaacctgttccctcccaggacccgagaatgtagcggggtccctgaggtgctgatgtccacatggacaccgaggtcagttccgggccaaagcggccagcgcaggggctgaccactcagacctcactcctcgcaggggtgagcgggcgacgctgcctcacgtcattgtcctgccctccaaggcccgcgctcgtcctctgacaggatgccctgacaccgcagtgcgggggcggcctcccagatagggccgcagtcgctaagtccgaggcggctggctcacctcactgagcccggctggacgtgggaccaccggtcgccgcggccagggaaccaccaaggagtcaaggcgagcctaccgccagcagcttctgcccgggcccacgcgccgttccgggtaggcccgcggcgcaggccacttccggcagcggtgcaccatgggacttgcagttcgctggcaaaggttgagtcccgggcgtggcggccgcgctccatgttgggagctgtaggcgccgcgtggcatgctgggggtgctaggtaccgaaggcagatgccgtccctttggactcgcttcgtccaacgcccccacgagtttcggtggcccttcgccccacgctataagagcagtcacttccggaactgctgcccttcgcctttgccgcgaaaagtgcctgacgggggctgggaagggggagggggaaggagtcaacgantccctccccgtcgtcattggctgagcgcctcgtgacgtcactctgaggcgcctcatgcggcgccgcgcacgggtcccagagccttctgggtagcggtttaaccccgcctcttgcgtcggcgccttccttttcctccctgtcgccaccgaggtcgcacgcgtgagacttctccgccgcctccgccgcagacgccgccgcgatgcgctacgtcgcctcctacctgctggctgccctagggggcaactcctcccccagcgccaaggacatcaagaagatcttggacagcgtgggtatcgaggcggacgacgaccggctcaacaaggttatcagtgagctgaatggaaaaaacattgaagacgtcattgcccagggtattggcaagcttgccagtgtacctgctggtggggctgtagccgtctctgctgccccaggctctgcagcccctgctgctggttctgcccctgctgcagcagaggagaagaaagatgagaagaaggaggagtctgaagagtcagatgatgacatgggatttggcctttttgattaaattcctgctcccctgcaaataaagcctttttacacatcaaaaaaacgcaaacgccccacaacaccccggggcctttttttccgggggcgggacaaacggggttccaaggggcccatgtggccaggttcccggccccacttttttgttcccccgggggaaaccgcggggtcccc

SEQ ID NO: 634014 - DNA, 1622 bp, Homo sapiens
  misc_feature (708)..(708): n is a, c, g, or t
ccaacctgttccctcccaggacccgagaatgtagcggggtccctgaggtgctgatgtccacatggacaccgaggtcagttccgggccaaagcggccagcgcaggggctgaccactcagacctcactcctcgcaggggtgagcgggcgacgctgcctcacgtcattgtcctgccctccaaggcccgcgctcgtcctctgacaggatgccctgacaccgcagtgcgggggcggcctcccagatagggccgcagtcgctaagtccgaggcggctggctcacctcactgagcccggctggacgtgggaccaccggtcgccgcggccagggaaccaccaaggagtcaaggcgagcctaccgccagcagcttctgcccgggcccacgcgccgttccgggtaggcccgcggcgcaggccacttccggcagcggtgcaccatgggacttgcagttcgctggcaaaggttgagtcccgggcgtggcggccgcgctccatgttgggagctgtaggcgccgcgtggcatgctgggggtgctaggtaccgaaggcagatgccgtccctttggactcgcttcgtccaacgcccccacgagtttcggtggcccttcgccccacgctataagagcagtcacttccggaactgctgcccttcgcctttgccgcgaaaagtgcctgacgggggctgggaagggggagggggaaggagtcaacgantccctccccgtcgtcattggctgagcgcctcgtgacgtcactctgaggcgcctcatgcggcgccgcgcacgggtcccagagccttctgggtagcggtttaaccccgcctcttgcgtcggcgccttccttttcctccctgtcgccaccgaggtcgcacgcgtgagacttctccgccgcctccgccgcagacgccgccgcgatgcgctacgtcgcctcctacctgctggctgccctagggggcaactcctcccccagcgccaaggacatcaagaagatcttggacagcgtgggtatcgaggcggacgacgaccggctcaacaaggttatcagtgagctgaatggaaaaaacattgaagacgtcattgcccagggtattggcaagcttgccagtgtacctgctggtggggctgtagccgtctctgctgccccaggctctgcagcccctgctgctggttctgcccctgctgcagcagaggagaagaaagatgagaagaaggaggagtctgaagagtcagatgatgacatgggatttggcctttttgattaaattcctgctcccctgcaaataaagcctttttacacatctaaaaaaaaaaaaaaaaaaaaaaaaaaaaaaaaaaaaaaaaaaaaaaaaaaaaaagagaggggggggcgcgcgcccaagagagagttctccccgcggggggcgccccggatttagcagcggcatcaccccagatttggtgggaacacaaggaggcccccaaaaggggaggacagccctatatataaagaccagaggagaggggcgcgcagagtaaacacacagctcggagacggggaaacacacggggcacacgcaggaccaccctggggagagaagcgccccttcagcccgcgggggggcggccacatcaggggacaacatacccaga

SEQ ID NO: 634015 - DNA, 1944 bp, Homo sapiens
  misc_feature (708)..(708): n is a, c, g, or t
ccaacctgttccctcccaggacccgagaatgtagcggggtccctgaggtgctgatgtccacatggacaccgaggtcagttccgggccaaagcggccagcgcaggggctgaccactcagacctcactcctcgcaggggtgagcgggcgacgctgcctcacgtcattgtcctgccctccaaggcccgcgctcgtcctctgacaggatgccctgacaccgcagtgcgggggcggcctcccagatagggccgcagtcgctaagtccgaggcggctggctcacctcactgagcccggctggacgtgggaccaccggtcgccgcggccagggaaccaccaaggagtcaaggcgagcctaccgccagcagcttctgcccgggcccacgcgccgttccgggtaggcccgcggcgcaggccacttccggcagcggtgcaccatgggacttgcagttcgctggcaaaggttgagtcccgggcgtggcggccgcgctccatgttgggagctgtaggcgccgcgtggcatgctgggggtgctaggtaccgaaggcagatgccgtccctttggactcgcttcgtccaacgcccccacgagtttcggtggcccttcgccccacgctataagagcagtcacttccggaactgctgcccttcgcctttgccgcgaaaagtgcctgacgggggctgggaagggggagggggaaggagtcaacgantccctccccgtcgtcattggctgagcgcctcgtgacgtcactctgaggcgcctcatgcggcgccgcgcacgggtcccagagccttctgggtagcggtttaaccccgcctcttgcgtcggcgccttccttttcctccctgtcgccaccgaggtcgcacgcgtgagacttctccgccgcctccgccgcagacgccgccgcgatgcgctacgtcgcctcctacctgctggctgccctagggggcaactcctcccccagcgccaaggacatcaagaagatcttggacagcgtgggtatcgaggcggacgacgaccggctcaacaaggttatcagtgagctgaatggaaaaaacattgaagacgtcattgcccagggtattggcaagcttgccagtgtacctgctggtggggctgtagccgtctctgctgccccaggctctgcagcccctgctgctggttctgcccctgctgcagcagaggagaagaaagatgagaagaaggaggagtctgaagagtcagatgatgacatgggattcggactttatgattaaactgctgctgccctggaggtagggctttgtccgcatcggaaaaaaccgtgtgctggtctacctgtcctcaccggcggacctgtgcggacgcttacctttgttgcggactgctcagtgatgccttcctggctgcctcggtgcgctacttttactaccccgatccatctactcctcaaattcccccgtttccctccctgtgcgccgtcttccatccgcccccccgactccctcgctttcgtttcccgcgcacgatgtgtttttcaccctctttcccccttccgcacccccgtgtcaatcgcatttcgcatgtttttgtagcccccgtaatcccattatccctccccctcccgtttcccccattctccccctcgtccctcattttttgtctgccttgattcgcccctcatacgccttccttccccatttgcccaacccaaaatccctttctccctccccattattcattggcgaccaccggcgcactattcatgcctcgtgcttcagcgctccccccttccaacaatatcatgtggtaaccgcttatcgaagtgggtaaatacgcatttcccctattcttcgtcgtccccccccccccgtcccaaatccccctccttcatatcttccaccgctcgtcataccccgcggtaagacatttttctaccaatactgtctttttactttcttacttt

SEQ ID NO: 634016 - DNA, 306 bp, Homo sapiens
taccccttgccccgatagtgagtgattttcttaagaatagctttactacaaataaacgctgtctaaatagaagtgcatttgtgaagcactatgggtggtatatgtttgccacagactcttgttaccttgcaggtaagataacacatgttaccaaattcggcattcattttcagttgctgctggtatcatgtgttttaagaaatgtgtactgtatgaaaaacttgaaaatactcatgaatgaaaaatgtcttaggaaaaaaatagctattttcatgcaattatgtacagtctcactgtggcggaggg

SEQ ID NO: 634017 - DNA, 294 bp, Homo sapiens
atgagccgcgtaccggcatgtgctgtaagcagcgaaatatagagatcagttgctaaggggccgaccatctatgagaacaaagaatgcaaaacctcgtgaaagagacatttccttttatccttcccttttcttccttactaaaattctgatgcagtgttcagagatacaacagccatcttctgaccatgaagacaaaaaccttaagctaggaagaaaggaggatactggttcctggatgaaatccttgagcagctgcatcagctttggattgtctccgctggcctacagcacatg

SEQ ID NO: 634018 - DNA, 1576 bp, Homo sapiens
  misc_feature (708)..(708): n is a, c, g, or t
  misc_feature (1276)..(1276): n is a, c, g, or t
  misc_feature (1311)..(1311): n is a, c, g, or t
  misc_feature (1313)..(1313): n is a, c, g, or t
ccaacctgttccctcccaggacccgagaatgtagcggggtccctgaggtgctgatgtccacatggacaccgaggtcagttccgggccaaagcggccagcgcaggggctgaccactcagacctcactcctcgcaggggtgagcgggcgacgctgcctcacgtcattgtcctgccctccaaggcccgcgctcgtcctctgacaggatgccctgacaccgcagtgcgggggcggcctcccagatagggccgcagtcgctaagtccgaggcggctggctcacctcactgagcccggctggacgtgggaccaccggtcgccgcggccagggaaccaccaaggagtcaaggcgagcctaccgccagcagcttctgcccgggcccacgcgccgttccgggtaggcccgcggcgcaggccacttccggcagcggtgcaccatgggacttgcagttcgctggcaaaggttgagtcccgggcgtggcggccgcgctccatgttgggagctgtaggcgccgcgtggcatgctgggggtgctaggtaccgaaggcagatgccgtccctttggactcgcttcgtccaacgcccccacgagtttcggtggcccttcgccccacgctataagagcagtcacttccggaactgctgcccttcgcctttgccgcgaaaagtgcctgacgggggctgggaagggggagggggaaggagtcaacgantccctccccgtcgtcattggctgagcgcctcgtgacgtcactctgaggcgcctcatgcggcgccgcgcacgggtcccagagccttctgggtagcggtttaaccccgcctcttgcgtcggcgccttccttttcctccctgtcgccaccgaggtcgcacgcgtgagacttctccgccgcctccgccgcagacgccgccgcgatgcgctacgtcgcctcctacctgctggctgccctagggggcaactcctcccccagcgccaaggacatcaagaagatcttggacagcgtgggtatcgaggcggacgacgaccggctcaacaaggttatcagtgagctgaatggaaaaaacattgaagacgtcattgcccagggtattggcaagcttgccagtgtacctgctggtggggctgtagccgtctctgctgccccaggctctgcagcccctgctgctggttctgcccctgctgcagcagaggagaagaaagatgagaagaaggaggagtctgaagagtcagatgatgacatggtgggaatttgggcctttttcgattaaacttcccctgggctnccccccgtgcccaaaaacttacaaacgcccccttntntttaaacaacaagttaaaccacacaaaaacaaagaagacaacaaaacaacacagcacaagaacataacgaacagaacaacacaagccaccagtagtagtaagtcaggccggccgaccggcggccggcggcagaccgccgatcggccgagcggacagcaccgaccatccgatcggagacggacacaacggagcaagacaaggtcacatctcaccttgttcactcgtctcaaatgagggaaagtacaaggaccgcaccatcatac

SEQ ID NO: 634019 - DNA, 347 bp, Homo sapiens
  misc_feature (165)..(165): n is a, c, g, or t
ctggtgtgatgcgcgcttcgttcgtcaggtcacactgagtggtcctggggaaagaagccctggaccaggcaggcgatgaccatgtcccattggctgggtgtgcaaggtcagcggaaagaccttggggctggtcgggaataagctagactgggctgactaggctgngctgagctggacggagctgaccgtgggtgagcttacgtggcctgagctgagctggactgacctgggctaagctaagctgggctgacctgtgctgggctgggctggactaggctgggctgagctggactgagctgagctagactgagctgagctgggtaagcttaggtggcctgacctgtgca

SEQ ID NO: 634020 - DNA, 1309 bp, Homo sapiens
  misc_feature (529)..(529): n is a, c, g, or t
  misc_feature (532)..(532): n is a, c, g, or t
  misc_feature (537)..(537): n is a, c, g, or t
  misc_feature (539)..(539): n is a, c, g, or t
  misc_feature (565)..(565): n is a, c, g, or t
ctaggagactcacaagttcccaccccttttcctttgggccttcttccccccaggtattacacagccggatttcccataatccctccggggatttcttccagcgttctcgggccttaccttagcgggttttagcatttccatcgaagggtttttcgatggagagggattcttcttcatacatccaccgaccttccttcttctgttgtgttcctcggttttctttgtggggtcgttggtcatttccttcaaagggctcttcacttgcttctctttggtattccttcgtctctacttactctctcattttttgttatgctcatcctggggtaggtcctagtaactcgggcctgctagagcctgaagtgtggtgttggctcttagttcttctttaagattaggtatattggtctcgtttgcattcttttttgggtttagttgttctttttggttttttttttctgcttattgttttctttgttgtgctggttgttgtttgttttgtttttttgttgttttgttttttggttgnccnttggngntgggggaggagttgccccctaggcanccagcaggtaggaggcgacgtagcgcatcgcggcggcgtctgcggcggaggcggcggagaagtctcacgcgtgcgacctcggtggcgacagggaggaaaagaagatcttggacagcgtgggtatcgaggcggacgacgaccggctcaacaaggttatcagtgagctgaatggaaaaaacattgaagacgtcattgcccagggtattggcaagcttgccagtgtacctgctggtggggctgtagccgtctctgctgccccaggctctgcagcccctgctgctggttctgcccctgctgcagcagaggagaagaaagatgagaagaaggaggagtctgaagagtcagatgatgacatgggatttggcctttttgattaaattcctgctcccctgcaaataaagcctttttacacatctaaaaaaaaaaaaaaaaaaaaaaaaaaaaaaaaaaaaaaaaaaaaaaaaaaaaaagagaggggggggcgcgcgcccaagagagagttctccccgcggggggcgccccggatttagcagcggcatcaccccagatttggtgggaacacaaggaggcccccaaaaggggaggacagccctatatataaagaccagaggagaggggcgcgcagagtaaacacacagctcggagacggggaaacacacggggcacacgcaggaccaccctggggagagaagcgccccttcagcccgcgggggggcggccacatcaggggacaacatacccaga

SEQ ID NO: 634021 - DNA, 710 bp, Homo sapiens
  misc_feature (710)..(710): n is a, c, g, or t
gggggggcccgggtccctggtggcccttggcattgggaaccgcggtggcttcctgcggaggtttcggcagtggcatccggggccgtggtcgcggccgtggacggggcctggggccgatggccgcggatgctcgctggaggcaaggccgaggataaggagtggattgccctgtcaccaagttgggcctgcttgtgtcaaggacatgaagatcaatgtccctggatggagatctatcgtcgttctccctgcccattaatggaatcaggagatcattgattctcttcctgtggggcctctctcaaggatgaggtttggaagattattgccatgtgcaggaatgcatacccgtgccggacagctgcagccaggttcaacggcattgtgttgctatcggggactacaatggccactgtcggtcgtgggtgtaacgtgctccaaggaggttggccaccgacatccgtggggccatcatcctggccaagctctccatcgtcccgtgcgcagaggctactgttgggaacaagatcggcaagccccacacttgtcccttgcaaggtgacaggccagtgggatctgtgctggtacgcctcatccctgcaccaggggcactgcatcgtctcagcacctgtgcctaagaagctgctcatgatgctgtatcgatgatgtacactcagccgggctgatatgcacctggcaattcgccaggcacn

SEQ ID NO: 634022 - DNA, 883 bp, Homo sapiens
ggccttttctgaaaggatatttaaaaatatatactatttaggctgggcccagtggctcatgcctgtaatcccagcactttggaggtgaaggtgggtggatcacctgaggtcaggagttcaagaccagcctgccaacatggtgaaaccccgtctctactaaaaatacagaaattagctgggccctgtggcaagagcctgttatcccagctactgggaggctgaggcaggaggatggtgtgaacctgggaggcagagttgtgcagtgagccgagatagcgccagtgactccagcctgggtgatagagcgagaatctgttcaaaaaaaaaaaccggaaaaaaaaattacaggcggcggggctttgggtgggttcaacacttggtattcccaggcatttggggaagggtcggacggggggggaccattttggagggccagaggatgtcgggaaacacagctgggcaaattttgtggaaccccccggtcttcttattaaaaattgggaaattaaggccggggcttcgtggcagggcttctggtgtgtccccaggcaaacttgggagaggctgagcggaagggaggattgggttcaaccccgtcgggagggccggagttttggagtagccgccgaattggtgcagttgcctcacaagccgtgggagacagatgggaacctccgtggttctccaaaaaaaaaaacacaacgaaaaaaaatttggcgcggggccggaccagagaaatgttaacactcttgtggggcggcgacccaaggaagagaaacgtggccaacggtgccagaggacccggcacgaccgtgtgggttcccaaaaagccggggcgcgggttgacaccggggtcggccacggtaagggcgcggaccccggt

SEQ ID NO: 634023 - DNA, 443 bp, Homo sapiens
ggcttcattactaacgttccagtgttctcatgggtacaaataccccagctgtcatgagaatatgcggtgtttggtttttttgtgtcttgcgatagtttactgagaaggatggtttccaatttcatccatgtccctacaaaggacatgaactcatcattttttatggctgcatagtattccatggtgtatatgtgccacattttcttaatccagtctatcattgttggacatttgggttggttccaagtcttggctattgtgaatagtgccgcaataaacataacgtgtgcatgtgtctttatagcagcatgatttatagtcctttgggtatatacccagtaatgggatagctgggtcaaatggtatttctagttctagatccctgaggaatcgccacactgacttccacaatggttgaactagtttacagtcccaccaacagt

SEQ ID NO: 634024 - DNA, 84 bp, Homo sapiens
ggagcaggtgaagggttccccctactttttcagctgacaccccgtgagccttgtcagggggtaaataaagctcttttgccccca

SEQ ID NO: 634025 - DNA, 1418 bp, Homo sapiens
gcgactgtctccgccgagcccccggggccaggtgtcccgggcgcgccacgatgcggccgcggctgtggctcctcctggccgcgcagctgacagttctccatggcaactcagtcctccagcagacccctgcatacataaaggtgcaaaccaacaagatggtgatgctgtcctgcgaggctaaaatctccctcagtaacatgcgcatctactggctgagacagcgccaggcaccgagcagtgacagtcaccacgagttcctggccctctgggattccgcaaaagggactatccacggtgaagaggtggaacaggagaagatagctgtgtttcgggatgcaagccggttcattctcaatctcacaagcgtgaagccggaagacagtggcatctacttctgcatgatcgtcgggagccccgagctgaccttcgggaagggaactcagctgagtgtggttgatttccttcccaccactgcccagcccaccaagaagtccaccctcaagaagagagtgtgccggttacccaggccagagacccagaagggcccactttgtagccccatcacccttggcctgctggtggctggcgtcctggttctgctggtttccctgggagtggccatccacctgtgctgccggcggaggagagcccggcttcgtttcatgaaacaattttacaaataagcagagaatacggttttggtgtcctgctacaaaaagacatcggtcagtaatgagcacgatgtggaaaaatgagagaagggacacattcaaccctggagagttcaatggctgctgaagctgcctgcttttcactgctgcaaggcctttctgtgtgtgatgtgcatgggagcaacttgttcgtgggtcatcgggaatactagggagaaggtttcattgcccccagggcacttcacagagtgtgctggaggactgagtaagaaatgctgcccatgccaccgcttccggctcctgtgctttccctgaactgggacctttagtggtggccatttagccaccatctttgcaggttgctttgccctggtagggcagtaacattgggtcctgggtctttcatggggtgatgctgggctggctccctcttggtcttcccaggctggggctgaccttcctcgcagagaggccaggtgcaggttgggaatgaggcttgctgagaggggctgtccagttcccagaaggcatatcagtctctgagggcttcctttggggccgggaacttgcgggtttgaggataggagttcacttcatcttctcagctcccatttctactcttaagtttctcagctcccatttctactctcccatggcttcatgcttctttcattttctgtttgttttatacaaatgtcttagttgtacaaataaagtcccaggttaaagataaaaaaaccggaattc

SEQ ID NO: 634026 - DNA, 200 bp, Homo sapiens
ggtttaaaaatttgccaatgccctgtcaaagtagggtgttttgaaaaacttcctgcatttgaagaacttgggtgagaatttccccagctgcttttgagaactcgagactagcagttcccctgctggccaagggcaaaaataatttaggggcttttcaaaacaactgctgaggtaataaatcctagcctttttcagggcca

SEQ ID NO: 634027 - DNA, 1442 bp, Homo sapiens
gcgactgtctccgccgagcccccggggccaggtgtcccgggcgcgccacgatgcggccgcggctgtggctcctcctggccgcgcagctgacagttctccatggcaactcagtcctccagcagacccctgcatacataaaggtgcaaaccaacaagatggtgatgctgtcctgcgaggctaaaatctccctcagtaacatgcgcatctactggctgagacagcgccaggcaccgagcagtgacagtcaccacgagttcctggccctctgggattccgcaaaagggactatccacggtgaagaggtggaacaggagaagatagctgtgtttcgggatgcaagccggttcattctcaatctcacaagcgtgaagccggaagacagtggcatctacttctgcatgatcgtcgggagccccgagctgaccttcgggaagggaactcagctgagtgtggttgatttccttcccaccactgcccagcccaccaagaagtccaccctcaagaagagagtgtgccggttacccaggccagagacccagaagggcccactttgtagccccatcacccttggcctgctggtggctggcgtcctggttctgctggtttccctgggagtggccatccacctgtgctgccggcggaggagagcccggcttcgtttcatgaaacaattttacaaataagcagagaatacggttttggtgtcctgctacaaaaagacatcggtcagtaatgagcacgatgtggaaaaatgagagaagggacacattcaaccctggagagttcaatggctgctgaagctgcctgcttttcactgctgcaaggcctttctgtgtgtgatgtgcatgggagcaacttgttcgtgggtcatcgggaatactagggagaaggtttcattgcccccagggcacttcacagagtgtgctggaggactgagtaagaaatgctgcccatgccaccgcttccggctcctgtgctttccctgaactgggacctttagtggtggccatttagccaccatctttgcaggttgctttgccctggtagggcagtaacattgggtcctgggtctttcatggggtgatgctgggctggctccctcttggtcttcccaggctggggctgaccttcctcgcagagaggccaggtgcaggttgggaatgaggcttgctgagaggggctgtccagttcccagaaggcatatcagtctctgagggcttcctttggggccgggaacttgcgggtttgaggataggagttcacttcatcttctcagctcccatttctactcttaagtttctccccatttctactcttaagtttctcagctcccatttctactctcccatggcttcatgcttctttcattttctgtttgttttatacaaatgtcttagttgtacaaataaagtcccaggttaaagataaaaaaaccggaattc

SEQ ID NO: 634028 - DNA, 130 bp, Homo sapiens
ggcccacttgcagttgtactccaccggcaggttgtactccaccggcagtgtactccaccggcaggttgtactccaccggcaggttgtactcaggctggtctcaaacttctgatctcaggtgatccacccg

SEQ ID NO: 634029 - DNA, 1110 bp, Homo sapiens
gcgactgtctccgccgagcccccggggccaggtgtcccgggcgcgccacgatgcggccgcggctgtggctcctcctggccgcgcagctgacagttctccatggcaactcagtcctccagcagacccctgcatacataaaggtgcaaaccaacaagatggtgatgctgtcctgcgaggctaaaatctccctcagtaacatgcgcatctactggctgagacagcgccaggcaccgagcagtgacagtcaccacgagttcctggccctctgggattccgcaaaagggactatccacggtgaagaggtggaacaggagaagatagctgtgtttcgggatgcaagccggttcattctcaatctcacaagcgtgaagccggaagacagtggcatctacttctgcatgatcgtcgggagccccgagctgaccttcgggaagggaactcagctgagtgtggttgatttccttcccaccactgcccagcccaccaagaagtccaccctcaagaagagagtgtgccggttacccaggccagagacccagaagggcccactttgtagccccatcacccttggcctgctggtggctggcgtcctggttctgctggtttccctgggagtggccatccacctgtgctgccggcggaggagagcccggcttcgtttcatgaaacaactaagattacatccactggagaaatgttccagaatggactactgaatatacaggcctcaaggggaaggtatatcaggaacctttgtcccccaatgcctgcatggatactacagcaatactacaacctcacagaagctgcttaacccatggatcctgaaaacataggcaagaagcacaggtcctgatgagtggatctttactacttttaccagattcctccctcgctcagagggatcctcccacacacccagcagagacttctctgccaccatcaaccccccaagtcatagggggctcaagttctgccctggtgagctgtggcccccatccttgtgaaccccaaagtgtcccccttgtggaaccaaatgtatccatcttgaataaatttgcccaaaatcctaaagaccgggaaaagggaaccattgagcttggcaaaaac

SEQ ID NO: 634030 - DNA, 640 bp, Homo sapiens
ctctgcccggccgcccgtctgggatgtgaggagcgcctctgcccggcgccccgtctgggatgtgaggagcgcctctgcccagccgccaccccatctgggaagtggggagcgcctctgcccggccgccccatctgggatgtgaggagcgcctctgcctggcctccccgtctgggaggtggggagcgcctctgcccagccgccccgtctgggaggtgaggagcatctctacctggctgctcatcatctgggatgtgaggagcacctctgcccggccgcccatctgggaagtgaggagcgcctctgcccaggcacccttcgtctgggaggtgaggagcgtctctgcgctgggcgtccattgtctgggatgtgaggagcgcctctgtccggcgcgcccctctgggaagtgaggagtgcctctgtctggccgcccatctgggaggtgtacccaacagctccgaaggagacagcgaccattgagaacgggccatgattgacgatggtggtttcgttgaaccactccagggggcaatgtggggacaagaaagagaagatcacgattgttactgtgtctgtgtcgaaagaagtagacataggagactccattttgttcggtactaagaaaaattcttctgcttgggac

SEQ ID NO: 634031 - DNA, 475 bp, Homo sapiens
  misc_feature (29)..(29): n is a, c, g, or t
  misc_feature (56)..(56): n is a, c, g, or t
gcttggtctgcatatgtttcaaggctcanggaggctgtcatggatgttttcccccngagagctccagtggcggaggtctgcacattcaggcctcaaggggaaggtatatcaggaacctttgtcccccaatgcctgcatggatactacagcaatactacaacctcacagaagctgcttaacccatggatcctgaaaacataggcaagaagcacaggtcctgatgagtggatctttactacttttaccagattcctccctcgctcagagggatcctcccacacacccagcagagacttctctgccaccatcaaccccccaagtcatagggggctcaagttctgccctggtgagctgtggcccccatccttgtgaaccccaaagtgtcccccttgtggaaccaaatgtatccatcttgaataaatttgcccaaaatcctaaagaccgggaaaagggaaccattgagcttggcaaaaac

SEQ ID NO: 634032 - DNA, 447 bp, Homo sapiens
ttgacacttgactcagtgtgactgcaggtcccacagctgtggctaggaaaatgtgtgatgtctctgttcttggcttttcctagttctccatggcaactcagtcctccagcagacccctgcatacataaaggtgcaaaccaacaagatggtgatgctgtcctgcgaggctaaaatctccctcagtaacatgcgcatctactggctgagacagcgccagttcccagaaggcatatcagtctctgagggcttcctttggggccgggaacttgcgggtttgaggataggagttcacttcatcttctcagctcccatttctactcttaagtttctcagctcccatttctactctcccatggcttcatgcttctttcattttctgtttgttttatacaaatgtcttagttgtacaaataaagtcccaggttaaagataaaaaaaccggaattc

SEQ ID NO: 634033 - DNA, 894 bp, Homo sapiens
gcgactgtctccgccgagcccccggggccaggtgtcccgggcgcgccacgatgcggccgcggctgtggctcctcctggccgcgcagctgacagttctccatggcaactcagtcctccagcagacccctgcatacataaaggtgcaaaccaacaagatggtgatgctgtcctgcgaggctaaaatctccctcagtaacatgcgcatctactggctgagacagcgccaggcaccgagcagtgacagtcaccacgagttcctggccctctgggattccgcaaaagggactatccacggtgaagaggtggaacaggagaagatagctgtgtttcgggatgcaagccggttcattctcaatctcacaagcgtgaagccggaagacagtggcatctacttctgcatgatcgtcgggagccccgagctgaccttcgggaagggaactcagctgagtgtggttgatttccttcccaccactgcccagcccaccaagaagtccaccctcaagaagagagtgtgccggttacccaggccagagacccagaagggcccactttgtagccccatcacccttggcctgctggtggctggcgtcctggttctgctggtttccctgggagtggccatccacctgtgctgccggcggaggagagcccggcttcgtttcatgaaacaattttacaaataagcagagaatacggttttggtgtcctgctacaaaaagacatcggtcagtaatgagcacgatgtggaaaaatgagagaagggacacattcaaccctggagagttcaatggctgctgaagctgcctgcttttcactgctgcaaggcctttctgtgtgtgatgtgcatgggagcaacttgtttgcagtccatcagacagggatactctagaacag

SEQ ID NO: 634034 - DNA, 249 bp, Homo sapiens
ggcataggggccaaaacttttgccttcaaaatttccttcctttatgggtccaaaatttgaagactgattgttggaattcccaaaatcattggaacttccaccaccttcaaaattgctttcattattaccaaatccattatagccatccccactggcaccatattcaccacccccccggctgcccccaaagccaccaccacccctgaagtttccttcacgaccgaagttggcattcccaccgaaaccacc

SEQ ID NO: 634035 - DNA, 329 bp, Homo sapiens
cccaccaagcaaccacactaacccattttaattagtgtaagagtatcgcccgggcccggtggctcacgccggtaatcccagcactttgggagcccaagccgggcggttcacgaggtcaggagttcgagaccatcgcggttaaaccggtgaaacccggtctctcctaaaaatccaaaaaattagctgggcgtagtgccgggcgcctgtagtcccagctacttggaagtctaagcgcaggagaatggcttgaacccggaaggcgaagcttgcagtgagccgagatcccgcctgtgcactccagtgtgggcgacagagcaagactgtgtctc

SEQ ID NO: 634036 - DNA, 488 bp, Homo sapiens
  misc_feature (25)..(25): n is a, c, g, or t
  misc_feature (69)..(69): n is a, c, g, or t
  misc_feature (97)..(97): n is a, c, g, or t
  misc_feature (413)..(413): n is a, c, g, or t
aaaatgctgggattaagggcttgancccatgtgcctgcaaaccccggcctaatttttgtaattttttantaaaagatggggttttcacccgtgttgncccaggctggtgtcgaaactcccgggccctcaggtggtcctgccccgcctcagccctccccaaagtgctgggattataggcgtgacaccacacctggcaaagaggaagtatttttaaatttagttttcacctcacacaattaagtactttggttttgggtgagtatgatttagctgaaaagagtagggtctctgcccactatatagttcttaattttccaaggctctgaaggtacctctggactactaatcaatccaacatatagagggagatatagtaacgtagagtactgcctcagcctctacaatgttgaagntttaactcatggcaatcaatggtaattgctacagacagcttaattgtatctaagctttttatattaaaaactgac

SEQ ID NO: 634037 - DNA, 655 bp, Homo sapiens
tggaggctgttctagaggatcccagctattcgaagctctagcaaccatcctctactctctatctccatgagttcaattgttttaatttttagctcccacaggtgagaacatgtgatgttgtctttctgtgacaggcttatttcatttaacataatggcctccagtttcatccgtgttgctgcaaatgacaggatcttgtcctttttatggctgaatactactctgtggtccatatgtacattttctttatcgattcatctgctgatggacacttcagttgtttccaaatcttggctattgtgaacagtgctgcaataagcacaggagttcctattcttttctttttggtatgtacctagcagtgggattactggatcatgtggtagctcaatgtttagtttttagagaaacctccaaactgttctccacactggttgtaccaattacattcccaccaacagtgtacaaggattccctttctccacatcctcgttagcattggttattacctgtttagaaaaaagccgttttacaataatatgttatggtaggtctaatttgtatttctccaatgatcagtgatattgagcatctttgcatatacctatttgctatctgtatgtattcttttgagaaatatctattcagatctttt

SEQ ID NO: 634038 - DNA, 270 bp, Homo sapiens
gctgttgcggtcgcactcacggctccccggcatcaggtcacagtttttcgcagcccccgtcggtcatctcagtttgatgcgcgtgcacggtacctcgtcggatgttctgggcgctaccgcccgaaaggtcggctggcatcagattcataaaaggccttcagcacaagcatcgagcgtctgagcatggcgtgaaccccggggggcagagcctgcagtaagccgagatcgcgccactgcactccagcctgggcgacagccagcctccgtctc

SEQ ID NO: 634039 - DNA, 1057 bp, Homo sapiens
gcgactgtctccgccgagcccccggggccaggtgtcccgggcgcgccacgatgcggccgcggctgtggctcctcctggccgcgcagctgacagttctccatggcaactcagtcctccagcagacccctgcatacataaaggtgcaaaccaacaagatggtgatgctgtcctgcgaggctaaaatctccctcagtaacatgcgcatctactggctgagacagcgccaggcaccgagcagtgacagtcaccacgagttcctggccctctgggattccgcaaaagggactatccacggtgaagaggtggaacaggagaagatagctgtgtttcgggatgcaagccggttcattctcaatctcacaagcgtgaagccggaagacagtggcatctacttctgcatgatcgtcgggagccccgagctgaccttcgggaagggaactcagctgagtgtggttgatttccttcccaccactgcccagcccaccaagaagtccaccctcaagaagagagtgtgccggttacccaggccagagacccagaagggcccactttgtagccccatcacccttggcctgctggtggctggcgtcctggttctgctggtttccctgggagtggccatccacctgtgctgccggcggaggagagcccggcttcgtttcatgaaacaagcctcaaggggaaggtatatcaggaacctttgtcccccaatgcctgcatggatactacagcaatactacaacctcacagaagctgcttaacccatggatcctgaaaacataggcaagaagcacaggtcctgatgagtggatctttactacttttaccagattcctccctcgctcagagggatcctcccacacacccagcagagacttctctgccaccatcaaccccccaagtcatagggggctcaagttctgccctggtgagctgtggcccccatccttgtgaaccccaaagtgtcccccttgtggaaccaaatgtatccatcttgaataaatttgcccaaaatcctaaagaccgggaaaagggaaccattgagcttggcaaaaac

SEQ ID NO: 634040 - DNA, 967 bp, Homo sapiens
gcgactgtctccgccgagcccccggggccaggtgtcccgggcgcgccacgatgcggccgcggctgtggctcctcctggccgcgcagctgacagttctccatggcaactcagtcctccagcagacccctgcatacataaaggtgcaaaccaacaagatggtgatgctgtcctgcgaggctaaaatctccctcagtaacatgcgcatctactggctgagacagcgccaggcaccgagcagtgacagtcaccacgagttcctggccctctgggattccgcaaaagggactatccacggtgaagaggtggaacaggagaagatagctgtgtttcgggatgcaagccggttcattctcaatctcacaagcgtgaagccggaagacagtggcatctacttctgcatgatcgtcgggagccccgagctgaccttcgggaagggaactcagctgagtgtggttgatttccttcccaccactgcccagcccaccaagaagtccaccctcaagaagagagtgtgccggttacccaggccagagacccagaagggccggcggaggagagcccggcttcgtttcatgaaacaagcctcaaggggaaggtatatcaggaacctttgtcccccaatgcctgcatggatactacagcaatactacaacctcacagaagctgcttaacccatggatcctgaaaacataggcaagaagcacaggtcctgatgagtggatctttactacttttaccagattcctccctcgctcagagggatcctcccacacacccagcagagacttctctgccaccatcaaccccccaagtcatagggggctcaagttctgccctggtgagctgtggcccccatccttgtgaaccccaaagtgtcccccttgtggaaccaaatgtatccatcttgaataaatttgcccaaaatcctaaagaccgggaaaagggaaccattgagcttggcaaaaac

SEQ ID NO: 634041 - DNA, 967 bp, Homo sapiens
gcgactgtctccgccgagcccccggggccaggtgtcccgggcgcgccacgatgcggccgcggctgtggctcctcctggccgcgcagctgacagttctccatggcaactcagtcctccagcagacccctgcatacataaaggtgcaaaccaacaagatggtgatgctgtcctgcgaggctaaaatctccctcagtaacatgcgcatctactggctgagacagcgccaggcaccgagcagtgacagtcaccacgagttcctggccctctgggattccgcaaaagggactatccacggtgaagaggtggaacaggagaagatagctgtgtttcgggatgcaagccggttcattctcaatctcacaagcgtgaagccggaagacagtggcatctacttctgcatgatcgtcgggagccccgagctgaccttcgggaagggaactcagctgagtgtggttgatttccttcccaccactgcccagcccaccaagaagtccaccctcaagaagagagtgtgccggttacccaggccagagacccagaagggccggcggaggagagcccggcttcgtttcatgaaacaagcctcaaggggaaggtatatcaggaacctttgtcccccaatgcctgcatggatactacagcaatactacaacctcacagaagctgcttaacccatggatcctgaaaacataggcaagaagcacaggtcctgatgagtggatctttactacttttaccagattcctccctcgctcagagggatcctcccacacacccagcagagacttctctgccaccatcaaccccccaagtcatagggggctcaagttctgccctggtgagctgtggcccccatccttgtgaaccccaaagtgtcccccttgtggaaccaaatgtatccatcttgaataaaacccgattcggccgaagcatacgaatattcgacaatggcgcgacaaaaaaaaga

SEQ ID NO: 634042 - DNA, 1336 bp, Homo sapiens
tgtcttttttaaatggtaactcaggccttcaggacaccggtgcatgcgtagacgtgcttagccctcaagatggttgagtggctgcccatgcgaggcaggggtctccctcagtaacatgcgcatctactggctgagacagcgccaggcaccgagcagtgacagtcaccacgagttcctggccctctgggattccgcaaaagggactatccacggtgaagaggtggaacaggagaagatagctgtgtttcgggatgcaagccggttcattctcaatctcacaagcgtgaagccggaagacagtggcatctacttctgcatgatcgtcgggagccccgagctgaccttcgggaagggaactcagctgagtgtggttgatttccttcccaccactgcccagcccaccaagaagtccaccctcaagaagagagtgtgccggttacccaggccagagacccagaagggcccactttgtagccccatcacccttggcctgctggtggctggcgtcctggttctgctggtttccctgggagtggccatccacctgtgctgccggcggaggagagcccggcttcgtttcatgaaacaattttacaaataagcagagaatacggttttggtgtcctgctacaaaaagacatcggtcagtaatgagcacgatgtggaaaaatgagagaagggacacattcaaccctggagagttcaatggctgctgaagctgcctgcttttcactgctgcaaggcctttctgtgtgtgatgtgcatgggagcaacttgttcgtgggtcatcgggaatactagggagaaggtttcattgcccccagggcacttcacagagtgtgctggaggactgagtaagaaatgctgcccatgccaccgcttccggctcctgtgctttccctgaactgggacctttagtggtggccatttagccaccatctttgcaggttgctttgccctggtagggcagtaacattgggtcctgggtctttcatggggtgatgctgggctggctccctcttggtcttcccaggctggggctgaccttcctcgcagagaggccaggtgcaggttgggaatgaggcttgctgagaggggctgtccagttcccagaaggcatatcagtctctgagggcttcctttggggccgggaacttgcgggtttgaggataggagttcacttcatcttctcagctcccatttctactcttaagtttctcagctcccatttctactctcccatggcttcatgcttctttcattttctgtttgttttatacaaatgtcttagttgtacaaataaagtcccaggttaaagataaaaaaaccggaattc

SEQ ID NO: 634043 - DNA, 660 bp, Homo sapiens
ggcggggcgcgatgagcacgctacgggcctttacctgcgattgatctgtgccgctgtcaataactattaacttggatccacgttacatgaaacttatgggattcctttctaactacaagttacctcgcccactggtgcagagtatttcattgtggcagaggcacctggtggagaattaatgggttatattatgggtaaagcagaaggctcagtagctagggaagaatggcacgggcacgtcacagctctgtctgttgccccagaattatcgacgcctatggttaggtctgctaaacttatggacgttactagaggagattatcagaaagaaagggtggagtttgttcgtggatctctatgtaagagtatctaaccaagtggcagttaacatgtacaagcagttgggctacagctgtatataggacggtgcatacgagtactattcggtccagtcagacggggatgcctgactgcaggagcgctgtactgatatgaggacaagcatctttccagggagtacgtgacgaagagaatccactcatagccagttagcctcatcctgtgaggcctgtaagactcttgaataaccctgggcagtggttcttaggcatgatactctagatgctttatggacgatattagttcattggatgatggctg

SEQ ID NO: 634044 - DNA, 255 bp, Homo sapiens
tgacttggtacactgccatgacaaagtgtgactgtgtattcggtccggggcacccctgtcatcaatcccctgcatacacacttcccaggtgacacagctgtgcctgggttttctcactgaccctcagctggacaccgaccaactgacctcaggcatctttaacgtcggcagcaccttacctggggactggttcttggctgcccaccttccccagtgccacggccaaatctctgtcaagggtctccaggatgagtg

SEQ ID NO: 634045 - DNA, 214 bp, Homo sapiens
cagatgaaggggtcagtcagaaaataagcatacctcatacaagataggatcagctccttgagcctcgaggggcaggagtgcttcctggtgtgtgtaatagaatcccttcctgccgtgtttcatggcagtcgaaatgcctcttggtcctgtccaagtgtatctttcactgtatttctgcaatcatgttcatagttgcttgacccatgccacatgg

SEQ ID NO: 634046 - DNA, 189 bp, Homo sapiens
  misc_feature (43)..(43): n is a, c, g, or t
atgagctggtccggtaaagcactatcatctctcacttaacttnggcagtagcttcctaacggaagtatagacgcccccgcagtcgtactccacataacagaagttctaaaaaaaaaatgacattcttggtcaatacttctcagtggtttccggtctggtctcattcttataacacatttctacatggag

SEQ ID NO: 634047 - DNA, 986 bp, Homo sapiens
actctcttttggtaggtgggcggaatggatggcagcgagagtagagcagcaggagtggagcatttcatgttggctagtagtttagttagttgtttcgtggatgcttgcaccatgtcgcggtggttatgagttgtgttccctcactagtgtctctgtggtcgccatccttagagtgggtgcagagtgtcaagatgtgtgtccacaccaagggcaaccccttttcgccgttgtgggactcgcgtcccctccctccgtgggagcaaaactgtgtgtaccccgttgccttgcccccctgtggtgtgtccgcgcggcacttttttgggggacatatattcgcacctctttctattttgctcgaaacatctgggccggtggtgcccacgctgccatggggcccttcctctgtgtgattttcagggaacaacccggtggttaacccaattacgcagcacccgcgtgtttgttgacccccccctcttagacgcctctttgcggcaaatacattcttccaagctttcccctccctctccttctgcgaagatagaataattcatttccccttcctcacgagatgaacaagaccatcccgcgattccttttctccccttttgccatattcccgttgcggccccccatccacatcgttgcaccagtggtcattaaatcgagcccccctctagtttcacgtgtgagatcatatcttcggttcttcaaaatagataaagccgccatcttcaccactttctttccataagatctatcgtcgtctttctcagtgccgattgtccaacattgagtctttgcgcacaatgttgccattgtttcaacaaccaccgtgtaaacaattttagtccccaatgactccccgtctcttaattcccactgtgggtcccaccccaatccctttcttggtcgccggtggaatatgagacaacaacttgttaggaagggttatttgggaaaaaaataaaacaccccacaaaaca

SEQ ID NO: 634048 - DNA, 576 bp, Homo sapiens
gttcattggcacctgatctctaatggcccatggtgccatgggatgctccatgtggtgatgcttgcctgactttgtgcatgtgccatgctgatgtgctccccattgggatgtggacctgcctgaagatgatggcatgcagacgtgtggtgcctgggacatgtgaccgtcttcctcacaaccttggacgccattgtgtccatgtggttatgcattgcactcccccatcacacatgacaaactatccattggcccatatgctttgaacataccatgatacttgatactacacatgcaggcacaaaaaactgcaacatcgctaccatatcaacagacacaacatggagacatcctgggccagcatcacattgaacacatcggggcacccgccaccaggaaaaaccacaaagacacagcgagaacgaacgcgacccaatagcaacgagagaccacaccccagaaacacagacccacacacgcaccgacacagacacacgcacacgaacacccaccacgcacacaaccgcggatgaccaccggcagcacacacagacgagcgagcgacgcaacccaacacaa

SEQ ID NO: 634049 - DNA, 498 bp, Homo sapiens
cgctcactctgctgggattagaaggctttgagccctgaggtcacctggttcctggccaagtcactccttttatttgagcttcaagtctccatgtgtataatgtggggttgatgctgtggtgctccaaggtgttggggggttttaggcagagttcttatgcttaatataggatggaaaagtgttcgagcttcttcccttttctctttcttctcttcatctgacatgagcctggggttctacctcttccagataattcatcctggagctactaattctatctccccattgattttagtgtcctgtctgtttctaaatctactgggcagttggagacattgtcttttgttccctcatctatcttctgtatccacagttgataattgtctatgtttttagtgtgttttaaggaaaaaagtctcatggcagcaaatttttttgagatggagtttcactctcattgtccagcctgggcgacagagcaagactctgtctcaattt

SEQ ID NO: 634050 - DNA, 1400 bp, Homo sapiens
catcggagcgacagagcgagcgtgccctacggtccgtcggcggcccggcggtccgagatgttatctggtgaagaaggcggcagtcgacggcggtcggctggctgcagacggcagctaaccgggacggcgagcgctgtgcccctggcgtacaccatggcggctccgtagaacggagtcatgaggtggccgcagcagcccgctaggcctgtccggcgcccagccgagggctcggcgccggtggagccggctggcgggagctgcacaccccgcaaggacagagcctccgtcgggcacttcgcctcctcctggggcgcccttgtgcggacacccgcccgcgggtccgccatgggcccctcaccgccggccccttacgtgctcagtgcccttgcggcttctgccgcaccccgtcattggacaaccttgcgcaactacgccaggacgatccttcccgcgcacgcggagcccgctccgcggaacccaatggcccgcgcctgtcaaagtccgcggccgaccgggcttaagaaggataccacggacgccagactgcgattgaaacacgccttggtgtccagaccgttctccacgaaagcacgtggacgctaactgcgactctccaggcacacggcaacacggacggcagggacaaacttggcccaaagtagggccaatgaaggacaaggaggtaacacacaggaaaacgggctatttaccacacgacacaatgcgaaacgcgccccacttatccgtaaaggcctcaccgcataccccatttcacgggccaccacgcctaccgacccgtgtcgtcaaccatgattggcacagccccgccttggcacacagtcgaataccgctatctccgagcgctctggatttggcacacgtcgcggctcgcagccacaagcggacttttatatgccccatcagacaggtgcccgctgggatcccttactcccactctgtcccgtttgtgtcaaccccggggtggcatttagcaccctttattgcgttccacacaagtgcataaaaccgtgcacaagtcgcacgtcctttggacttgtactatgcccgctcgacgaagcactctttaagcctttcgtcaacttacaaacgctattggggaccaccgcctcaagccgtcaaatcgatatcgcaaacccccccatcaccagataaccgcgcattatcactcaccacatttctcttgagaagctttctacagcaaacgtaacccgccggtgcactcccacactcttctgcgaagaccgacatctgggtttcgcgatatcgtggcggcattcatccacttttcgcccatcgaacgtagactcttcccgacgactctgacagccaactttgctggacagaggcttataacgtcgagtatcccaagcctacagtag

SEQ ID NO: 634051 - DNA, 900 bp, Homo sapiens
gatgtgtaaaaaggctttatttgcaggggagcaggaatttaatcaaaaaggccaaatcccatgtcatcatcttactctctcagactccttcctcaatatgatctatcttcctccttctgctgcaacaaggtgcagaaccagcgagcatggcatgaagatgtgggcacgcatgagacggctacagccccaccagcaggtacactggcaagcttgccaataccctgggcaactcctcccccagcgccaaggacatcaagaagatcttggacagcgtgggtatcgaggcggacgacgaccggctcaacaaggttatcagtgagctgaatggaaaaaacattgaagacgtcattgcccagggtattggcaagcttgccagtgtacctgctggtggggctgtagccgtctctgctgccccaggctctgcagcccctgctgctggttctgcccctgctgcagcagaggagaagaaagatgagaagaaggaggagtctgaagagtcagatgatgacatgggatttggcctttttgattaaattcctgctcccctgcaaataaagcctttttacacatctaaaaaaaaaaaaaaaaaaaaaaaaaaaaaaaaaaaaaaaaaaaaaaaaaaaaaagagaggggggggcgcgcgcccaagagagagttctccccgcggggggcgccccggatttagcagcggcatcaccccagatttggtgggaacacaaggaggcccccaaaaggggaggacagccctatatataaagaccagaggagaggggcgcgcagagtaaacacacagctcggagacggggaaacacacggggcacacgcaggaccaccctggggagagaagcgccccttcagcccgcgggggggcggccacatcaggggacaacatacccaga

SEQ ID NO: 634052 - DNA, 642 bp, Homo sapiens
actagcggagcttcttcgacggtgtctggctgaaacccagtattcctttgaaaagcatattagaagcatcttgaacgtagtgttgcaatccagcatttttgaaagcttctgagaaggacatatgccctcctcctggagaatggcttcagcttcctcagcatgagcagccaggtgttcagagagcagtacattctcaaacaggacttggacaaggaggagatcagcggagggtcaaattattatgtgagccaaaaaagaaacaagtagaagatctcagttattgtcgagaagagaggacaagtctgcgggacatggctgagcgtatagcttgacacatatgaggaagctacagaaaaacaagaggatatcatgaacaggatgataaaactacttcacagttttcactctagagctcccagtactctctgatagtgagcgagaccatgaagaaagaattacagctgatacctgatcaacttcgaccatttggggccatgccatcaaacaggttactatgaacaaggattatcaacagcaaaagatggcgaaggtgtcgagtcttccaaaaaccaccattattctcagtgcctacagcgaaagtgaatcagccatctgaaaaaggggggacctataaggacaggg

SEQ ID NO: 634053 - DNA, 1208 bp, Homo sapiens
  misc_feature (18)..(18): n is a, c, g, or t
  misc_feature (24)..(25): n is a, c, g, or t
  misc_feature (33)..(33): n is a, c, g, or t
taagcttacggctaggtncgggcnnggtgttantcgccacgcgaggtcgcacgcgtgagacttctccgccgcagacgccgccgcgatgcgctacgtcgcctcctacctgctggctgccctagggggcaactcctcccccagcgccaaggacatcaagaagatcttggacagcgtgggtatcgaggcggacgacgaccggctcaacaaggttatcagtgagctgaatggaaaaaacattgaagacgtcattgcccagggtattggcaagcttgccagtgtacctgctggtggggctgtagccgtctctgctgccccaggctctgcagcccctgctgctggttctgcccctgctgcagcagaggagaagaaagatgagaagaaggaggagtctgaagagtcagatgatgacatgggatttggcctttttgattaaattcctgctcccctgcaaataaagcctttttacacatcaaaaaaaaaaaaaaaaaaaaaaaaaaaaaaaaaataaataacaacaaaaaaaaacaaagagagggcgcgcgccgcgcctctctaaaagatattatcctccgcgaggaggcgcccccactatcatttagacgcgcaatcaccgcgccgatttttctgttggactcacaaggaggtggcgccccctattatatgggaggaaggctcttattatataacagcgcagagaccgaccgcggggacgcgctcgttttttataacaccaagctcgctctgagagactgtgcggacacaaacagacttctcgacaaacggctggagcgaacactactttgcggagaaagaagacacaccacttctcgctctctgggggggggagggagcagagacaccaatatgtgtgcgtgagagaaacgcacctcccaaagagacagagagatttatatagcaggcggcctctacgggcgggagagacatctttctacaaacacgttctgatacaagctgcgtgtgtatatagacgggtgtgtgtgtacacacacaatcacgcgggggcgagaatctatgatcggcctggttggcgggctgttgatgacaagaaaccacctctgctcgtactcaacccgcgcgcgggtctaacctgagtgatgtctggccgggagacaacagttatggttatcacacacgccggaggtggcgaccgtccccattgtgcaatcgagacaagatggatggataat

SEQ ID NO: 634054 - DNA, 406 bp, Homo sapiens
ccccgtatatacagctctcattggcaggaccatttcgattcatgtgtgatttattgcattaagctatcatttcttaacctggggcaattatacatgtatcttaagcaactcctctcctatcctaattccatgcacaccaaacaaccaataggcttccaacagcgaggtctgtccacagactctatattatactagtctatgcgtaatggcttgtatgtgttctagcctatcacttcaatagttatttctcatgggtatagtaacatatcaataagttggtatcagtaacatcagtcaaatatgcttttctcatgtcttcacttgtaaggatagtccttttcttgattaatctacataatcagacttctaagccaacaaggctctgaatctacggtatattccgggt

SEQ ID NO: 634055 - DNA, 1291 bp, Homo sapiens
  misc_feature (708)..(708): n is a, c, g, or t
ccaacctgttccctcccaggacccgagaatgtagcggggtccctgaggtgctgatgtccacatggacaccgaggtcagttccgggccaaagcggccagcgcaggggctgaccactcagacctcactcctcgcaggggtgagcgggcgacgctgcctcacgtcattgtcctgccctccaaggcccgcgctcgtcctctgacaggatgccctgacaccgcagtgcgggggcggcctcccagatagggccgcagtcgctaagtccgaggcggctggctcacctcactgagcccggctggacgtgggaccaccggtcgccgcggccagggaaccaccaaggagtcaaggcgagcctaccgccagcagcttctgcccgggcccacgcgccgttccgggtaggcccgcggcgcaggccacttccggcagcggtgcaccatgggacttgcagttcgctggcaaaggttgagtcccgggcgtggcggccgcgctccatgttgggagctgtaggcgccgcgtggcatgctgggggtgctaggtaccgaaggcagatgccgtccctttggactcgcttcgtccaacgcccccacgagtttcggtggcccttcgccccacgctataagagcagtcacttccggaactgctgcccttcgcctttgccgcgaaaagtgcctgacgggggctgggaagggggagggggaaggagtcaacgantccctccccgtcgtcattggctgagcgcctcgtgacgtcactctgaggcgcctcatgcggcgccgcgcacgggtcccagagccttctgggtagcggtttaaccccgcctcttgcgtcggcgccttccttttcctccctgtcgccaccgaggtcgcacgcgtgagacttctccgccgcctccgccgcagacgccgccgcgatgcgctacgtcgcctcctacctgctggctgccctagggggcaactcctcccccagcgccaaggacatcaagaagatcttggacagcgtgggtatcgaggcggacgacgaccggctcaacaaggttatcagtgagctgaatggaaaaaacattgaagacgtcattgcccagggtattggcaagcttgccagtgtacctgctggtggggctgtagccgtctctgctgccccaggctctgcagcccctgctgctggttctgcccctgctgcagcagaggagaagaaagatgagaagaaggaggagtctgaagagtcagatgatgacatgggatttggcctttttgattaaattcctgctcccctgcaaataaagcctttttacaca

SEQ ID NO: 634056 - DNA, 400 bp, Homo sapiens
tgggcggatcatgaggtcaggagatcgagaccatcctggccaacatgggaaaaccccgtctctactaaaaatacaaaaaattagctgggcatggtggtgcacacctgtaatccgagcgactcaggaggctgaggcaggaaaatcacttgaacccgggaggtggagcttaaagtgagccgagatcgcgccattgcactccagcctgggtgacacagcgagactccaaaaaaaaaaggaaaaaagaaaagaaagagggagaagggggtgaaagtggagggagggagagagagagaaagaaaagaaagaagggagggaggcacgcaggcaaggaaggaaggaaggaaggaaggaaggacggcaggccaagagaccagtgggcacggaacgagggtaccgagca

SEQ ID NO: 634057 - DNA, 823 bp, Homo sapiens
gtgagatgccctgtgtccttttgtcagtcctaagtctaagaaagctagtgtccatttatttttatatcacttcccaagtgaggctggtggctccctttgggcagtgcagttctggaaacttcagggcctattcccatgtggggaacccagtcctgctgtgactctgggagggagagggccggggatacaatcgtacattcctggtaacagccctgtgattgtctgcttcaggttatcagtgagctgaatggaaaaaacattgaagacgtcattgcccagggtattggcaagcttgccagtgtacctgctggtggggctgtagccgtctctgctgccccaggctctgcagcccctgctgctggttctgcccctgctgcagcagaggagaagaaagatgagaagaaggaggagtctgaagagtcagatgatgacatgggatttggcctttttgattaaattcctgctcccctgcaaataaagcctttttacacatctaaaaaaaaaaaaaaaaaaaaaaaaaaaaaaaaaaaaaaaaaaaaaaaaaaaaaagagaggggggggcgcgcgcccaagagagagttctccccgcggggggcgccccggatttagcagcggcatcaccccagatttggtgggaacacaaggaggcccccaaaaggggaggacagccctatatataaagaccagaggagaggggcgcgcagagtaaacacacagctcggagacggggaaacacacggggcacacgcaggaccaccctggggagagaagcgccccttcagcccgcgggggggcggccacatcaggggacaacatacccaga

SEQ ID NO: 634058 - DNA, 141 bp, Homo sapiens
  misc_feature (5)..(5): n is a, c, g, or t
atagngggagtggagtgcgtgtgtctggctgtgagccctcccggctcgatgcaccctggacagatgactgaacggggatgccgctcgcatggtgccggggctccagtcatccccctggatcttgttggtacacagtgctgg

SEQ ID NO: 634059 - DNA, 1255 bp, Homo sapiens
  misc_feature (708)..(708): n is a, c, g, or t
ccaacctgttccctcccaggacccgagaatgtagcggggtccctgaggtgctgatgtccacatggacaccgaggtcagttccgggccaaagcggccagcgcaggggctgaccactcagacctcactcctcgcaggggtgagcgggcgacgctgcctcacgtcattgtcctgccctccaaggcccgcgctcgtcctctgacaggatgccctgacaccgcagtgcgggggcggcctcccagatagggccgcagtcgctaagtccgaggcggctggctcacctcactgagcccggctggacgtgggaccaccggtcgccgcggccagggaaccaccaaggagtcaaggcgagcctaccgccagcagcttctgcccgggcccacgcgccgttccgggtaggcccgcggcgcaggccacttccggcagcggtgcaccatgggacttgcagttcgctggcaaaggttgagtcccgggcgtggcggccgcgctccatgttgggagctgtaggcgccgcgtggcatgctgggggtgctaggtaccgaaggcagatgccgtccctttggactcgcttcgtccaacgcccccacgagtttcggtggcccttcgccccacgctataagagcagtcacttccggaactgctgcccttcgcctttgccgcgaaaagtgcctgacgggggctgggaagggggagggggaaggagtcaacgantccctccccgtcgtcattggctgagcgcctcgtgacgtcactctgaggcgcctcatgcggcgccgcgcacgggtcccagagccttctgggtagcggtttaaccccgcctcttgcgtcggcgccttccttttcctccctgtcgccaccgaggtcgcacgcgtgagacttctccgccgcctccgccgcagacgccgccgcgatgcgctacgtcgcctcctacctgctggctgccctagggggcaactcctcccccagcgccaaggacatcaagaagatcttggacagcgttatcagtgagctgaatggaaaaaacattgaagacgtcattgcccagggtattggcaagcttgccagtgtacctgctggtggggctgtagccgtctctgctgccccaggctctgcagcccctgctgctggttctgcccctgctgcagcagaggagaagaaagatgagaagaaggaggagtctgaagagtcagatgatgacatgggatttggcctttttgattaaattcctgctcccctgcaaataaagcctttttacaca

SEQ ID NO: 634060 - DNA, 423 bp, Homo sapiens
gggtggtcaggtcaggctgtagatgtatcctgtagactcaaggccgcttctcaggagtccagagacaatctcagtggcccctccagctgcatggctttaaatgccactgacatgctgatggttcagtagggggcgctgtggtgccctgccaagatcccttcacacagccagtgcccaggacccccacccccaacacactaccatgcatggtagctgccagatgcctacagcctcttttccagagacttgccctcaactgaagtcacttgccttcaaatgtacccacactcccagagaacttctcacagccaataaatgactgataaaggctttcacaggtaccttctgagagcctttatcagtcatttattggctgtaaaagttccctctgggcatttttcgggtttaaaacccagaggttct

SEQ ID NO: 634061 - DNA, 1885 bp, Homo sapiens
  misc_feature (708)..(708): n is a, c, g, or t
ccaacctgttccctcccaggacccgagaatgtagcggggtccctgaggtgctgatgtccacatggacaccgaggtcagttccgggccaaagcggccagcgcaggggctgaccactcagacctcactcctcgcaggggtgagcgggcgacgctgcctcacgtcattgtcctgccctccaaggcccgcgctcgtcctctgacaggatgccctgacaccgcagtgcgggggcggcctcccagatagggccgcagtcgctaagtccgaggcggctggctcacctcactgagcccggctggacgtgggaccaccggtcgccgcggccagggaaccaccaaggagtcaaggcgagcctaccgccagcagcttctgcccgggcccacgcgccgttccgggtaggcccgcggcgcaggccacttccggcagcggtgcaccatgggacttgcagttcgctggcaaaggttgagtcccgggcgtggcggccgcgctccatgttgggagctgtaggcgccgcgtggcatgctgggggtgctaggtaccgaaggcagatgccgtccctttggactcgcttcgtccaacgcccccacgagtttcggtggcccttcgccccacgctataagagcagtcacttccggaactgctgcccttcgcctttgccgcgaaaagtgcctgacgggggctgggaagggggagggggaaggagtcaacgantccctccccgtcgtcattggctgagcgcctcgtgacgtcactctgaggcgcctcatgcggcgccgcgcacgggtcccagagccttctgggtagcggtttaaccccgcctcttgcgtcggcgccttccttttcctccctgtcgccaccgaggtcgcacgcgtgagacttctccgccgcgttatcagtgagctgaatggaaaaaacattgaagacgtcattgcccagggtattggcaagcttgccagtgtacctgctggtggggctgtagccgtctctgctgccccaggctctgcagcccctgctgctggttctgcccctgctgcagcagaggagaagaaagatgagaagaaggaggagtctgaagagtcagatgatgacatgggatttggcctttttgattaaattcctgctcccctgcaaataaagcctttttacacatcaaaaaaaaaaaaaaaaaaaaaaaaaaaaaaaaaataaataacaacaaaaaaaaacaaagagagggcgcgcgccgcgcctctctaaaagatattatcctccgcgaggaggcgcccccactatcatttagacgcgcaatcaccgcgccgatttttctgttggactcacaaggaggtggcgccccctattatatgggaggaaggctcttattatataacagcgcagagaccgaccgcggggacgcgctcgttttttataacaccaagctcgctctgagagactgtgcggacacaaacagacttctcgacaaacggctggagcgaacactactttgcggagaaagaagacacaccacttctcgctctctgggggggggagggagcagagacaccaatatgtgtgcgtgagagaaacgcacctcccaaagagacagagagatttatatagcaggcggcctctacgggcgggagagacatctttctacaaacacgttctgatacaagctgcgtgtgtatatagacgggtgtgtgtgtacacacacaatcacgcgggggcgagaatctatgatcggcctggttggcgggctgttgatgacaagaaaccacctctgctcgtactcaacccgcgcgcgggtctaacctgagtgatgtctggccgggagacaacagttatggttatcacacacgccggaggtggcgaccgtccccattgtgcaatcgagacaagatggatggataat

SEQ ID NO: 634062 - DNA, 1681 bp, Homo sapiens
  misc_feature (529)..(529): n is a, c, g, or t
  misc_feature (532)..(532): n is a, c, g, or t
  misc_feature (537)..(537): n is a, c, g, or t
  misc_feature (539)..(539): n is a, c, g, or t
  misc_feature (565)..(565): n is a, c, g, or t
ctaggagactcacaagttcccaccccttttcctttgggccttcttccccccaggtattacacagccggatttcccataatccctccggggatttcttccagcgttctcgggccttaccttagcgggttttagcatttccatcgaagggtttttcgatggagagggattcttcttcatacatccaccgaccttccttcttctgttgtgttcctcggttttctttgtggggtcgttggtcatttccttcaaagggctcttcacttgcttctctttggtattccttcgtctctacttactctctcattttttgttatgctcatcctggggtaggtcctagtaactcgggcctgctagagcctgaagtgtggtgttggctcttagttcttctttaagattaggtatattggtctcgtttgcattcttttttgggtttagttgttctttttggttttttttttctgcttattgttttctttgttgtgctggttgttgtttgttttgtttttttgttgttttgttttttggttgnccnttggngntgggggaggagttgccccctaggcanccagcaggtaggaggcgacgtagcgcatcgcggcggcgtctgcggcggaggcggcggagaagtctcacgcgtgcgacctcggtggcgacagggaggaaaagaagatcttggacagcgttatcagtgagctgaatggaaaaaacattgaagacgtcattgcccagggtattggcaagcttgccagtgtacctgctggtggggctgtagccgtctctgctgccccaggctctgcagcccctgctgctggttctgcccctgctgcagcagaggagaagaaagatgagaagaaggaggagtctgaagagtcagatgatgacatgggatttggcctttttgattaaattcctgctcccctgcaaataaagcctttttacacatcaaaaaaaaaaaaaaaaaaaaaaaaaaaaaaaaaataaataacaacaaaaaaaaacaaagagagggcgcgcgccgcgcctctctaaaagatattatcctccgcgaggaggcgcccccactatcatttagacgcgcaatcaccgcgccgatttttctgttggactcacaaggaggtggcgccccctattatatgggaggaaggctcttattatataacagcgcagagaccgaccgcggggacgcgctcgttttttataacaccaagctcgctctgagagactgtgcggacacaaacagacttctcgacaaacggctggagcgaacactactttgcggagaaagaagacacaccacttctcgctctctgggggggggagggagcagagacaccaatatgtgtgcgtgagagaaacgcacctcccaaagagacagagagatttatatagcaggcggcctctacgggcgggagagacatctttctacaaacacgttctgatacaagctgcgtgtgtatatagacgggtgtgtgtgtacacacacaatcacgcgggggcgagaatctatgatcggcctggttggcgggctgttgatgacaagaaaccacctctgctcgtactcaacccgcgcgcgggtctaacctgagtgatgtctggccgggagacaacagttatggttatcacacacgccggaggtggcgaccgtccccattgtgcaatcgagacaagatggatggataat

SEQ ID NO: 634063 - DNA, 502 bp, Homo sapiens
ctcaaaaggcgagtcgggtatcttcataatttcatgaagacatggcacagagggtccggctaccttctactttccgtgtttataaaagactgtggattcccttgcagttcttcctgtaagaggtgtatgacgctgacatcatcactctcctccacccgcctcctgcccttttctgaatcagtgaattataggaatctgagaatgagctcctgtttcctgcacatggttggggaacattaaaaaaaagaagacagatgagggatttataagcaagaggacagaagaataatagccaacacaatgaagtctagttcaaggcctgcgattcccaatggctgggctacacggcattaatagcagtgtctctcaccctttcagacccttctctcttatttcagacccttctgccttattcttgtggggatgggctgggactgagaaacagctagtataatcatggccaaaatgaaactcacatgtacatgggggcttccaggtctgg

SEQ ID NO: 634064 - DNA, 1815 bp, Homo sapiens
  misc_feature (708)..(708): n is a, c, g, or t
ccaacctgttccctcccaggacccgagaatgtagcggggtccctgaggtgctgatgtccacatggacaccgaggtcagttccgggccaaagcggccagcgcaggggctgaccactcagacctcactcctcgcaggggtgagcgggcgacgctgcctcacgtcattgtcctgccctccaaggcccgcgctcgtcctctgacaggatgccctgacaccgcagtgcgggggcggcctcccagatagggccgcagtcgctaagtccgaggcggctggctcacctcactgagcccggctggacgtgggaccaccggtcgccgcggccagggaaccaccaaggagtcaaggcgagcctaccgccagcagcttctgcccgggcccacgcgccgttccgggtaggcccgcggcgcaggccacttccggcagcggtgcaccatgggacttgcagttcgctggcaaaggttgagtcccgggcgtggcggccgcgctccatgttgggagctgtaggcgccgcgtggcatgctgggggtgctaggtaccgaaggcagatgccgtccctttggactcgcttcgtccaacgcccccacgagtttcggtggcccttcgccccacgctataagagcagtcacttccggaactgctgcccttcgcctttgccgcgaaaagtgcctgacgggggctgggaagggggagggggaaggagtcaacgantccctccccgtcgtcattggctgagcgcctcgtgacgtcactctgaggcgcctcatgcggcgccgcgcacgggtcccagagccttctgggtagcggtttaaccccgcctcttgcgtcggcgccttccttttcctccctgtcgccaccgaggtcgcacgcgtgagacttctccgccgcctccgccgcagacgccgccgcgatgcgctacgtcgcctcctacctgctggctgccctagggggcaactcctcccccagcgccaaggacatcaagaagatcttggacagcgtgggtatcgaggcggacgacgaccggctcaacaaggttatcagtgagctgaatggaaaaaacattgaagacgtcattgcccagggtattggcaagcttgccagtgtacctgctggtggggctgtagccgtctctgctgccccaggctctgcagcccctgctgctggttctgcccctgctgcagcagaggagaagaaagatgagaagaaggaggagtctgaagagtcagatgatgacatggacggagatcctcccccagcggcaaggacgtcaagaagatcttggacagggtgggatatcgagagcaggagacgacgaccggactcaacagaggtcatcagacgagctgagtggaaaaaacattgaaagacgtcattgaccaggggtattggcaagcttgcgcaggtgtacctgctggtggggctgtagccgtgctctgctgaccccaggatctggaagcccctgactgctggttctagcccctgattgcaagcagaggcaaacacagatgacacagacggacgagcctgaagaggtcagaggatgacaggggagaaggggccacactgaatacaattcctgcttcacgtgagatattaggcagattgaaaaatcaacaatcgatatacaacagcaaaagactatagataataagataaaaaaaaataggacaaaaaaattatataaaaaggaagccaagcatcacggatcaaatagaaaaggcaaaaaaaagaaaataaaaggggagacagcagaagcagtaaagcaataagagtagaaacatatggtagaaacggaacaggaaaccagagtaaaagtaa

SEQ ID NO: 634065 - DNA, 107 bp, Homo sapiens
tgctggtgcagtacaacctggaattcgaggctcgaattcgagctcgaattcaagcttctaacgttagaagcttgaattcgactcgaattcgagaaatattgagattt

SEQ ID NO: 634066 - DNA, 842 bp, Homo sapiens
caaaaacaataagaactgacagacgaagcaaaaacaaagaccataactgagtagaactgaatctgtcacttgtataatctgaattaaatttaaatgaagcagccatcactattttcacgatgtctcgtagttatgctcatctgatcattacatgttcattttcttttgccactcttcctccaaaatgactcaaaggtccctaaggaagctgtacatgccttatacattcctttggacgtagaatagattatctttcttcctctctttcctctctctctctctctctgttactttctctctatatattctgaatgtttataagcatttactgacagtctactcatttctttcttcttttctttagatgcaattaactgaatacttagaaaatacaaattactataataagttcttgtgaggaatttatgacaacgtttcatgatgggagtttaaggttgagtgttctgctactggcatgtaccaggttgagaggcacagagtttccatacttgagtactgcttatgtgaagtcacagcttgtatcaataacttaaaacttgatcattagagaaattcaacatcaaaaccacaatggagattatcatctcacaccagtcagaatgggcattattaatcgtgtcaacaaatgacatgcctgggaaggtgtggacgcaagaaagttttgctttatacactgttgataggagtgtgaattagtccaaccattggcgaaagcagtatgggactccccaaaaggggtaaaaggcggaggtatattcccccggagccctatttggcatttcccccggccagaagttttacacaaggcgggggggtccccg

SEQ ID NO: 634067 - DNA, 1076 bp, Homo sapiens
gtcctttccttttcctccctgtcgccaccgaggtcgcacgcgtgagacttctccgccgcctccgccgcagacgccgccgcgttatcagtgagctgaatggaaaaaacattgaagacgtcattgcccagggtattggcaagcttgccagtgtacctgctggtggggctgtagccgtctctgctgccccaggctctgcagcccctgctgctggttctgcccctgctgcagcagaggagaagaaagatgagaagaaggaggagtctgaagagtcagatgatgacatgggatttggcctttttgattaaattcctgctcccctgcaaataaagcctttttacacaaaaaaaaaaaaaaaaaaaaaaaaaaaaaaaaaaaaaaaaaaaaaaaaaaaagagaggggcggcgggcgcgcgcgtcccacaaaatattcttctcccctcgggggggcgccccagtttttcgcgcgcgcgtcccccacggtttttttgtgtgtgacaaagagggggggcgctccccatatatgggagaggagccgcattatattatatacgggcacagaggcaggcgcgggccgcgcgctgcatttatacaacaaccgccgctctgcaggaagtccgggaacaacagggcgcgcccacacgcttggggagcaaactctcttgctggaagcgaagaggggcaccctccctacttactctgtgcggggggggcggcgggcgaacactatatgtggcggacacacaacacactcactcccctatacgcgagaaagtatatttttataaagcgcgccatcctactggaggaggggggacatcatctatataataacacattcttgtacagagcggcgcgtgcttagactggcgggggcgtgtcctatccaacccaagcagcgcgcgccgcatatatatgtgccgtgcgggccgcgctgctgtgatgaagaacaaatgtttgtgtgccgcctacctaacgcggcgagcgaactgtatgttgatctcttctgtggcgtacaacgaccactttttttttttatatcactcgcgcggaggcgcccgggtgtgcaaatcagcacc

SEQ ID NO: 634068 - DNA, 228 bp, Homo sapiens
  misc_feature (97)..(97): n is a, c, g, or t
ttccgcgcgcattctgattttattagagaacattttgcaaattaaattttacaatttaacattttacaattaaaaattttagctgcgattacataanctacaaacttttcaaaaacactacaaaaaatcttttatttctttaaatttttctgttccatgttaagctcctaagatatattttttctttcagcttcattttcatcttccttgaaaaatgaaaaatcacat

SEQ ID NO: 634069 - DNA, 407 bp, Homo sapiens
ttgaaattttaaccccaaggtgatggtattaggaggggagactttgggaggtaattaggtcatgaaggtggaacccaagggaatggaattagtacccttataaaaaatgagaccccagattgggcacggtggctcacacctgtaatcccagcactttgggaagctaaggcgggcggatcacctgaggtcaggagttcaagaccagcctaggaccaacatggagaaagcccatctctactaaaaatacaaaattagctgggcgtggtggtgcacacctgtaatcccagccagatactcgggaggctgaagcaggagaatcgcttgaacccgggaggcggaggttgcggtaagccaagatctcgccattgcactccagcctgggcaacaagagcgaaactctgtctcaa

SEQ ID NO: 634070 - DNA, 96 bp, Homo sapiens
ttttttctttaatctgcgtgattgctttattggtacaaaaagtttccagtaacagaaattggttttaaaaaaggacaaaaaagtcattttggaaga

SEQ ID NO: 634071 - DNA, 183 bp, Homo sapiens
aaaaaaaaaaaaaaaaaaaaaaatagcctggcagggtggggcatgcctgtagtcccaggggcatgcttggggggttgggttgaggcaggaggagccctggagtttggggggtcaaggctccagtgagttgtggtcccgctactgccctccagcccagggggccaaagtgagcccttgtcccca

SEQ ID NO: 634072 - DNA, 84 bp, Homo sapiens
gcaaggaacccttttcctccctcccccctcccccctcctcaatgtaggggccttggatatcctgtttgttaataaaggcaattc

SEQ ID NO: 634073 - DNA, 483 bp, Homo sapiens
ctaagacatctgttatagcatgccatgttgacttctgattagcctcctttgagacctttgaatggctcctgattactactttacttactgtccctagtggaagaacatgtcaacctggatgttgtcacacagactccaggctgtgatgcgtacggcatccatgttctggagggttgtctgcacacgtgccctttcttcatggtctgtaagccctgggtctgggaacagtggtgcagagatctgcttgttttgtggctgaccaagaccacacttctgtctgtaagttccctcagtaaatcacccaataccaacaaaatagatttgtctttctccttctttagtttctcagctccttcacatttggaaccgctttgcatatatgcctccttcacagaataggtactttcgtgtttgtttgtttgttgagattgcaccatcacactccagcctggggggaaagagcaagacttcatctctaaaaaa

SEQ ID NO: 634074 - DNA, 674 bp, Homo sapiens
ctcttattctgttactcacgctgcactgtgcagtgacgaaagtggctcactgcaatgtgcttctacggtggttaagctttaatgctgcctccgacgtgagagtatgatgtgtgacctgcaggcattagaacagccggatagttcactagtccgatagctataagtagtttgagctgagacggatttggctctgatgaacactctggcgtcagacatatgacatgaggagagcctcctttcagcctctgaaagcgctgtgatgacaggtatgagacgatggaacatgggttcatgtgagagatgagagagtaatcgtatacaggtgttatgaacgacatgtttacaggccatattgtattgagccttatctagttcactgatcatgttgccttgagagaaacatcattctggcttacatgcacgttcagtcatagaaccttacgttggactccattacgacatagaatctattgctcacatgttagcagtgacgtccgatgttcacactggccacccatgacctttgcgtagacctaatagatacagtagtcaattaatacccctttagctaagattttagatagcgatcagtccccaattggctctattgtcaaacctattaccatcaaacttgggtgaactttacaaatgtagtgactgtaatccctttcccc

SEQ ID NO: 634075 - DNA, 418 bp, Homo sapiens
ctctcttatttaggaacacgcttcatgaacggctgacgatctatggcccgcacgctcctgctcctgactaaccgatagacgctctcgccgaggaacaagtcggccaggacgcccgcgcgcaacagccatgggtgttaaggataccgcaaaaacacccgtggagccgcaggaggcaatgtaccgaattggaattaccctaacaagccgaaacgtgaaatccttgaaaaaggtgtgtgctgacttgataagaggcgcaatagagaagagtctcaaatggggaccagttacgaatgcgtaccaggactttgagaatcactacatgactcctagtggtgaaggttctaagacttgggatcgtttccagatgagaattcacatgcgactcattgacttgcacaggccttatgagattgttccc

SEQ ID NO: 634076 - DNA, 1146 bp, Homo sapiens
gccctactctttctggtgttagatcgagctaccctctaaaagcagtttagagtggtaaaaaatagaaaaaaacaaaccaaacgctcgcagccacaaaagggatgaaatttcttcgtggacatcctccgtggttctcccggttacgtgatcgtcgtgctccctagaagtccttcggtgaaagcttttaattcctaagaaggagaaaatcagtcaccggggaaaatcgggcgtgattacagggagcgtgggcagtggcaattggggagcacgtgcctgccatagtgaattggcgtaaacttctaaaacgcaagcggggactcctcggggactactaacttaagcatgtggcacgggaggaaaacagaatgccaaaaatgcacgagggcacggggcgtgcccaagggggtctcataccctatgggcggaagacacgtgccagcaaaccgagaaagaaatattacaagcctccgtgccacaacacaaggggggaagcgcaagcaacactggggcacactgctccagcgcacttccgcgacgcacattaacgcgggcggggtgactaagctcctagtacacactccaggcactcgggctcgggcctaaccaccaagaatcccctcgccaccttgccaacagacctcttcgggacacggctcacacgtcgttctgtgcaacacatcatcatgggggaccaaccaacaaacgggcccatcacacgccataggcaaacggacgcaaggcaaactcaccccatggccaatactgcgccacctggcgcacacacgcaacccggaaaccatcgtctacggcaccctaactaaaacgcgcaaacacgaggaccaagccaaacaaagcagacagcgggcgcccccacaaacctgtgcgcacggacccgggccgcccgacacacaaccggggacccaaccacagcccaccgccccaactagggccaacccgccatacaacacaccagccaccgtggggacccctgggaacccgacagcggtacaacgggaacacgcacccagacacaaacagacacacaaaagcaaaaacagacagacagagcgccggacagcaaaaggaacaacgggagaaacgccagctaaacacccacgccaccaccatgaacccacacgcacaaga

SEQ ID NO: 634077 - DNA, 679 bp, Homo sapiens
  misc_feature (1)..(1): n is a, c, g, or t
  misc_feature (82)..(82): n is a, c, g, or t
  misc_feature (92)..(93): n is a, c, g, or t
  misc_feature (105)..(105): n is a, c, g, or t
  misc_feature (109)..(109): n is a, c, g, or t
  misc_feature (119)..(119): n is a, c, g, or t
  misc_feature (124)..(124): n is a, c, g, or t
  misc_feature (127)..(127): n is a, c, g, or t
  misc_feature (136)..(136): n is a, c, g, or t
  misc_feature (140)..(140): n is a, c, g, or t
  misc_feature (147)..(148): n is a, c, g, or t
  misc_feature (163)..(163): n is a, c, g, or t
  misc_feature (166)..(166): n is a, c, g, or t
  misc_feature (171)..(171): n is a, c, g, or t
  misc_feature (181)..(181): n is a, c, g, or t
  misc_feature (192)..(192): n is a, c, g, or t
  misc_feature (209)..(209): n is a, c, g, or t
  misc_feature (245)..(245): n is a, c, g, or t
  misc_feature (281)..(281): n is a, c, g, or t
  misc_feature (291)..(291): n is a, c, g, or t
  misc_feature (306)..(306): n is a, c, g, or t
  misc_feature (322)..(322): n is a, c, g, or t
  misc_feature (335)..(335): n is a, c, g, or t
  misc_feature (348)..(348): n is a, c, g, or t
  misc_feature (361)..(361): n is a, c, g, or t
  misc_feature (386)..(387): n is a, c, g, or t
  misc_feature (410)..(410): n is a, c, g, or t
  misc_feature (412)..(412): n is a, c, g, or t
  misc_feature (442)..(442): n is a, c, g, or t
  misc_feature (444)..(445): n is a, c, g, or t
  misc_feature (456)..(456): n is a, c, g, or t
  misc_feature (550)..(550): n is a, c, g, or t
  misc_feature (609)..(609): n is a, c, g, or t
  misc_feature (675)..(675): n is a, c, g, or t
nttggcagcccctgggaagaggaggccttggggccagagctcttgccaggcctagatcgctaagaaggtgctgggtctgggncccgccttgnncgggccccccanaccnagctggaggncaganggnaaagagggnagcnagaaagnnggggtgctgggaggnacnccagnaggggggggnggcctttggtntctacgaggctaggaanctggttctggttagaggaaccccgtgggggcaaagnggagagctggtccctgttagaggaaacgctggagcnggatgggggngggggacttggggtntggtctcaataaggcntggaaatggtctncgcttaaaagaanacctctgtatttngggagtggggtggggaggaaatganngggctgtgggaggaatgcctgtnantcgtgggtgggaatcagtccagggggcttngnngggggtccganggaaaagctgcgggggtcgtctgcaaatgctgggagctcaggtcctggggaaggaggatgtgggcgggggtcctctccctcccacgagtgccancgctccccaccccatcctggctggctccaagttgccatggagaccactcacaccggggnaacgtaatttccagggaacgttccgaattttttgggtcctccgggagacacccacaaaccagccancgtc

SEQ ID NO: 634078 - DNA, 1475 bp, Homo sapiens
  misc_feature (70)..(70): n is a, c, g, or t
gtatttatagtagttagtgtcaaatatatgtggtgttggtaaagaggggaggtgatttattgttgttgtngcacacacaattggtttgtttgcacaacagaggggggtgtcgctacatatgagtgttgcggccgacataaaggttgtttctaaagggggggaggagtcccccccctaatatggggtgtaatataatcagccccactctgtttgggtggggagacaggatattgtgtgcctcgccccgtgttgtgtgggaaagaaccacaagtgtgttgattggtgtagtctacgctgtctaggtgcgacctaacctctgcggttgttctgaacaagcatattagttcgatcctcgaacaaggttgttatatccccctcaataggggggggtaagaagcaacccagaggggtttgaacaaaagaggggtgttgtggtggcggcgccaaaaatctatgtgcgtccgcctcgtgatgtgctcctgtttctcaaccgtggttaaagacacgttagattagtgttctcgcggatgatgtgcgtgttgtaacgaaagacggtgtgacgcctctcctcttgggggaccctgcgcgggaaagatgttccacattcagggtgtgtgtaggaagaaagagaaacacccccgctgtgtcgtgagcgggaatatatatagagccgagggtacccacgtgttgtgtcgtataagagatatatggtggctacacggggggaaaaatttcgtgagagagatatgttctgtgcgtgagaaagtgtgtaaaatctcacacgtgtttagtaagcgcctcccccccgtggtgtgaatttggagagagagagtgtgagccgcggaggtgcacacacccgcgcgtgtggtgtctctgtggtgactggagatgttcacaccctgagagaggtgtgtgttttgacaccacacacactctcacacctgcggcccgtctcaagagtgtggtgtgagagggggtgaggagacacctcgtggtgtctataacaccaccctctcgcgcagaaagagagtgtcttacacacagagaaacgctgtgtatataaaggtgttattgttctaaactgttctctcacaagtgtccctcttgttttgtgtgtttgtgttttcttggggagaggggtgttttttggggttgtttatttgtgttttttttgccagcagggatgagagatataaagctggagacaataagagagaaataaggggggagagagagagagagatgttattttgcacataagagatatgtcctcatcgggaaaaaccacaaggtttgttaagaaagtttgcctctatactcggtgtttcccaccggagagagaggagaaaaaaacacacttccacccctcttttttttaaagtgttgtttgctttttatgtttgtgtattttgtgagaaaaatattagagccattattttttaggtttaaaattataaaactaatttcaaaataga

SEQ ID NO: 634079 - DNA, 278 bp, Homo sapiens
acacagcgctctcatttttttttgatgcgcataagacatccttaaaaaaatccggttttttttttaagattttctacttatcttgggttttaagggataagtggttggaaagtgaccggcattcgtatagtttccttcacatttctggtgcttgaggttataggagattcttaaaacggggggttaatggttttcaccaatttggtattttttctactattatttcttcaatttacgggggcttttaaagctttggttctgttaattctccgcggggt

SEQ ID NO: 634080 - DNA, 119 bp, Homo sapiens
taccacagttcacacatcacactcacgtctcatgttcattcacaggtcacacagtctcacattcacacatgcattcacacaccacacgatcactctcacattcccacccgtctaggagc

SEQ ID NO: 634081 - DNA, 139 bp, Homo sapiens
atacgggataatcgcctatctagggcttcttatgagcaagaatctgtccctactcggttgtagaccttatctgagtagaaaagctattacctacaacaatttcacagcaccaaatctccacctccatcatcacctcata

SEQ ID NO: 634082 - DNA, 1053 bp, Homo sapiens
  misc_feature (174)..(174): n is a, c, g, or t
  misc_feature (207)..(207): n is a, c, g, or t
  misc_feature (209)..(209): n is a, c, g, or t
  misc_feature (214)..(214): n is a, c, g, or t
  misc_feature (227)..(227): n is a, c, g, or t
  misc_feature (230)..(230): n is a, c, g, or t
  misc_feature (235)..(235): n is a, c, g, or t
  misc_feature (243)..(244): n is a, c, g, or t
  misc_feature (251)..(253): n is a, c, g, or t
  misc_feature (256)..(256): n is a, c, g, or t
  misc_feature (258)..(259): n is a, c, g, or t
  misc_feature (265)..(265): n is a, c, g, or t
gtagggtgacttatcagtgcgtgctcgggtgagggggaggaagacctattctgaactgatctcttatttaccaccggtaccgataataagtcatgattgatcaagatgtgttcagctcctgagccgggacattcaaaaaggaaccacccaaagaaaaagagtttcaaagcccanggctcagaggggtgcgcacaacaaccttatttngngctgngaatccagagctnttnattanacctaacnnacctgtnnnggntnncggatnggtaactctttcactttgcgtggcatatagtggttatctacatgcaatacaagagaataaaaaggatctctatgaagctatgatagtgagggggcacagttattttgaagggggaaacattcaaaaggggataagtagggcgggtatagggcagagtggacctttattaaaggttcgtgaaatcttcaaagtgaagagaccttgtgagtgtacagtatcatgtgtctgggtctagaacatgctaatgaagagagaagatagcagtggcaagcagacaactgtcgtaaatttggtcctttcaacagttgcaggcattatctcattctttttccacagagtgagcgtcataatatggttgctttccttacctcttataaaagtgccatgagaatggaagtggtgagggtaaattattaaatgtctgtagtaactaaaaggtagccaatggctggttaaagaaaaagagacagagaagcaacgaacaaacacagcgaacacacgaaggccaggagccgatacggcccgccacgcgaaaaaggccgtcgcgcgacagaacactcagtgtggaggaacaggggcgacacacaaagaaagagaaccacgaccaaccgatgggggtaaccaaaacgcagcgagcacccaagagagaaacacacctggggcaacacagaacacaagggcgaagaggaactatgcaccaaatgaaacaacgcgcaggagggagacaccgcgaggacgcgcggagcaaacagagcccagagaggaggagtactacagagagaaccaag

SEQ ID NO: 634083 - DNA, 339 bp, Homo sapiens
  misc_feature (174)..(174): n is a, c, g, or t
  misc_feature (207)..(207): n is a, c, g, or t
  misc_feature (209)..(209): n is a, c, g, or t
  misc_feature (214)..(214): n is a, c, g, or t
  misc_feature (227)..(227): n is a, c, g, or t
  misc_feature (230)..(230): n is a, c, g, or t
  misc_feature (235)..(235): n is a, c, g, or t
  misc_feature (243)..(244): n is a, c, g, or t
  misc_feature (251)..(253): n is a, c, g, or t
  misc_feature (256)..(256): n is a, c, g, or t
  misc_feature (258)..(259): n is a, c, g, or t
  misc_feature (265)..(265): n is a, c, g, or t
gtagggtgacttatcagtgcgtgctcgggtgagggggaggaagacctattctgaactgatctcttatttaccaccggtaccgataataagtcatgattgatcaagatgtgttcagctcctgagccgggacattcaaaaaggaaccacccaaagaaaaagagtttcaaagcccanggctcagaggggtgcgcacaacaaccttatttngngctgngaatccagagctnttnattanacctaacnnacctgtnnnggntnncggatnggtaactctttcactggtgggggggatgcgtggcttctccctttcgctatcggccgagcaattcgcaggaccgt

SEQ ID NO: 634084 - DNA, 326 bp, Homo sapiens
  misc_feature (2)..(2): n is a, c, g, or t
  misc_feature (8)..(8): n is a, c, g, or t
  misc_feature (45)..(45): n is a, c, g, or t
  misc_feature (51)..(51): n is a, c, g, or t
  misc_feature (68)..(68): n is a, c, g, or t
  misc_feature (79)..(79): n is a, c, g, or t
  misc_feature (83)..(83): n is a, c, g, or t
  misc_feature (90)..(90): n is a, c, g, or t
  misc_feature (107)..(107): n is a, c, g, or t
  misc_feature (131)..(132): n is a, c, g, or t
  misc_feature (146)..(146): n is a, c, g, or t
  misc_feature (152)..(152): n is a, c, g, or t
  misc_feature (195)..(195): n is a, c, g, or t
  misc_feature (221)..(221): n is a, c, g, or t
  misc_feature (224)..(224): n is a, c, g, or t
  misc_feature (238)..(238): n is a, c, g, or t
  misc_feature (244)..(244): n is a, c, g, or t
  misc_feature (266)..(266): n is a, c, g, or t
  misc_feature (284)..(284): n is a, c, g, or t
  misc_feature (309)..(309): n is a, c, g, or t
  misc_feature (321)..(321): n is a, c, g, or t
gncacctncattttctgtaactcaatcaagactggtgggtccatngccctngtgttagttcatgcaantcagtgtgagncccnaaatganaagtttcatctcccganatgcagttccttagatgcccatcnngacgtgatgccgcngctccntgtaagcaggtgcaatcctagataacacagctagccagctagnagacacttttttctccaaaatgatgnctntcgggtggggagtngtaagnggaagagctcccaccctaaggngcacacactgagttgctnatgcacttccttgttcaaaataaangtaactgcttantctta

SEQ ID NO: 634085 - DNA, 242 bp, Homo sapiens
cggtcacgttgggtgctgcaatcccatgccactcggaggctgaggcaggagaatcgcttgaacctgggaggcggaggctgcaatgagcagagatcgcgccgctgcagtgagcagagatcgcaccactgcactccagcctggcgacagagcaagactccgtctcaaaaaaagaaaggaagaaagaaagaattgtgcacaaactgacaaacctagatgatgttttccccaacggtgaccggcga

SEQ ID NO: 634086 - DNA, 907 bp, Homo sapiens
ggtcgctgggccgaaaggtgcgcgagcgctgcccgcgcgggaccacaacccaagtcgcggccgccgagcatgcctgggtgtgggcgctgtgaagaatgcgtccctggcagggcgcccaagtacatagagcacttcagcaagttctcccgcgtccccgcgtgtccatgaagcagtttctggacttcggatccagcaatgctgttgaaaaaacctctttcaccttcctcaggcaaggagctgcctgtgagcgtggcaactatcatgaagagatcaagctgttcccggaccgagtgcctgagccacacccttctgtgcagctggttgcagagctggtatgtccaggaagcctccgtgaccctcatggagttccgttggaccgagggatcgcgaggaccaatcgcacccttgagccagtttcactgacgcccgtggttcaaccattcgggaaaccgggcacaaccgcgcgtgtgttgcccaaccattggcaacaaaggcgtgtttgaggtacaaggacacctacggcggaatgaccccgtttcaaaccagaaacatcaagtacttccgtgcacgcggttctacatcagccgatctccatccggagtgcttcaatcagacaagaacaccctcattttggtgggaggaccaaccagccaattccaaacatgaggcattgacaccaaatggacgctctgaggtggtcaagtgctacgcatggtaaggtcctgtgtgacagttactggctcactggcctggatctggagtcatgcgcactcaaagccggtaatggtagtcctgcctctacatgtttgtgtcaaaagagggagggaagcagagcagctccccacaggtggtggtgaatcaacagagagcgtcaagagacatataaaccggcgcggttgttcccaag

SEQ ID NO: 634087 - DNA, 1026 bp, Homo sapiens
  misc_feature (486)..(486): n is a, c, g, or t
ggtgcaattcaagatgattcataggaggcatcatgctgtacaacaatgaacacaatccccatggccactgaccgtgcccatagccaccttcgggccgaggttacctgagagtcgcaggtggatcgtccgcatgatacagcgactatctgttccttgcatattgagtgcacgctggagaagaacaccgtagggaggcttctggaagcataatctcatctgatctgcctagcagatcagtaatcactcctgtacagtagacagcaggactgagagacccgtcagtgagcttcacgtcttagaagagcagattccgacgccaaaagcgtagcatacgtacccttgttggccggaatggtttccgcagccaacaggcgtaacgcactgacgtgccacagcggtagtcgactcaggcagggcttaagatgcctgataccgcatcatagcatatggcaatatatgttgaatcgtcttgttgagctactttantagaatcatggctcccacgcaagagagctcttccaagctcatctcctcacaatatctcaataacgcttcttattcagagagaaaactaagagtgaaacccacgctgaacaaaccgaatgcatcctggcactcttgtgatattactatatgctatcctagtgcagagttgtgcttatcctgcgcatacgccgatacccatggatggtcctgaggagtcctactggggaggtcggttagcaattactactgggaatattgggatggatgccacagggagctgcagagacagcgattttcgtatcgtatcacatgggtctctggatgtctcgatgcggcgtgtgtcactgtgccgccttgtgtgctggcttggtcgacaaagggtccacttcagctggagggcccctcgcttgctgcctgtttcgccaagaccgaggtctgtctgggatggcgggcacgacttcaagccgcgttcaagtggcttcaggcttcatcgaaggtgtctcggggtcatgggggtgtttgcctccatttcgtcgaggg

SEQ ID NO: 634088 - DNA, 142 bp, Homo sapiens
tgtgcgggcacggtgataaggagagaggtcagagtggtcagtggaaaaggaggattcagaggactctgagcttggagcagagactgaaaggagcagatgggagagtctgaagggagtctggagagtctgaaggcagtctgga

SEQ ID NO: 634089 - DNA, 194 bp, Homo sapiens
agctcgtcgttgtactatgaggggacgcggaaacagttggtgtagtacaaagattaaagctacctagaccagtactcaccacaaggcacacctacacccctaatccccatactagtaattatcgaaaccatcagcctactcattcaaccaatagccctggccattcaacgcctccgggacattcaacgcctccg

SEQ ID NO: 634090 - DNA, 334 bp, Homo sapiens
actccttccctctcacacggaaggaggcccaggagaaactggtagcaggccgagatagaaggccactgattgctgaggctgacttggcctcccttatccgccgcattcatgcttgttcaggaggagctggaccgggccccggagcgcctggctactgccctgcataatctggaggaggccgataaggcggctgatgagagcgagagacgaatgacacggtcatctaaaaccgggccatgaaggatgaggagaagatggagctgccggatatgccgctgaaggaggccaagcacatcgctgaggattcagaccgcacatgtgacgaggtggcctg

SEQ ID NO: 634091 - DNA, 127 bp, Homo sapiens
gttacttttttgtccccaacctgagatgtatgaaggctttggtctccctggagagtgggtgtgatggcatgccagtgacttacctgtacactgacttgagaccagttgaataaaatgtgcacacctt

SEQ ID NO: 634092 - DNA, 876 bp, Homo sapiens
ggatggactgaggcttctggattcctgggtctgtgggaggagggactgcggctcctggattcctgggtctgtgggaagagaggagtgtctgagggaggaggggctgggacaaacttccaggtctctagccttcctggctaacgccccccgaggccggacttcccggatccagcctctattgaggatttgatgctgaggcctcacggggctttggaggtgaaagaggcccagagtagagagagaggagagatcgacgtacacggggatggctacggggaaccccctatgccggaaaggtgtgtggctttgaccccggggtgcgggcggcgactcaatcgagcactggtatcgtgcgcgccttcgatgaacagcgggccccgaggtggttatctgcgcacaaggatgatgtctgggggcccgtggcccttggagacatcgagtcgtcctggaagctgtctgtatcctctgtgatgtgactcatggaagatgatgttgaagaccctggttttctgagaccttccgtcgattttggcccgagtggaatcgtgttgtcaaaaaacggctggacacacctcacctcggcatagaggctggggaaaccctctgcccaagggattaccgccatggtgcttgtcagctgaacctactggggacgtacaccttgcacgagattcgctatccccatacctgaggaagacgtccgggaatcgtcatcgatcatctccagcctgtggagacaactgtggtcaatgcccaagacacttccctattgtgggcaccaagggcgccgataacagacatgacccaacgctttggccctggactgacagtcctcatggtgtccgagtcactgtttctccccaggaagctctggcc

SEQ ID NO: 634093 - DNA, 117 bp, Homo sapiens
taccgcacgtttcggagtttggctgggacaggggtagtggttgaaggggagcaggtagatgcatcagagataaaaggataatactgggtgtggctgaggggctgcaggctctctgtg

SEQ ID NO: 634094 - DNA, 1023 bp, Homo sapiens
  misc_feature (389)..(389): n is a, c, g, or t
gcccacactgtgtgctgttgcgcacacgttccagaccgttcacgatattgctgacaggcggggtataagggtgatgccagctaggctgcgtggagtcgggaccggagatgaagactgctcagcaaatctgtccccagtaagaatgggcgggcgggcggtgtggttggagcgctgtcggtctgggcgtggtccggaggtgctgcgttctctgacacctggtgcggccggggcgtacgtgcctttctgtctgcacgtgtgtattgtctctccgagtgccaccggtgcgggccgcgtacgaccttgctactcggactgtcatcttcggcctactatcctgtctgccctgttgtgccatgccgatgccatgtggctcgggccctgcgtccctnttggggcaatgcatgtaatcccgggggatttcatcaactatgtctacgtccatactgacgcccatcattcgttgatcaagtccatcttctcgtcgagaaggggagcatgccattggtcgacgtacccgagcttgctacgttctgggtcgcttccattcttcctgcgagcgggttctgttggctttgtgtcatggtcccaaaatatgtggcttcgcacgtagtgcgcctccaacgacgtatctagtcgtaggcatggcacgtcatcgatacccttaaacgtgcagatccgagagggtatggcacgtggtcgctgcatggtggcgagagtgtaccctggagccaattgtgttttgcgagcccattcaggttccgttactcgcagaaattccgaacctctgtcaatcgaaacactggaaagcatgagagttatggcctgagggcctgtaggtccatgggcgaacgatgcttgcccgaaaagattacgggtggtgcgatgaaccgctgtgtgcctaatctgggtggccctgggttgtgggatgtctgtcctcctcgggatcctgttcttccacaatgaacctgttgatgtttggcttcgccaacgggacccatgcctttgaggggaaaaggcgccttg

SEQ ID NO: 634095 - DNA, 256 bp, Homo sapiens
cttgaaaaaaaacagtagctcccaagggactcagcatggcttggtcttcgaagtggagttttgtttgtgtattcctagtccagcagtaaattctgctttaacataactgtcaggtttgctactcgaaatttgcacataactgaaagtgaacgatatcttttctcatatttttggccctacaaaccccctataccctgtgggaaacataccccgttaaaaatatttttaataaaccgccgggtatgctttcccaaaa

SEQ ID NO: 634096 - DNA, 457 bp, Homo sapiens
cttcctagaaggttttggtgaaagaaaggtggcctttacttacgtgtaaatttctagatgtagtaactgaggaattacgaagaacctggcttctgtgtggaatggaatattataggcattggattacagaatttgtttgggagggtgagggtggttgtgtgttctactccagagaaatcctcctctgtattttttcctctttattgttccttctttatcccatgtgacattccggtaacctatagatgagtatgagaacccctcttttttctcttgccctgtcctaaaaaccgggggccgagtaggggggataagagatcagctgggcgtggtggtgcggcctgtggttccagctactccggaagcataagacaggagaatagcttgaggcggaggttgcagtgagccaagatcacgccactgcactccagccagggcgactgagcgagactccgtc

SEQ ID NO: 634097 - DNA, 1031 bp, Homo sapiens
cttgtgcctttcgcggctattggaagtacacaaacctaactggcaccttcctgttccctagctgaagaacgcaaacttgttcacgccactggcactagcacaagcagctggcttcttacagctggcactgcttactcaagcccacattcacccaggcacttacgcactgggcctggccagtcagccagctgcactactgtcacgagctctgctgctacggccacccctctgcacaaaccaaacgtgcgcatacttccttgcactgcccgcagctgcaaaaaccaaaacacaggctacttctacacggaccttatccaacactggccagccccccactaaacaactgaactgtcacccctctcccttggcacacagcacaaggcatgactaactactggcggctgatgcacgctgacttaaacccggaaccaaattacctctcaacccctctctgcacacacacacaactgccacatgttaacccaaactaacaagaaccacgcacaaggctgctacaataccctgcctgactgcaaccctacaaccccttctcacacgcaacggacggtcgactctaagccaagctactcacctggctgcacagcccttagcacatcctgtatccaaccctcgcgacaacacttgcacgaacacaaggccctcagggacattcccctctcatagctagttgccaggacccgaaggggcacctaaggtaccctatcgctgcctacgctcagctagcgtggacgcacgacccccttgactacacgcaacaccggtggccacttaccacggcacgcgacaaccccccccttccaacctcctctacccaaccctggatcaaacaccaacggcgcccgggcacgcccccactcacactcaccctacacaacgtcaccacacccatctcactccccccccagcgacacccaccccccggccccgcaccccacaacacccctctcacccgccccccacaaccccccagccccccacccccacagccccccacacagcccacccggcag

SEQ ID NO: 634098 - DNA, 1027 bp, Homo sapiens
ccttaaaacaattctgtgacatacatattatctcattgtacacaaagggaagtcgggcatggtggctcatgcctgtaatctcagcactttgggaggctgaggcagaaggattacctgaggcaaggagtttgagaccagcttagccaacatagtaagacccccatctctttaaaaaaaaaaaaaaaaaaaaaaaaaaaaattttaaaagggggtgcaggggctcaggccctgtaatcccagccagcactttggggaggcgtgagaaggggaagcatacgtgagcccagaaataaagaagaataaccctatggaaaacaattagcaagaacaccgtggtcttctacggcgggaaacaaacacaacaagaaacttggacccttataaagaagaagtcaaaataaaataagcagtaaactcccgggaggcaaaaaatcctcccaagtccgggtcatgggccctatttggaaagggcgcccagaaaaaccgtggagtgtatagttaacacgcccttgttttaagggggcccgtgatctgctgtggtttggccccgtgaccatctatgtgctttaacccaaaaaaggcaaattccgtcaattgccgtagatatttctcatcccaagaaaggggcgggggggcggcacgcccaaagggacaaactaccggcgaccttcttgtgtatacgcatatatacaatatgttccggaaaaagaacttaccctataccgggaaactcacaaaggatcccaaaaccactttaaaagcctcccatcaagcaggaaaacgcccgggtaggcacaaaaaagacctgcttgctgacacccttggccctggtgggaactaggggaacgctgtgcgtcaccaacgctcggcggtcaacggtcggaaaaaggccagtttccaacaaaaaaagggggcaaacccggggaatccgtacacgtgtcaggcccagaggaaacacggcgcacaaggaagcggctgagcacctgtacggaccaacgaagagccggcgcaactacacgccaacccg

SEQ ID NO: 634099 - DNA, 175 bp, Homo sapiens
cattataaaattagagtgagacatcaagatggcttcatttatatggttgtatattagtaggttgacccagagtcgggaacggcagatgtctcacttttctatgtagtgtcatcaggaaataaatccaagcactaaacaggaatcccaagacagattactaaggttgcatgatgga

SEQ ID NO: 634100 - DNA, 497 bp, Homo sapiens
gagtcacgggtaaaaactctacaaggttatttctgtcaatgcgtagatatgaaagacaggttggtattactcaggaaatgtattctgcaagcttttccttatctcataacagcctgccatgcctacaccaaattgggcatttaattcatctttaaactggttgtcctgttagacgcaaacttagtaagtgcttatcttatagaaccccttctgactgagcaatatgcctccttgtattataaaatctttctgataatgcattagaaggttttatagtcgattagtaacagtgctttccatgttactttattcagagctaataagtgctttccttagttttctagtaactaggtgtaaaaatcatgtgttgcagctttatagttattaaaatattttagataattcttaaactatgaaccttcttaacatcactgtcttgccagattaccgacactgtcacttgaccaatactgaccctctttacctcgcccacgcgg

SEQ ID NO: 634101 - DNA, 400 bp, Homo sapiens
ttctatgctttgggacggcggacattggggttgcttgcatggagtcacgcactgagcagcgtgcttgtcccatagtttggatcttgtggtttcttacgcattgggccaaaataaacccaggtgaatggcctatgggagggagagagggcagggagcttgctagagccgcggtagagatgcagtctttgagaaagcacgcggcgtatgcgattgtgtaacgcggctagccatagtggacatactggtggatgtacctctatactttaccatacctattctcttactctataccaaggtaacaagatgctcaactataagtgctccccagtagcagggggtatgcctgctggacagaaaaggcagtggacaccccatactgagtggagggtaccctcggacg

SEQ ID NO: 634102 - DNA, 479 bp, Homo sapiens
ctcgacgacattgaggagtttgagagcattcgcaaggacctggaggcccgtaagaagcagaaggaagatgtggaaggtgtaggaaccagcgatggagaaggagctgctgggctcagcagtgaccccaaaagccgggaacaaatgattaatgatcgaattggttataaaccccaactcaagagcaacaaccgcacatctcagtttggaaactttgaattttagagatggattctcttgtatgccagacccctgggacagaatacaatgatgacaggagtaccaaccagatttagagaattaagtgtgtgcaaccaagcagaaggttttctgtctcctgcagggagaggtgacttctgtgtgaaattactgctgtccaacctttctgcattgctggaagccaaattctggcttcttcctggaaagttggaccgcagaaggcttaactgatttttgtttttaaaaataaatttatttttgga

SEQ ID NO: 634103 - DNA, 154 bp, Homo sapiens
cccgactagcccgacaggcaaaaacggcaaacgcagccctcccatgctcaagggaggtctcatcgctctgccatagtcctcacaaatctccaaatacaaccaagatgtgtctccctcacagccctcgtccaagccactgtcgggctagtcgggg

SEQ ID NO: 634104 - DNA, 1134 bp, Homo sapiens
cttgaccccggaggtccctccaacgctcctcaatcagtttgagaacacaggccccccaccggcagataaagagaaaatccaggccctccccgagctgtccgccgtccactgaggagcacgtaggctccgggctcgagtgccgctgtgtgcagggacgaatacgcgctgggtgagcgtgtgcggcagctgcactgaataccacctgttcgcacgacggcttgcatcgtgccctggctggagcagcactgacatgctgccaccgtctgccgaacaaagccatcacgggacagaacagcggccaggaaccccccatggacctcacatgggcgtgagcattctcctcctcgatcgtcatcgatcctccgtccagctcgcccagacaacgagaacgccacaagcaactcgtgagcccacgtcggccgtcgggaacagcacggggccatttccacacgccagcactcagacagcgccaaacaggcaacccacagactgggtgccccggaggcgccaaacgcataggatggtcagagcatgcaggtaccgcctgatccagggacagggacacccgaggccacagacaacccggacaccaagggctgacgaaggcgcaaggaacacacagtgggaccccacagagcacagaccccaagactacaaccggcactcgtgacaaaactcaaacagacaaaacgacacgccaagtggaaacaaattttaataaagtgtacagatgtattaaagtactgcaagatgaggaggacaaatgaagataaagaatggtgggcagaagcgctgtgataggtgaagaaaaagagggcacaaataaaataccaaaagataaaaaagggagtaaggaggaaaccaaagataaatgtgaccagaacagacgcaaggaaccacagaccacgagcggaaacaaacaacgaaagaggaatgcaacatagagaaaaacaactcaaacacagggacagaggacaacaactacccaggacgagaaaagatatagacagaaaagacgacaaaatccaggggaacacagcacaaaacataaagaacagcacaaaaacacgcgtagtatacacagaacaacaaaacggtcagtcagacctctattattagagtctttttatgtgt

SEQ ID NO: 634105 - DNA, 304 bp, Homo sapiens
ctttaaagcactggggatcagtctctaggggccttgggctgaagctgggtgaggcagagagtcatgaggccacagagctggtgcaacctgagcctgcctctctggccccctcccccactactgcccaaagctgtttacagcaccttcgccacctcccctctaaaccctgtccatccactctgcacttcccagtgcaggtgggtgggcaaggcctcgagccatactcctgagctgcgagtgacggagagccaaggccacagtcccagcccattgcttcatcagtcctccactcgagcttcagagt

SEQ ID NO: 634106 - DNA, 188 bp, Homo sapiens
caacagggaatctagtagctccggataccgaagcccacgggcacatgctggaagccccccagaaccagcccgtccagctggatagagcgcacacaggcctccagctggggccaggtccggtctcatcatcccaaggtcttgcacatccagcaggatggacggactgggccaccagttgcaggcttctg

SEQ ID NO: 634107 - DNA, 102 bp, Homo sapiens
tcaacaggaggcagaggaggaggaaagagaggaggaggaggaggcacagatcattcagcggcgcctagcccaagccctgcaagaggatgattttggtgtcgc

SEQ ID NO: 634108 - DNA, 533 bp, Homo sapiens
acgaggcgcgcggcgacatgttcgagcgcggcgtcctgcaatgcttccgccgactttcttgggactacaagaccaatcagccattcaagttcggcaagcgggtcatcgtgacgggcctgatgacaggcggctatgcaggcagccgcgcgacgaacgaactggacgatctgatgcgcgtcttccacgtgctcgacggccagcccgaagcggaccacaggaacggcatgcacgcgctgatttccggcgcgcggcacgaaaggcgcagagaagccgaaaacgcctatctgcatttgcgctggttcaagaacgggaacgggcatgccacgttcaagcggcccgatctggtggacaagctcaacctcatcttggccaagcactacccggccgcgctcgcggccgagcggaggcggtgatgggctttgcgctcgatttcgtatgtccctttgaaacgcgaccgcccgaggtgccgccgtaggatcaggccgtcgtcatgcctggatcgcgcagccgcccagctgagacgccggcggccg

SEQ ID NO: 634109 - DNA, 663 bp, Homo sapiens
tggtgctgtaggacggttgctccgagcgtcggttgcccgacatagttatgttgccattccttgcgggcatttcttgccacttgcaggccctcagtgccattgcttgcatgttggaaagaacacgaagcatttgaccacacatattaattatgtagttcatagtgtctccaatgtcaaagcaaacaattacttcatgcaaccaagttccctcaatgccattgcaaccttgctggtacaaccagacaattgacaccctaattttaatgtggtacagcccgttatgtacaattgggaagcagttgcaaagaacctaaacgccctatgacttggactttctaaaagcgggggaaaacatttaaatcgtatggggatggccataatgatactataccttaatacacatttttgtggaggaaccatttattatcacaacccgccgttatattgtggattagactttggagtacccattcacccaaaacgcaaaacaacttattgactagtggccgttattactgaacaggagatgaggaactcaaaataaaggccaataacaacaagaaaaaatcttctcacaccaggaacttggttgcaaacgtggcattgacaacgcgcatttggtctgcccagcgatctatctacgacttgcgacgtatctccaag

SEQ ID NO: 634110 - DNA, 221 bp, Homo sapiens
gtagctagtggagatcttcgctcagctcttcttccctagatcaaagacaatatcatctgatgtataagggatgggtctggatcgccagacattagtcagctcccaatgggagcccacggaactaagtagggtcccaagaaaaaaacgggagctatattaacagagctaagcttactaccaaatttcattcctccaacctttagtgagggtaaattagtacg

SEQ ID NO: 634111 - DNA, 623 bp, Homo sapiens
tcactgtcttaacgtctggctgtgctgtaactttttggaggtgttttagaacgtttcgccttctttgtcttctttcttttagtctcttgtatttgctgtgctccttgaccttctagctctttctctggaatgagatcttctccgccttgggcttttggatcgtcgccgactcctagacttagaatgagaccgccgtctcgatctgcttcttgaccgcctgtgtccagaagatgaggttttcctcctcctcctagaacgtgatcttgatcttgaatgccttcttttttcttctttcttatctggttctatagcagcagaaattagggactgtgcttctcgtactcttttcatagcttcctctatttctttactagaggtatccgatttcagactaggtgaaacgagaccagcagctacatgattcaacttgggatcaacagtactcataagcttcagcgactgatctgcagcaagagactgagagttcaagtttgctccaggaagcccaagtgcagccagggcaggatcaagagtaggagcccccaaagcagccagtggaacagcgccaatctggggaagcgggtaaggagtaggccggagccacccccaggcagaagacctgc

SEQ ID NO: 634112 - DNA, 206 bp, Homo sapiens
  misc_feature (94)..(94): n is a, c, g, or t
  misc_feature (151)..(151): n is a, c, g, or t
  misc_feature (187)..(187): n is a, c, g, or t
  misc_feature (203)..(203): n is a, c, g, or t
cctgttagatctgttaaccaaccgtgttcccccaggcgtcgatgaagccgcctatgtcaaagcaggttcctggctgctatcgcgaaaggcgaanaatatcccctctgctgactccggaaaaagccatcgaactgctgggcaccatgcaggntggttacaacattcatccgctgatcgacgcgctggntgatgccaaactaggnacc

SEQ ID NO: 634113 - DNA, 147 bp, Homo sapiens
ctgctcgaattcaagcttctaacgatgtacggggacatgttggccaggctggtcttgaactcctgacctcaagtaatctgcccgcctcagcctcccaaagtgttgggattacagatgtgagcccagctgacctcactcttaaaaaaa

SEQ ID NO: 634114 - DNA, 484 bp, Homo sapiens
gcccgaggacccagcagctatccaatgctgtctggttttcagcatagtgttgtatgtccattgctagctgtcctgctgttaacacagtgttgtatatttctaaatgtacataatcatgaaagaaataaaatagtgagctatgtgatcttctgtgtaagcagtggttcactggaaaaatggtgtgctagcatttccctttgagtcatgatgacagatggtgtgaaaccatctaagtttgcttttgaccatcacctcccagtagccaattttgcttttcataatccatttagcaatccaggcctctgttgaaaagatcatatgagggagaagggaacacatttccttcttgaacttacttccctaaatcactttccttatttatcatctaatacaatgatgggttgagttgaaaatacagaagggggtgtttgagtattcagatttcataaaacacttccttgtggatagctgcgtgaattggggt

SEQ ID NO: 634115 - DNA, 623 bp, Homo sapiens
ggagccaagtgctaactatgccttggcttcaaaagggatggggaagtcagccgttaaggatggtcaagtgccaggtggaaccacgcttgcttgaggctcatggactgcgatctctaccacctaatctcgtctcagagcctgacagaggcccttgcgccctgcctctccaggatgtctacaaatacttgggtggtattagtgtacttgttcctgttggccgagttgcgaggacttggtgttcgtaccagtaccgcgtgtgactggttgggttcacccttgtggctccaagttcaagcgggttaacacatccggataggttaataactcatgtctgaaaatggcgaacccgatggaaagccttcgacgtggaaatgctcctttgccctgggggagaccaattggctggggagctgtcacattgggtgcccacaccgcaaaatggtgtgctactaaggtcagaaggcggactggggttccccgttccggataggtccaaagaccgttatcgccgttgggttggacctagccaccacataatttgaaccccccaacccaaattggggcaacgccaggctgggagcttttcacctggacttcgaggttcgatttgatcccggaaatcc

SEQ ID NO: 634116 - DNA, 113 bp, Homo sapiens
actgatagttccctataatctgtgccccgatatggtgttcccgcataaacacacataagcttctgactcttactacctctctactactcctgctcgcatctgctatagtggag

SEQ ID NO: 634117 - DNA, 676 bp, Homo sapiens
gtatggcggatggggacccctgttagcacgtgatcctgagacacactggaattgcgccacttcaaggttctcatgcgctggtcatatacagaggcgggtcagtgtcccgctgttgatttcatccgttactctacctcgatctttgcacgatatttggtgctacatactgaaaacgaaaccctctgacatttgtctccgccataatatccgtgtccggtctagggttcccgaagctagtgctgaggggtgatgataggataccggtgtgcttagagaggcaatggcatatagacattatctattgtggaggcaaagtagtgagtggtcgcgcgcaagatatactcccatagggcaggcagtcccgacgggggctgcaagtagtggttgaggctgaagctggattcccggtattataggggtagcccgaaccagtgacctgcgtagtactgctcaacttgggcttgtcattgctgtgacaacaaaaacaaggtcgtgtgagcatggctgtgcgagaatcgtggggctgaatttcatgggcgtcgtgcggaatgcttacttgtaacgacaagtacctcatgcgtggtgggctgaccgaactgacgattgcgatgacgatcacgggggtctgacccggctcgtggctctataaggaggttcgagaacctcttgccgacag

SEQ ID NO: 634118 - DNA, 1717 bp, Homo sapiens
  misc_feature (472)..(472): n is a, c, g, or t
  misc_feature (817)..(817): n is a, c, g, or t
  misc_feature (1305)..(1305): n is a, c, g, or t
ccatcgcgtctgaaatggcggatgacgccggtgcaggggggggggcctgggggtcctgagttggccacatgcggatggggtatccgcggtggctttccggcggatggtttcggcgaggtggcagtctcggggccggtggtctgcgggcctgatggacctggtggcctggggccgatggccggctggacgctcgcggatggtaatggcctgtgggttcccggatgtgcgaattgctccggtcacgcaaagttcggagccgagcattgagtcgaatcggacgattcgaatgaatcagaagatctcctttgtcatcggatcaatctattctccattcttccgcgatgctcacaattaatcggatattccatggacgatttcaacttggaagtttgtccctttctcattggagagtgtggcctttgcattcgttcaatagtgagagtagatgaggtatgtccaagagattcgaatntgaatttgccaagagttcgcaagtgaagaccgcgagcgaaactcgcttggttagccctagtgcgctatcgacagcgagccaaggggtgttcagactgggctactttgttggacctgactaaattcttgggggcgaacttatcagaagttgtgcgcgaagctagttctagaagtgcttggtgtcgctagattgaagatgtgtgcgtgccaacgtgatggagtttgcgcgctaagccgggccaagttccctggtctggggtgcccaatacattccctttggaggtcagatgcatcttctcgacatccagggtcaccgcgcctgtattgcttgcgaatggagaaggcntaacgatatgtgggtgggaaaacgaaacggaaatcgagggatgaatggcgcctctagaccaacatgtggttcgcactatttggcccaaaggtggtttgggaccgatggtggcccaggcggttgtcgggggtcatccgttcgtggcatttgggcttatcggccctccaattcgcccttagggcatacgcgccaaggtgggggtccatcacttggggaaacttctggtttcgttccgcatggcaaagacaccgtttggtttggcgcttacatgtgaaaattggcgtctggacgtccaaattgaagattgtggcgcgtctggggtaattaccaacagcttgtgacactttgctataagggaggcgattcgaaagtcctctgtgggaatgggcctttgtggaggtttggaccaataccccatttgtgagacgagcaccatatacctgctcaaggaagaggtgccccaacaccatttttttgaaaatgactcnccaattatgtcatcaaaaggaaatcgttatacaacgtcgttaaaacactttggtaatggcccacggaagacaaccctgtgtgaatatggaccaaacgagtgtttgttccccaccaacagggagagtcccgaagatagagggaggaactacctgggagagcaataccctcgagccagaaagaaacaccccgacgagacgagagtgtcctcctcaggtgacgcgaaccctcagagaggttccacacgaggagtgggggcttcaccaaaaagaggaggaggaaatacagcggaccaacaaccagcagaacggcaagctggagagctaagaatcactaacgaacgaaggagcaagaatgaggaggtagcccacatgatgaccaccgagagaggcgcaacaacggatcacaatcgtc

SEQ ID NO: 634119 - DNA, 433 bp, Homo sapiens
  misc_feature (306)..(306): n is a, c, g, or t
  misc_feature (433)..(433): n is a, c, g, or t
tttttttaaatggacttgtatttttaatttttttaaagattctctctctatatatattaataaaaagtgcaaagaatagaccttcatgtttaaattatattctaaaataaaatatatatatatatttatatttccattaactgcaggagacaactgtaaagggcctgagagtccagtcccctctcggtcactagaataaacatacattttaaggaagcacctatgagaaatggtagagttcacaacaacagttggggacacagagcttctgggcattcttgaaagcagattgtttgcattttagtnttacatgaaatgaaaggaaaaagtgaaattcataaacagaaattatcgtacatacaaactacagagcattctggagtcacgccctacttgcccagggccctaagctacagtgcggagggagagccan

SEQ ID NO: 634120 - DNA, 555 bp, Homo sapiens
tcgtgtcgtaatcagctcaatattccctacagtattgatcaatttgctgggttatttattatcctacccatcaaatgaagctatcttaatttgaactatgcaacatcttgctgtagccaaaatacctatcttagatctctagaatatgctctcagcttggtgtaaatgctcacatctgaaaccgataccagactcattctcctgttcaactcagagtaagtaatggcgccgtgttgcccattacttatttgtactctctttcccaggtccagagttgttgcatccacctaaattagtttccagtccttgtcaggctgatgcatctgttgcaactatcacttagtaaggagatgtcgatgaccatggcgtgattaacctgactacactctctgttaagcagttaagagttctactggtatgtttggtgcagcatggtacttagatttgccttagaagagtctttaaaaaaaaaggcctttagaccaggctgaagtgcagtggtgcaatcatgtcgaacttctgggctcaagcaatcctcccagctcaggctcttga

SEQ ID NO: 634121 - DNA, 266 bp, Homo sapiens
ctgacccagctgaggaaatactcttaattctaaggaaacctggagcacaatggggagatgacagtgagtggttgacactgccagtggatcagaaatgtgaacacaggctgtggaaagcaaggttaagtgggtatgaggaggccctcaggatcttccagaacataaaggatgacaggagcccacagtggtccacatttttaggattgatcaaaaatttggtcactgattccactgcagtggttcacttgaagggattagagctcact

SEQ ID NO: 634122 - DNA, 866 bp, Homo sapiens
ccttgcctgtcagcgcaccgaattgctactcggttgccctcgctgttctcatagccattgtgggctagttcatcccatgggccgtatctgtatatggttgtacgcagttccgtcttccccacaccatgagccgattcctctccaagacccgtcgattactggcgtgtcatctatgcactggtggcatcactcagaagacatgttgaatggaatgccatctggatcgctacaatccgtccaatgctggcaggtacggaataccctttgtcttacgtcgatgttaccagtagaggcgtctgcaaggttactacagtgttatcgcccctagcttacatgtatgtagtccataggtacctttccagatgtgctttgtcggttcgggacgcaccctggacctctcagcatgcacgtgagaacggctctctgacaatgaagcagctctgatggaatcttcccagctattgagggctcacgcgtggctccgcttagaccctccccttggggccccatgacgataatgatctacaaagagacagtaccctctccagcctgctgacccgaacccaaccacacaatggtttgtctcaatctgacaccagacggctggaccactccgtaaattgtgtgacgctcttcccccttcccgaggtcccgtcagggagcactagcgcctggctgtgatgtgcggccgctcctccatggccttaggaccagtgccaacgctcaggacctgcatccactgtttaacactatacctaaggtcatgagcagttcgtgctaagataactagactccagctcctggtaccacccggcatgtcagtcagcactctggccttcatcacgagaatccgcacccgtggctag

SEQ ID NO: 634123 - DNA, 294 bp, Homo sapiens
  misc_feature (137)..(137): n is a, c, g, or t
acaagctacttatctatggagataattgcattaaaaataattcacagcatgagataacttcaatagatgtactttgtgtcatgctcatggattactttagaacaagcagagtcattgagtggttacctctgcatgtntggagtggactcacagatgaacccttaatgaataatgtgtccggggtttttagagagagggagcactcttaagttaccactttgagacagctcttaacatcttagtgaccatttgtagttttctttttatgaggaacccatgcttctatacttaagc

SEQ ID NO: 634124 - DNA, 1323 bp, Homo sapiens
ggggggcatgctttcgttcattcgtcggtctttggttgattgtatgatccacacccacccaccaatcatgcgttgttgtgattgaattcaataagatgaaatcttaaacctccaaactatattgattgatgtatgccgtcgaaccaccagctagactgcaagcagtcgtgctggtgtggcttaattaatcagacggcctactgtcaataattaatttgatggtagtcgagcatcatcctgacagagcggctgtcatgttgtgtccctcccacctgtgcgtactatagagcagtatgagaataatgtatacagtagggtcgcgctgtgtggattatataaatcaaccgccgtcatgtcgtgcgtctgtgtgtggttgttgtttttatgtgggggccccacagcagaagatacgcagcttaataatatctagttctgattttatagtagtaaaagaattattgttctctcccagcgtagtagtatatgaagaagaggcgagcaccagcctacagtgcagtaaatgtagacacagctgcacatctacgatctcttatacgcacactgccgcgggggtggtattaattaattgttataagtctcgtcgctgctgagtaacatcaccttcggggtgccacaactagtttcgtgacgggggttggggttgataagtaggatacacaactacataaccgtctctttatttatgtctatcttctggtgggttttaaaaataatttattatctgtcggcgagataaaaccacccgtacggcgcggcgtgtttttatcttgggggggtgtccacacataataaccactcctctcctctctgctgtcgtgcttctagtggtggcaataatgtatatctctgcgtcgttagacacatctcgtcgggcgctctgttgtttgtgggtgcgaccagcaaatgatcccaccgctctctctctgtgtcgctctgtgcgggtatagatatgttgtttgtagatataaacctctcgtcgagcgcttatttctcgtggagagaaataaatagacaccactgctatcactcgtccctgactcgttcaaacacgccacctctcgtcggagagcacagaaaacctcgcgccctcggagaacacaccctctcgcgcctcgagacacacaccctctctaaaagagaagagaggcgcctttccctgaaagtatgagggtggcgtgacccacctgcccacttacctccctctgattccctcccctaatgggggggggtgtgagggggcccccggcccccttttttatatataactttttttttttttaaaaaaaacaaaaggttccttca

SEQ ID NO: 634125 - DNA, 80 bp, Homo sapiens
taattcccggattctgaccatgagatctgaactcagggcacgactagaagccctcaaaacccctgggacctggaaccaca

SEQ ID NO: 634126 - DNA, 1146 bp, Homo sapiens
cggcacagcagcccctggcgctccccagcgctagcccgcgcaggcgctcactggcccgcgtcggctgacagctactgacagtgagcggctgtaccatggcccgcatagatgcggacctcaagctcgacttcgaggatgtcctgctccgacctaaagcggagacagcctcaagagccgagccgaggtggatcttgaacgcaccttcacgttgcgaaattcaaagcagacctactcagggattcccagtcgatcgtggccaacatggacactgtgggcacgtttgagatggcagccgtgatgtcacagcactccatgtttacagcaattcaataagcattactcccttggattgactggaagctcttttgccacaaatcacccagaatgcctgcagaatgtagcccgtgagttcaggcagtgggcagaatgatctggaacaagatgaccagcaatcctggaagctgtgccacaggttaagtctatttgcctggatgttggccaatgggtattcaagaacaattcgtggaatacgtgaaacttgtccgtgcaaattccctgaacacaccattatggcaggggaacgtggtgacaggagaactggtaagaagagcttaatactttccggaagcacgatatcatcaacagtgggacggttgggaccaggttctgtgtgcaccagcctggaacaaagacgggagttgaggatacccccagactgaggatgccgtacatgaagtgtgccgaacatctgcccaagggcactgaagggacacatcatctcatgatggaggactgtaacatgtccagaggattgtcgacccaacgaacttaggaaagctgcgacagcacactccggccacaggctgggagagaagccaacgggtccaacagaatgcacaccgacaacagagtgatcggaccaagccaccacaccgggaaagcccccaagcaacgagccaagcggaaaacaaccaggaaccacacgaaacagaacagaacgcgcacagagacatagcggaaaacagagcccaaccgcgcacaagacgggcaggaacacagaacaacacaccaggaaaaacccacggaccagaaccgaggaacgcagacacacgacacaagagagccgacaacaaagcgccgccgcaa

SEQ ID NO: 634127 - DNA, 583 bp, Homo sapiens
ccctttctttgcgtttaataccatggcggctgggaccctgtacacgtatcctgctggagggccttcaaggctctcatcgctgctcagtacagcggggctcaggtccgcgtgctctccgaaccaccccacttccattttggccaaaccaaccgcacccctgaatttctccgcaaatttcctgacgtcaaggtcccagcatttgagggtgatgatggattctgagtgtatgagagcatcgccattgcctactatgtgagcaatgaggagctgcggcgaagtactccagaggcagtagcccaggtggcgcagtgattgagctttgctgattccgagataagtggcccagccagcactctgcgtggtcccaccatagtcatcatgcaccacatcacacagcccactgtgaatgcaccgctggaagcgcggcgtacaccgctactcgtgggctaccttgagacgagggccttttctgctgagctgacccagatacggccgcctgtcaccacacgttgcccgcccctctgtgggcgaatcgtatgggagtgcgcctgagactttcccttccgttctgcgccttttacct

SEQ ID NO: 634128 - DNA, 433 bp, Homo sapiens
attgacctaggagtcactatttacctgtaaaaagtctatactcggtaaaatctatctggacgaccaaccagaataagagagcagaacagactgcagaaacctatattcaattaaatcaaaagcagaaagggggagatgttggaggctgaaagaatgagggtcatggccaactcagtataccactggaggctatgtgagcaaacagcaaacagttctcatgaatacaggatattggaaagctgacagctgcatcagacaccagaaggaatgctgaggacagtcatgcatcaggcacagtgtaccttgtagtaatctataggaacatactggaccctgtagtatacagaacgcaattatatgagcctgtgataaatcaagcagatgactaaaaactgtaacctcttcctaccctgtagattctacctaatacatg

SEQ ID NO: 634129 - DNA, 805 bp, Homo sapiens
gagcggccataataacatgcggccgggactcggacgaccagtcctgtgcgtgaatggtggtaatctctgcttctttgttagaagatacatgagatacttagagcttaggtgcgtttggtatgccttgtaaactagtcagaaaattgtggggaggggcagaggttgaggtggtgtactcgaaccttgaagtgtcaggagtaggttggtgattaggacgagtctatgtgaccaggtaattgttgatagaacagcgtggttctctatactgaagaatatgagtaatcaatttttgacgacggccagtggctggagggggtgcatttaatcccagctattcggggaggctaaggcaggagaaatccgcctgacaccttgcgcgaggtgcgtgacggtttgcatgctgacgccaagattgtgttgccacttgcactccaggccttggacaaacaagagtggagactctagtctcgaataaaaaaaaaaaagagagaaacagagaactttatttttagggctttggtgtggtggtcaaacctgttgtttttccccagataaatcacttggggaagggcgttggtagtgtaggcattgtacgtgggctacaagggtttgtggcgtatgcggaactctgggtgccctgggtgtttgacctggtggtgagaatgactcctggtgctctttaagataccataattgggatttgcgaatgggtggaacaaggtttacagaaaatttcttccaggtttggggtcccctcatgaaagggttaagttacgggggagaagtcaaggtggttacaaggact

SEQ ID NO: 634130 - DNA, 143 bp, Homo sapiens
atcaaccacatgatcagggcagtcttcttgtggcgaagggctgacacagatgagaactgactctggaactactcatgaccatgatacatgtacgtgcatccaagaagaatcttctccatgatctccatagtggaatggaggag

SEQ ID NO: 634131 - DNA, 886 bp, Homo sapiens
cgtggggggagacgagcagacccgaagcacggcgaggaagaaaaaggcaaggttcccggggtcgtggttctcgcaaaatatggtgggacgccattttatgtgtccccccgctaaggacactccgcaattccttcttgggaacccgcccccgtgatgttccgcggcaagacccaggctcttttgggaggacacttagtgatctggggatcccacagcgcccggccagggagttactggtcgggcttacaataagggttcaaacccgcacttttgccttttccgcgccgtttattgtatatcagctcccccccgtattttcgcccaccaacatgttccaagaacttcttgtagtaggcaccccccttaaggagggttcacacccccgaaatccctgggacaggaaaggcgccaaaaaaatatgcgcgcgccccctgattacacaataagacctgcttttgggagtaaaataaaaagtcccgccgtttcgagacatgttaattcagggacccccacctccgatcaagggtgagacgcccaccggaaccccccctcttaagaatctgcttaagactccttcagggattagcccctacgccttcacgcaccaaggcggggggagtcccctttgtcgaacatctttagagaggatggcgtggtaaaaagatacacagtcataaaaacccgggtgatatgcataaagatttagaataccagggggagagtctcgcccccctttttggcgccccgccccaagttggccccacggtcatgaggtcaatgcgttccttgtcgccttctcaaacagcacgcggtaggagaattacacaaaggtagccaatggcacaacgttcgcccccctagcccccgataatccccgggcgtccca

SEQ ID NO: 634132 - DNA, 839 bp, Homo sapiens
cctcgggtgataagcccccagggggagagcccaagaaccttgggggaaccccaggccggggcccaaacccaaggagagggccaagaaccctctccaaagagccttgcaagcctaaggcagaaaagcgtgaaaatcctccagcacgagtccttaagcacgcagccctcccagagaaggccccagaagacaaggcccccccaggggaaataaggcagggagcaaaggaacatccgggacagcccaagagaactcagagagagtccccgagctcaaggattcagagtaacaccatttgttcacttggtctgtctttaatgtaagaagaaactgcttagattgacggggcctccttcttcaaacccggaatttctgttagccaatatgttagcacacgagagggcactcccacggcccctgcccccaatgccctccccacggcgatggaccaattatgatagcgttatgtgagctgagaatgtgagtacactgccggagatgccaccacgtataacaccttgagctatgtaaaactgcccccctcctttccacaataagtgcactttattgcctctatgtgcaactgacacgatgaccgcccatatatgagatgagcacgttatgaaatacacttatgcttgagatgtcttaacctattccccaatgccttctcgttttccacaaggagtggtcaagacccttgcccagagctctctatttctggaagagcggtcccggtggggccgggccctggcccctgaattaagccacgggcgcactttccactggagttcactttcaaattgcttctgtgccaataacacccagtgcttataaaatga

SEQ ID NO: 634133 - DNA, 438 bp, Homo sapiens
cagttaaatacagaccaggttgtgattgatgcaggagcactcgccggtctttcccagcctggtcaccaaccccaaaactaacattcagaaggaagctagtgaacgatgtcaaatatcacagccggccgtgaggactagatacagcaagttgtgaatcatggattagtcccattcctatgcagtttgctctctaaggcagattttaagacacaaaaggaagctgtgtggcccgtgcccaactataccagtggtgaaacagttgaacagattgtgtaccttgtccactgtggcataataaaaccgttgatgaacctcttaactgcaaaagataccaagattatactggttatcctggatgccatttcaaatatcttacaggctgctgagaaactaggtgaaattgacaaacttagtataatgattgaagactgtggtggc

SEQ ID NO: 634134 - DNA, 167 bp, Homo sapiens
ggagggatgtaccggaatagaattttcacagtgtcgatggaacttagattaagaagtactttctgtggacccctcacactggtcgtccacactcacttgcagccggcaaactttgggaatttctatcctccagcaagcatcgtcgcaagcctccggaagtatgtagt

SEQ ID NO: 634135 - DNA, 443 bp, Homo sapiens
  misc_feature (2)..(2): n is a, c, g, or t
  misc_feature (71)..(72): n is a, c, g, or t
  misc_feature (97)..(97): n is a, c, g, or t
  misc_feature (199)..(199): n is a, c, g, or t
  misc_feature (241)..(241): n is a, c, g, or t
  misc_feature (342)..(342): n is a, c, g, or t
  misc_feature (376)..(376): n is a, c, g, or t
anattatcaataataacattgaatgtaaatgactaatttccaatcaaaagtattgactgctgaatgaatgnnaaaacaagatccatttatctgagcnactaactatattccaataaattggaaaatctagaagaaatggacaaatttctagacatatacaacctaccaagattgaaccaggaagaaatccaaaacctgnacagaccaataacaagtatgagatcaaagacataataaaaantctttcagtaaagaaaggtctgtgaacctgatggcttcactgccgaattctaccaaacatttaaagaagagtggataccagttctactcaaattattttgnaaaaatagaggaggaaagaatacttccaaactcnattttacaagtccagtattaccctgataccaaaaccaaagacacatcaggaagaaaaaagaagaaag

SEQ ID NO: 634136 - DNA, 202 bp, Homo sapiens
  misc_feature (44)..(44): n is a, c, g, or t
  misc_feature (60)..(60): n is a, c, g, or t
ccccccctttttttttggggggggttttttttcccaaaaaaaanggtttttcaccttttnggggggggggaaaaaaaaggtttttccccttttttaaaaaacccaaaaaaggaaaaacctgggtttacccccggttggggggttttttattttcttggggggttaaggggggggccaaaaaaaaaattttttttccccccca

SEQ ID NO: 634137 - DNA, 1271 bp, Homo sapiens
agcggctctagcaccctcggccgggcgtggggtgactgtgcaccgacgtcggcgcgggctagcaacgccgcgtccgcccgcccaccagcctggccaccaccgccacctgcacccgtttcaccgacgactaccagctcttcgaggagcttggcaagtgtgtgaagaaaacctccacgcagcgactacgcagccagaaatcatcaataccaagaaattgtctgcccgggcatcaccagcaaactacgaacgctgaggctcggactatgtcgaccttctgcacaacatccaacacactcgctgccgccctcccctgcaccagctaactgactcctgcaagcaacgggcttctcacgtaagccatcgctggcttcccgaacccttgcttaacccggggccgcgcgcgcaagccctgcctcctcgcacacgccaaccacttcggctgcggcaccccacccaacgcaacgctaaccttaccagcctgcaaacgcccaccaagatggccccgacgccccagccctgtgcctcacttacccgaatcgcaacgcaccgttctacccatggggcaagtaaaggctggagtcacaacgcccctaccgaagtttcccaaacccccaagggacccacgcacgcaagcccccgcgtcccgggccaccccccagccaccacgccgggcccacccccccctcgcacacacaggaccccccccccgcacgcgccacaaccccccagtggcccccgacggcccagtgggccgcccccgcccaacggcctctcaccaccatcttgcaccccaactacgcacgccgcgctcgcccccccccgacctccccgccgcatccccacaatccatccccccacgcgaggcccccactacgcacccgatactctccccccaggtgccccctcccccatccaccgcgccgcccgcacattcccggctaggcacagcggttaaccaacacgcgacgcgcgcacaccgaaacggcccccacacgaccacacgcggggcccgtggaaggccggcccccgccacaccgcgagccaccaccacctgacgagggcccacccgcgcgccccccacaaccccccccacccccacaccgcaggcgccccaccaacacgccaaccagggcacatcccaccacccccccatgccaaaccgccgcgcacacccccaccgccaaccacacccccgacaacacaacaccccaacgtcccccccccacccaaaaacccctgaggccccacacacgaataacaccaaccaagga

SEQ ID NO: 634138 - DNA, 177 bp, Homo sapiens
gggggttggggcccggggtttccccccccgcaggattgggggcttccttgtttaacgggtgaatttgggggggcccaggccggggctttttttggggattgggccctttttggggccgggggccttgggctggggcccccccccggttttattaaaaattggtttttgggggcccca

SEQ ID NO: 634139 - DNA, 182 bp, Homo sapiens
cctcccgggttcaagtgattctcctgcctcagcctcccaagtagctgggactacaggtgcctgccaccatgtccggctaatttttttatttttagtagagatggggtttcaccatgttggccaagctggttttgagagcgaccactcctcataattgcttacacttaatttctgtttgctga

SEQ ID NO: 634140 - DNA, 1586 bp, Homo sapiens
  misc_feature (186)..(186): n is a, c, g, or t
  misc_feature (405)..(405): n is a, c, g, or t
  misc_feature (426)..(426): n is a, c, g, or t
gctgacaacaggctggttgctcggcgtggcatatcctaaagctgtgcctggctttgtagactggaagtgatgagtcccagactccatagggctggcgcgtgactatttccagattagtagaagcgaggaactggattacacaagaggggcatatatgaaccaacggattgctggatagacacccangaccactagtgattgcagcgtcctatgcagagttaaacgattgccgcaagagcgttcgtcatggcttagtagtaatagctcctcaaaccactcgcaagaagccatccacatggtaacgttacctcgatctactgacaccgattctgtctctagaacgaagggctcatggccatgatagacggagcaggggatgccctcgtgcaaggaggacaattcaanctggaggtagcatagacctgntaggctcatcagcagggttggaacgatcgcgtctaacccgagagaggcattgttacatagtagacatagtcgcaagtgtagtcgcaccgcaattgcaatgaatcgcataggactgcaatgtccattcctaggatatacggcgggagtatctctgggattgccctcgcaatcgtagtgggcattttgcattggaggcttttaggggcaattgcggaaagcttaacccctacgtcgcgtaacaccgagcgtggctttgagttgggacccctcggtgtgtcgaggaaagcatcaccttgggaggcgccaattattgtggtcacccaagcgtcaagaaccgtcggtcgtgggtagactatttagacgttggaaagcctacatttaacccaagctaaggcacctactatggtccatggattagccaccctggcgcgtctacggtctcgttgtggaagcaacaactagaggatctctggcaacccatcgtagtcgttgactcgtccctacaggtctgctcgtcgcatttttgttattcaccctagtgggcttagctgctggggggtagtcaagtggggggacattgtgcggcatcgtgcgtctcttgacgcgcaggaggtgtccctccaaccagggtaccgcgtgtcgcacactgtgcgtcgaaacaacagggctccatttggacgcaatagccctcttggttgacccgtaaattgtcgcgtttcacttcggaggcatcggcagaccccgtctccttaaacaaatacgccagggttcgaaagaacgcacatacacagggtcggactgcatcccaacatccgttggggatttgaacacaagaacagcaaattttcttacaagtgccacggccaatctaataggactctaatgacacgaagccatttacttgaatgcacgctcacaaaaacaggcctttagaaaggaattgcgaccgaaataacaggagattcccgacaagaaggtcctagttggatcacacgcgtggcgaattcggaagaaggacatccatcctgtgagagttaacacccggctgttcctaatagccccccgtgtctgaactgtgttgcatcttatccacccaaggccaaatggtcccgaagcaatgtaggcaccaccgacatgccacggaaactgtgtccccccga

SEQ ID NO: 634141 - DNA, 803 bp, Homo sapiens
cgagggtagggctaggttagcgaggccgggtgttaatgcgtgctcgattggagcggagcctgtgagccctagaggtgggccgcgcagccgtcaggtaactggcctgccggcctagcgatgtgatttcacgttgcactccagtaatgctcctcatactaggcctactatgccagcacacgaaccatataccaatgatggacgcgagggtaacacgagagagagcgacataccaaggccaccacacaccacctggtccaaaaaggccttcgcatacgggataatccgtagtttattaccgtcagacagctttcttggtcttcgacaggagtttttctgagcctcttgtaccgactcgcagaccgtagaccccagtaccccacacaagctagcgcaggagacaacatggccacacccaaccagggcactcacacaccgactacaaaatcacccatagaaagatacccaacatcacgtacaacgcacccaataccgacaaacacatagcgtacgggcacgtcaacgggaagctcactccacacctcacccccatggaagacgtacacgccacacaccgctccgcacaccaccgacacaacaacgacaagccggacaaaccacaacacacttacactttcctcacggacaaccgtgcccatttaattatcacccaactcaccactaaacttcgggggactcctccttaacatcaattaacccccccatcccctcagccacaagccccctccacgtacgattaccttaccggacgactcgtccccccctttacaagcccaaatcacaac

SEQ ID NO: 634142 - DNA, 1239 bp, Homo sapiens
tttggtgaagcggcgaaggaggtggtaggctgcgtatgggctaccgggaagccgtatcgggctaggggctagtcggccgcggggcggaggcactacgacagacgaggggatggcccactagcgatgacctatggtatacagctgtccatattacctgtgcaccatactcattgacaaggaacatcggctaccaagtactagacccacatctgacgatacctattatacatggatagtagggagaggggcagctagggctgagacttggcctggactagaacagggtagccgggaactgctacaagaccctagagttctccagagactactaacagctatgagtaccgactatatgagacagtccagaagctaacgctatatggaatctatgacatagacaacaagaacgccagagactgagggatgatgacttcctagaggaggtgctagagtgtaccactaggaccagattgtgtccagccaggtacttgactctccccttgatgctgaaaacctggaaaaccttgactgggacggggagaccatcacggtctcagctcaggaattaacaggacaatcgtgtagtaaccatggaggtagaaggccagaaacctaaatcagaaaggacttcctgggaacactcagataccatatacctggaaggtacttaccgacaagggatgattgggaaagtggaagctgggttgtaccagaatcatgaggtcaaacaagaaagcacactgaaccctacaatggacacggttactcaagagtacccacggatatcagcaatttcttagaaggatgggaaacgacaagaataagagatatcaaggatagaaatgcaccagataaaattacaggtgaaggagtaaacatgagcacatcatgaacagtttaatacaccagtatagtccagacgataacggcagcccgatgtgtttatttgctaatactctcttataaaattgcaacgacataacaccataacaaacgctggccccatcctcctcaacaatctaactagaatacacgataactccttacgaattaaaatagagaagcgtccacatacaacatctgtacacaatcatactaaggaagcatataaacaccacatagtatactgaccaacacctttacatagactccgactatgaaactacactatgaacgaagcacacagtagatacaacaactactttctcatgcctcctcacctgtcctactagacctata

SEQ ID NO: 634143 - DNA, 153 bp, Homo sapiens
tcgagctcggtaccggattcgatgtgcgcacaacactataaggagttgatccaattcacaagtcaggccgttcacacgcttagttaaggtggccattatggggccaggtggctggcaatgcagtgaagctgcctccctgcctaatgtctcttt

SEQ ID NO: 634144 - DNA, 259 bp, Homo sapiens
ccccctttgggggccccggggggggggtcccctttacccccggggtttttgccccccctggggaaaaaaccaaacccccgttttttccaaaaacaaaacccaaaaaaaatttttggtaaaaaaaaggggtttttggggtttttttccctccccgggccccccaaagtttttccccccccttaaaaacctttccctttattaaaacccaagaaaaaggggttaaaagtggtttttttttacccccccttttaatggggga

SEQ ID NO: 634145 - DNA, 115 bp, Homo sapiens
aggatctcaggaaccgtggttcggaatatcttccatattgtaattactactccggaaaaaaatgaagcatttgggctacactaggtatggtcttgagctatgatatcaattggtt

SEQ ID NO: 634146 - DNA, 608 bp, Homo sapiens
ctgttcaatcttaacacattgttactttaatatatgtataaagaagtattactgtttgtaaagctgctgtttgcttaaaaaaaaaaaaaacaccctgtcatgttatttttctgtatgtggggccaacaggtttagaacattcaactcattttaaacaatttttatcttttttggatttaaaaaaaaatttctgctgaaataactttatttacagacattcttcctcctccctcatccctttccaacctttacattacattcacagaattcaaccaaactgtttgcctaatctgaaatctgaatcctaattgagaaaaattttaacttttggtgggcacattcacaccttgaaagtattggtacttattttataatttaatttctaaattataccacataagtttataactttaatgtcttaatggtaatgctctaaataaaaaaactagcaaaattagtgtgagtttataacattgaagggatttccatctttggctgtatgaaggactaatgttatatcaccattgggggggtaataacagctttttggcactatgtaaatactagtggggattcttctgtactaataaacatgatttcttgacacg

SEQ ID NO: 634147 - DNA, 137 bp, Homo sapiens
gtaaatcagcgatgacaggttaagcagacctggagatgatgcttctcctgaaccctggttcagctgcattcagaacaagcccctgtattttgctgatcggctgtatgactccatggaagggcaagtgggacagcgag

SEQ ID NO: 634148 - DNA, 122 bp, Homo sapiens
caatgtattatctggagacacactatataccctggtatagcagatcgtatgcagaaggcaaatcactgctctgagtcctagcaccatagaagattaagactaatagactccccctagagcgt

SEQ ID NO: 634149 - DNA, 214 bp, Homo sapiens
gcaggtcgctctgaggatcccgttcgtggcatcggcgcgctggtggtgttccctctacagatgatctttctggtggtgaaacgcggcgtcggactggtgctgtccgccaagctgcgggtacctgtcgcgggagaacgttcgtcatcaccgtcggtggtataggcttcagcgcgtcagtctcgccctgctagttctcgtatcctgcagtgcgcct

SEQ ID NO: 634150 - DNA, 159 bp, Homo sapiens
tttcactgtggccctgcagctgggaatccctcactcctttgcactgatcagtctatcaggtcacaaatttcctacagatgactgatcagactcctgtgaaaggatccttcacagcaggcttctttggtacggtagtgtgactacggtgcgttgggccta

SEQ ID NO: 634151 - DNA, 474 bp, Homo sapiens
tgttaggcaggaattgtgaacacagagtcctacaagagaacagcagttaactgaaggcagtgaagcagctgcatgaaacacacaccctctttctcttccataaagaaatatgctctctccctttttttctcaaaagacacaaccctactcagtccattttttcatgttcctacttttaaaagagtcatagaaaaatgtggtatttcactttcttcttaaggatgcaaatgctctttaaaaaattgcaacatcctccgtgctggggacaagagagttgcagaaatgcaataaacaaactgagggtacatttgaacggccagcgggcacttgctgcagcccattgttactgtgcaacatgtcaggccctgcattaataaatcttccaagttttcatgagaagaaaggaattggaatttttatttaaaatctcatggtgtttttttaaaaaaatattagccactaagtcaaattttg

SEQ ID NO: 634152 - DNA, 886 bp, Homo sapiens
ttgacaagtatagttaattttatatggctttaaaagcaagcaatattcatatctacagacgtactcttcacttactggtggacttatgatcgccgccaccatatataaatatatatatatatagcaaacagccttgcggaaatcatcggccagaaaagctgcgagggcgtatgctaatggtcgttataccgtaccatgttatgccaccatgtgggtgagggtgagcagggatgattgaacgtgcatagcgatatttcaaacttctgttatacactggcagtgtgtccctaatgagaagctgaccagattatgcattctacctgttctcatagcacgaagtactcgaccaaaaagccaaatttcccctgttggagtatggtgacttagtgtagtctgtggctgacctacgaaatgacacagagttatcaagagtttcccttcctagaagatgaatgtaaccttttgtgttaggacggtagagaagataacaaatagcttgtgcttgccctagaaatgtgctaattactcttaacaagcgcaatgacattcaagagcctgtcctggagaactggaaatgtcaggatcactggttcaggttgtttatacctttagtgaattccctcaggtacaggtggtgacgtagggaggttcacctggaattgaaactttaagggaggtgaaacctttcggatgttgcctgcacttttcttatctgtgccgtttagttttcctgctgcaaatagccggaggcgcctccagaatctcgggtgggggacaggacgacggggcacaaagggggaaacgtttgaaaaataggtcaccctggcagaattgaaggcacaacagaggggtgcccagggacccacattgcccgaggttgttttca

SEQ ID NO: 634153 - DNA, 947 bp, Homo sapiens
  misc_feature (487)..(487): n is a, c, g, or t
gggaggagccgcagctgccgatgccggtcccagtcactcatgcaccgtaaccatgagcagcgaggccgagacccagcagccgaccagctggctaactcgcgtacggatctgacatgatcaggagagagacccagctcctgggactattccgtgtccgcggcctagtcaagtgcatacggttctcgtccagtctggcgccggtcccgtctccacttagggcgagtcgcttttcacagtaagcaggacgcagggatcggatcgaattgccatcccaatatgactctattggagagaatgcagttaggaacggccgcacatgtgtacctgaaccgtacgtatgtgatctccgtacatacagggcagattggcagtgaaaaccttcattttgtggcaaaagaagcgtaccgtcggtttaaacctttaggctttagtacccgcgtcgcaatgtaagttcccttaggagaaccaagagtagacgcgctagggnaaattccccgtctggaacggtatggatgcaaagtcgaagcttagataaccgtacccgaagtgtggaaatgcgccccgcagtgtcggtatggataaatatagcagttcgacgaaagagcgtctaagactgcttcaactgagtcctgttggcccgcatgatttcaagggctatcaaaaggaaccggaatgctaatgtcacgccagtggacggtcttaaacccagctaaaatacaactgtgtattcgctaccaggagagcggtcgcgtactacgtaacaggttccacaattgcattcgttgttaaactcttgtgtgaggtcgaaaacctagcgaagttagacagtgcccgcagtcgggtccgataagaaagttgaaatttcacgcacgtaacaagatcctttgagaaatacggggcccggtaatattaaccctgataaggaaacccactctaaaccacccatg

SEQ ID NO: 634154 - DNA, 844 bp, Homo sapiens
gtcctttcagagcagtatttatgatctaatttagtaactttactttgaagccccaaagtcattgtcaaatcaataagtaagaaccattgtgcataggattcctgagtccctgctacaaagagacatgtttttttaggaggtggcctgaatcactatgctaggaagtagctcctttgtcacactgttcagagtagttgactcctgttcctcagccattactaagacttgttaaagataatcaagtgtcccgtgattttggtataaagaaacagaattttagaaattattttttacatattctttttcttcaggcaagatgacacaaattatttttggaaaaatggtttcaaggggcatttgttattactgtttttccattttatttatttatttaatagactttgtattttagagcagtcttaggttcagaacaaaattgagcagaaagtacagagtgcccccactattgacatcctacgccacagtggtgtatttgttacaatcgatgaacctacatcaatgtctcattatcacccaaagtccacagtttacactctcagtgttgtacattctgtggattttaacaaatgtgtaatgacatgtatctattagtggcatttttaaaagaaaataattatacctggaaagtgaaatattgccactatttgaaaatttaaatgcaacaaaaaaaaataaaatctcaaaggggaaaactttaatgaactgtgcaccatgtgctaaacacttacttgctatagtccaacataacactctgacattgcatacaacctttcactccaaatgtcacatggtgacccctgcttccagcagtagcataggaaca

SEQ ID NO: 634155 - DNA, 151 bp, Homo sapiens
tgaacttagtccatatgaagacaacacggcgtcggcgtaggcatagacccgatccgccaaggtaaatcccagtttctattcatcagccggatgtacgcgatgtcagccgtagacgcactcagatcatccagattcttcatgagacttgggc

SEQ ID NO: 634156 - DNA, 166 bp, Homo sapiens
gtatatgtagtgtatgctgaagtgataaagattgaagtataatgtaagagaacgttctcttaatgtgtctgtgaatatgtatgtactctctctctctcaaataattgtgtatattgagattgtgtcatatatacagttttgttttgttttttttgagatggagtct

SEQ ID NO: 634157 - DNA, 403 bp, Homo sapiens
atttttatataaaagaagtttttcccctttgaattgctaaaagtggcatttttcctatgcgcagtcactcctctcatttctaaaatagggacgtggccaggcccggtggctcatgcctgtaatcccagcactttgggaggccgaggcaggcggctcacgaggtcaggagatcgagactatcctggctaacccggtaaacccctgtctctactaaaagtacaaaaaattagctgggcgtggtggtgggcccctgtagtcccagctactcgggaggctgaggcaggagaaaggcatgaatccaggaggcagagcttccagtgagctgagatcaccccattgcactccagcctgggcaccagtgttaagactctgtctcaaatataaataaataaataaataaata

SEQ ID NO: 634158 - DNA, 153 bp, Homo sapiens
tagttgttaggtaagaatattcggtaagccagtaattcagaataactattgtagaaaataataataatctattaatgtaatgaatcacctataaagtactaattaacttgttttacaacataaataacttgttatcaatagagcatttttgta

SEQ ID NO: 634159 - DNA, 115 bp, Homo sapiens
tctcaggatagacgtcttttctggtatcccagtctgcagtgggcaaatctatgtctttatttctcatttaagggcagactggagggatgacatattttttacgttttcaaggagg

SEQ ID NO: 634160 - DNA, 439 bp, Homo sapiens
  misc_feature (1)..(1): n is a, c, g, or t
ntctgtagagcaggttggcgatggcagtggcgtgataatagagttgaatgaaactactagcctcccgggatcacgcgatactcttgtcctcagcctctgggagtagctaggattacagacatgcgccaaaatgcccagactaataaatagtagttttagtagagatggggtttagccaagtaggccagccttcctcaagcgattctcttgcctcagactcccaagtagctgggaccacaggcgcccagacaatatgcccggctcatttaatagtatttcaagtacaggtaggtatacaccgtgtaagcaaggatggtcatcgatctcttaaactcgtgatgagcccacactcggactcccaaaagtgctgggattaatcggagtagagccaccacgccctgcccgcaaaattcgattgggtaactcctaaattatacca

SEQ ID NO: 634161 - DNA, 451 bp, Homo sapiens
aattggaagttattcctggagttctttaaagaaaacggagggtataccgggtgtcctttccctgccaaactggacttgcaacagggacagaatttactgccaaggtctgagcaagctcagcccctctacctcagggccccacagccatgactacctcccccaggagcgggagggtgaagggggcctgtctctgcaagtggagccagagtggaggaatgagctctgaagacacagcacccagccttctcgcaccagccaagccttaactgcctgcctaaccctgacccagaccccgctaattgcccccccgggaacagatggtccgggcggggtttttccttcccgccctttcctccccctccctgctggggagaatgacacatcaagctgctaacaattgggggaaggggaaggaagaaaactctgaaaacaaaatcttgttctatgcaaa

SEQ ID NO: 634162 - DNA, 101 bp, Homo sapiens
tgttaggaagatctggggattacagcagttctacgactgctctccggttctctggaggtcatccacaagtgggcggagaagatccctgtgctttgctgagt

SEQ ID NO: 634163 - DNA, 631 bp, Homo sapiens
gtactgtctttctttctttgactgtcatgtgcctatttcctacgggtgtacctaggatcacatttgtcatgatctcggatggctaactatccaacgatactgacaatcgatgtcctgctacgaagactgtatgaaccatggactgcctttaaagcgtcaagtactatccacatcacaagaggttaacggattgagtacagaactgttatcatgcgctattaaagatcacctgatgcatgtgatatacactgggcttttagttcgtgcccttacctagcaatggggaaagtgcggataatccacgagcaataatgccagcaagggtcatcttagttattagctacatcgatatgacaattagtgcacctagatctgaaatagcgagactgtattgatacggcgcgagtactttcacttgcatgagtaattgaagcgctttgtagccttacgatgaatggatgtagagatgcctgatctagtataggcgtcacttgacgcagtaggtatattgactgacgcttgactgtacactgcgtcagcttacgcgctgaagatgcatgatgtcatcgactagcgccacatgtcacactgaccgctgacagctatatacttctttgatatagcagtgttg

SEQ ID NO: 634164 - DNA, 346 bp, Homo sapiens
ctcgctaccgctctccgtgagatgcctgtcggtttcagagctcctgcgcagatccgcgctaaacagaaagatcatgacccgcactgacatcaaattgatgaatgagctgctacgcctgggtggcttgcagaagcacttgcacaaccagatgaaggacggaatgacgactgagctaagtaagcagttctcagaggtattggttgccctgaagaaggctgtaattcagcttgatctacaagctgtgccagtcggggagtgacgaccaggtgaatgtgattatcccgccaaaacgacgtgacggagccaccagcttcatgaagctggtggcttacataagtgtgcggga

SEQ ID NO: 634165 - DNA, 1245 bp, Homo sapiens
  misc_feature (440)..(440): n is a, c, g, or t
ggcatctctcgcgctaacctcccgaccgaccgcgtgtcctccgatcagttctcatcgttcatgctccacggatcgttggggtcattcagcataacgcggccttcgtcaccgagatattgtgattcgcagtaggcgagcgtagcgccgcgccagcagtaatgaggcatggcacgtacgtgattacggtatgcacatgaagcgaatggcatgccagtccgtgaaccacaactgagtgcattgtatgggtgcatgcgagccatgatgagtacaagggcacatgcatatggctcgatagatcattcaagacaagggacgccaagatatcgcctaagaaggtagatatagttgaccacgacaagattgctctatagacggaaccttgagtagttggagcgaggagtagtgcagagaggtaggacatggaggcaggcaaaggtaangaagataggcgtctctggttgggggaccaagtagcctggggtggcgattgtgaaagggatttaatgcactcagacccatggatgtgtggccccatcggtcgcatactcgccgagaatttaccggagtggcttgaatacggttgctcgataggtaaatattctcggatctggaacaagtccctcatgaagtgacgatcgtagggacaaaaagcaatcgcgccaagcaatgaaaatggttgtggacctgccccagaaaaagtttcgaagggctagttttgcgtagttctcgcataggggttggcacgcaatttcgattaccgcctgggatattagagggaaaactatgggaaaacggaattgcgtctgcttgcgaataatgtgtatagaagaactaccaacgataagcggcgtgggtaaggctttaggcctcaaagctaattgaaatgaaacggtggaaggccgcgcgctggaaaacttcggttgaacaggaaataagggcatgagggagctaccatggagcgaaattagctaggggaagtatgagggctgggcgactattgtgttgaggggttgtcacccaatttcgggggaaggaattggttctcgaaaggtgggagaaaataaaaatcgccgacaggatggtaattggcggcaagatgttggaacgcagaggaaggagggtttaatatgtaggggcaacaagagataggggaacgttataactgaaatgaaagtgcgtgtgaccattcacttgacgacatagggacgataaaagcacacgggttggggggaaaaaagggaaaat

SEQ ID NO: 634166 - DNA, 125 bp, Homo sapiens
  misc_feature (64)..(64): n is a, c, g, or t
ctgaacaagatgctctcccctcctcggaggatgatgatgatgatgatgactcctcttcagaggngaaagaaacagataacaccaaaccaaaccgtatgcccgtagctccatattggacatcccca

SEQ ID NO: 634167 - DNA, 532 bp, Homo sapiens
gggatgaccaggctgctcggagtgccgagcagttacaatgaccaggccgacaaggcatctacccgcctgaagcagctcaagcgggagcttggagtgaggcctgaagaggaggtctcaggcgggccatatcgcctctctcgccggaatacttgcgagcgcgatgctcggtatggacgccacttgttagatcggccgatgccgatgaaccgcgaagtcgaatgctcccttattatatgaacaagctcacgcgcgggtgaccttggccgtggtgtacgtgtccccgaccgaattgggcccgcgagaaggtcgccggcggaattggctccgcaccgcaaagcagcgctcacgattgggccaatagacggagatgcggggctgaggggccaaaacactgtctcggagataagtccttctttcttcctgacgagcctgaggcagtgggattgtgacacgattatgtatgagctcaagcaaggccgtctcccatatcccgcaaggaccccccgggcgagtacaactagaccctcatacc

SEQ ID NO: 634168 - DNA, 975 bp, Homo sapiens
cctgggctactacgatgagcagatgagtttcagagtggccgtggcagtatcggcgttcccacccttctttacagttacgaaccggaatgtggacacgtcgggagaagcagctggccggcctggtgctcgctggtcctgtccttctgccgtcctgcacaaacagtccagcagtgactggtgatggaagtcgtcacggagagcccggctcttcaacaacgtcgaagctacagcgaatagcttacctgtggatgtcgatccagattgtattatgaggaactgagggaagaaagggaacctcgagtggttggagtaagagcaagtccagcttcctggatcatgtggcggaggccaggaagaactgggggaaactcagtctatcaggtgggtttccaggagtgggcagaaccaactccgatctttaccctgtatgaacggactaggggggaatgacacagaggatgacggagttccacgggctggatgaagccagtctactgcgggctctgactggccctacagatgagcacaaggcgagatcatcactgtcacgcgatggtcgaggcgtcaagtctggctatgccgggagcctggtatcccgttggacttgtgtgaccttcaccaccttttccggggggttcgcacacggggaccgacctgtggtccccagagaacggtccgggagtctccgatgcaaggctccgggccgaaggggggaccgggggtggtttcccccaggttgcccgttagggggcgcaggcgagcgtgtatattgcgccccctcacgacaacgacaatacgagggcacgcatcagcaacatgtgtacacggcagctacaagaacgcgggaaagtttcaccccgagagtcgtagcaacacgagagacactgcactcgtcggctcgtcacacagctgctccccctccccacgcaccgcgagagcaaataacagccacagcacagcaccaaagcgcaacag

SEQ ID NO: 634169 - DNA, 1072 bp, Homo sapiens
ggaaatttgcggagcacagcgtgcggtaatgcggggccacattgacttcagtctaactggccctgctgcaaaatgcgggaagtatgtgtgtcgagcgggacctggcgtgtgtacaagcgagctgctcaacatcttccccaaggaggtcttccgggcctcgataagatcatccaggcgcgatctatcgcaccactaccctcggcagccaggagtgtgggactcgctgtcctggacgcacgatggagaaccaccggatgtgactgcccaagcaaggagaccggacgttcctcgctgattcagtatcttcggagcgcaaaagctaccccatgctacaacgttgggtcgcgccatgaagactgtaggtatccctcgcattcctatgaactgtcgaaccccttcccagtagccccgggacctgccccaggagcctgtggcagctgtgccattgttctgggcctgctgggcatgagagcctgaccttaggtgccagggtcaccatctaccagagtccttttgcccaaagactcaacaggtgccagacagaatccgccgccagctgcacatcggtaggtaacgtccgagagcatgggggacagccaagtctctaagcttacccaggccctgccagggttctcgcctggggctaggctgggactccctgggcctctgggccagagtccctgtgcaggggaccaagggaatgtatagtttccacaacacgggaatccagaagcccgatccacatggctgcctgggcctgcacaacatccagccggactagccaatgcagcaggacccttttcctgttgtgtcgcccaacaacgtgggctgctttaacaacattcatcagaaagcgtaatatgaatagcccccgcggaagaacagcgcccaccggcgacaccaaccccgacaaggacgaaggatcacacttaccaccacagtcgatgtaacgtggccaacgcagacgagggtaggaccacaaaacaatgggacacaaaggcaaggggcaaacgaccgaggccacaaaccacaagaggagacaaacacaggcacaacaagcgagaccgcagaa

SEQ ID NO: 634170 - DNA, 1079 bp, Homo sapiens
gatcattcctgtgatcgaggatgctcgacacgcagacaaataccgcatgctcatcgcaactggtggagtgtgatcttgggctgatgtggtgccagccagatcgcagacccggattgtcggctcctgaagtgccgcagcgaccttcctgcgtaatggaggacgacgtacgtgatttgccattaaggccaactggcattagactccacagtgctcaggcgaggccgtgtttgcctccggagagtgaaaaaggatgggaacaggagaacatgaagccgcaggagcaggttgacccttggagtccatatgaatagagaccagtgccgtgggtcgatgggagtgtacaggaccagccgccccaaggtgaagaagcgtgaagttcagcgctggtcaggattgcgagagatgtgtgtcgatactgttgtcacggtgtgtgttttactattgaaagagactcatctcgttgcagagaagaaaagaaagatgaaagaaagaaaaatggtgtggagggtttgttgtgtggggggtggggggaaaagaggaggcaagagaagggggcaggtggtgaaacaggggagttcgctcctggggacaccgaagtttcacttgcgtgtgccaaaccgggtggtaaaacaactgcgcgcggtgcattgccgccttgaataaggcgaagtggagtccaatgaagctacttcccatgaaaagcccccggggtgtcaagcaccggggatttctcgagcaggacccccagggggggaaaacaacggcacccccacaagcacgggacggcatggccctgggacagaggccccaagagcggcacgacaaaccgtcacccctgtgccggaagcccccgaaactgggcacatgcttggggggacaccaaccgcggaacacccggtatggaggacccgggaacagacaagaggaaacacaggagggcaggaggacaatccaggaacgagcaaccaggcccccggggcgggacacgcagcacagggggaacgccaagccccgaaaggaccgccatccccaggagggcacataggccccggcgacggccatgggcaaggggccccgta

SEQ ID NO: 634171 - DNA, 210 bp, Homo sapiens
aaaagttgtacagagtttagaacaaacagctcgagagattttaactctactgcaaggggtccatcagggtcctgggtttcaggacattccaaagaggttttttaaagctccgagaacaattttgggacaataaaaacacatcttacatcttttaaggcccaatttccctcttgaccagtttaccagttttcatggagctctgggaggttt

SEQ ID NO: 634172 - DNA, 112 bp, Homo sapiens
ctaaatacctcttaggtcagaaaacaaaagtcaatagctagatcatagagatattaagacatgccctaaattccttaatctgacaaaaattcatatgaggtttaaatatttt

SEQ ID NO: 634173 - DNA, 1123 bp, Homo sapiens
gcaggagggtgctcgggaggccacaggaaggggctcctggactggcctgaggctggccggaggggaaggggctagcagtgtgtgtcaacagagggttccatcaggctgggtgcagggtgtggcgcttccgcacacttgaggaagcctcccctctccctcggtgacatcttgcccgcccctcagacaccctgcttgtctccaggaggtccgacagctctgtgggacctcttggtgggcaacggtggggtcgaggccgggggagtaagggcagggtcccggcgggtctgcagccccaagagcaggaagagatgccaagggtcatgcccatcggcaccagggttgcttggggccccaaggaagacacaacggagtctagagtgatgccaatagaccagacaccaacatgaggggccatagaggcattgcaggcaaggggactcgagactctcgcggaagggtttacccttccggagcgacccgagatatgtaggccacccaaaggcttcaagacacccaacttggaagaggcaagcacaggagcagtaaggcgattaaagacgggcatgcagtgctatcctaggcagtccatgggtgaacggggggcatagagccaatgacccacgcggagtaccaggacaatagccgagtaccagaccatacaagggaccagaaagacagggtcacctccgggaacaagccgccactagatggagtggggccatccagagaacactaggcgacagaagggccacaagagccaaatcaggacagcaaaatgggggaaccgcacaagtttgggcatgaaaatcacaacaatcgaatacggaaggacaacgccaagaataaactgaccacattcggtgagtgacaccgagagccaaccaagtgctgataaatcctggcatcgacggacgtgggatgttcccgaggggagagttgcgaacacaaaccccatgcgacagcaggggtcgaagatcttcccaggcacataacaactctagccagaaaaggagcagaggacaccgagcagaggggcacccacatagacgaccgcaaagcacacaagatcaagaggggagcccagagggcacatgagaaggaagaccagccagacatagaatgg

SEQ ID NO: 634174 - DNA, 545 bp, Homo sapiens
atgacttaactttacatgaaactattgtagtctgaagagacacaaattttaccagcaggttaaagaagcatggtttaaagattaaaagaagaaagatagctaataagggcttaagaaaggaaggaaccaagttatggagggtaaggcctagcagttgtccaacaccacattagcaagagaattgagggaggtttttagcctttccagggcctgcctcacctggtccactatatgcctagggctattgtgactccaggtaccctgcacccagactaaaaggaagaggttacagtgagatagaaggtacagtggctgggcgcggaggctcacgcctgtaatcctagcactttgggaggccgaggtgtgtgaatcacctgaggtcaggagtttgagaccagcctggccaacgtggcacaaccctggctctactcaaatacaaaaattatccaggcatggtggcaggtgcctgtaaataccagctatgtgggaggctgaggcaggagaatcccttgagcccagcgcgcaagaggttggcaatgagctga

SEQ ID NO: 634175 - DNA, 295 bp, Homo sapiens
ccctttttaaaaaaaaaaaaaaaccccccccaggggggggggggggtgggggtttttttacccccaacccttttttattgttacccccccgggggtaaaaatttttgggggggggccccccccgcctaaaagtgttggggggccccaaaaaccccccccggggccggggggtccccgggggccctttttccccgggggggggaaattccccaaattcccccggggttttccctcccccaggggggggggtttttaaggggccccaaaacccccttttttttttttttttttttta

SEQ ID NO: 634176 - DNA, 795 bp, Homo sapiens
  misc_feature (1)..(1): n is a, c, g, or t
ngacactcacctttttttttgtgggtgcgcacctgttggagagggccacacattttgtggcggcgtctgtctccaccttgtggtgtttttgttgtaaaaaataaggagagagagagacgagagattttttctcctggtggctgtgcgctgagatgatctactcacacggttggtcgctctctcgccccctgtgggcgccccccccccacagtagagtgtagtctcgcgcgagagatgctctcgccgcccacatctttctacacactctctctctctctatatagaaaagagtgaatattatattgccccccccccccctctctctgttttgtgatatagagaaacccccctctctctattataaaaaagagagagtgtaaaaacacctctgtgggcgctcacacaccgccaccccccacaattttcatcatgctgtctctcttgttgaacatcacacacacgaggatgttctcgtccgagaccgaccacaacgcggcgcgggcgtgtatcggtctttctgtaacaaaaccagcggctggtccccacgcataacatataataaaaagaagaggctcccccgaattatgatgtataatttatttgtgcccgcagcaggacatattaatagaaggcgttatataggaagaggccccgcgggcaccacatattgcgccagaagagacgccccgaatatctgttcttctcactttgcggggttttttttttttttttggaacccccccggaaaaaaattttttgtggggacccaaaaaaaaaggaggcggagttttggta

SEQ ID NO: 634177 - DNA, 993 bp, Homo sapiens
ttcacgtggttgtgagtcccttctgcaggtgtgtcccgtggatgtccgagcctggcagggaggctcgccggctgtggggagagaccagagttgttttcgtatagctgcgcccgtggtcgccgctatggtttgaacagcgccgatatcggtcttttgtgcgcttccacttgaccgtccttttgagggggcccttctacgatgggctccgcttggcgaggggcccccttgttgcctgtgggggcccgggggggtttttctatcccgcactggggtgctgttcgacggtgcactacgagcccccgggacggttggttcgtcatgaccaccatcgttcgttttttgggacggcccgtggtggttaaccacggtgcgtctcctatattacggtggtttttgtcgcccctctctcgccctagagaagatttgggggtttattcaaccaggtcagccccatttttgtgttttgccgtctggagcccgtgctttgtcccacgtgtctttggagagggtgccttgttttgtttcaggcgcctccgttctcctgttgttattaccagaggggtggcccccggttctgctgtcgcttggtgtttttttcaggaagtgtgacactggtggcccccccccgcgaattgtgtcccaaccttttgggtggttacccgcaccgcgggtggttcccctcccccttttgaataatttgtgtgagagccactggtgcctctccgcgtcgtgcgccaggcggttgtgcacccccaccgcactgtctcggcgtctccgctccacgcggagtgtttcctctccttctcggaagatggagcacattttggggctgtcccctgagggaggccttccccagggtgggaacaccccccgatgcccgttttttccccggtttccgcgggccttttttttttttaataccctttttttgtttttttttatacccctaacgtcccttttttttttttttccaaaaacactgtttaaaaggga

SEQ ID NO: 634178 - DNA, 361 bp, Homo sapiens
gctggtcttcatctcgccttctgcctcttagcttcatacagggcgcgaggtgcgggctcgcttgaagaagccgacttccacagcaggaggatgatcagccccagcagcagcagccctgtaaccacgggcaccagcatcagccacagatcgatttcggccggcagatcctccagcagctccgagtcaatgtccacagagaaccacgtgctcttgttctccagtgttgatggtggggatgctggtacggaggaatagggtagcccagccatttacccggactcggtcgaagtctctgtaatcctcgatgaaggtgctgtgccacactcgtgccttcacagtcacgttggtgacagacgtgggg

SEQ ID NO: 634179 - DNA, 198 bp, Homo sapiens
ctgctgcggtcgctctcgcggctacccggccaccttgtgtggcctctggtggcgcggcatccatcccctccacttcccacggcccctggctccatttgtccccccatcctcaccacagcaccatcaccccccggtgggtttttttttttttttttttttttttttttttttttttttttttttttttacacaccccct

SEQ ID NO: 634180 - DNA, 255 bp, Homo sapiens
aagttttgacccccgttcccctcccccccccgtatccccctcacggctcacgcttttctatagagaaactcccccttttctcttgaaaattctcgccactctttgaaattgaaactcttgtgaattttatttttttgtttccacaaaaagtttataaagaaaatgggaaatgggccaccacgctgaggtgaagacacacatatattttaggccctggatagaatatttttaaaatttaactgtttcgaaatatga

SEQ ID NO: 634181 - DNA, 551 bp, Homo sapiens
ggcgcagtgtgtgaatatcggtaatgttgacaggtaggtgaggatagcagaatgtgcgatgaggcgtgcacctacgattacccaataagggctagacaggctgtgggctactatggctcatactaggagcgcaggtaagtatgtaggctctggcggtattcagatacagacaccacacgactggagaagctctcgatgtttatcaagtcaatggcagatatatccatgcacatggaggaacgtgaggcatccagaatagccttagtccttggccccatccattgtcagctcctccagctaactccagctagtcctcatttcagttcccttcggtttccaataaactagggcagacggcagtatagtggcattgtcgttgatgatcttcaccagcttccggaaagtgataccgcaacaatccctgaacacgcatagagcaggtattgatgtccttatccagctaggtcaaggaggctaatggactggataatcatattgtccatccggtatcacattaactaaacttaggcacgggaatagctgtgtccaga

SEQ ID NO: 634182 - DNA, 158 bp, Homo sapiens
gtagctggagaatcgcacgatctttgaatatcagactgtcagggttagtctctgctatcattatgagttcataatacagaactaacactcatgacataagtagccttccatacaaaaaagtgttctaaaatcaagtagacacttgatgagctcaaaca

SEQ ID NO: 634183 - DNA, 117 bp, Homo sapiens
cctctgtgtcatactactactgtgtggtactgacacatttgacagctcctgtagtctccaaaagggtcttggtgaccactatatcaaggatttagtttgctgaggtaaagaccgtcg

SEQ ID NO: 634184 - DNA, 300 bp, Homo sapiens
ctgactcagaaatgttgatgatgaaggcacatctgatgaaaaggggcacactgtaataccaaattgtccctacttccaagaaagaaagcacatcttggcgagattcagactatgtttctactatgtcgcatgaagaacgatctgatagttgttttccaactctgttgatagctgtattctctgtataaccggtctctgagaatttgtctcctaatactacttcctcattggaagaccagggtgaggagggggtatctgagccccagggaacattttctggtctttcctcagagttccttg

SEQ ID NO: 634185 - DNA, 692 bp, Homo sapiens
ggggagacagcctgttgcgtgtacagataatgcggcgcgggaagtggacacaggttgggctggagctcagatctaactggactctcgctcctgctggctggacactgcggaggattcggaggaagatgtaggtttattgtggatgatgaccttgcggactttggggtggctgtcaccatctgacagccgtgacgaggaagacggataacagtgttggtgagtccatgtagtaaaccacttcgtactggggcctcgtcccagctgaagatgatcctcaaatgcagtggtcaccgtgacccccccatgggttgtgagcgcatcaaggcgcttagagctccccgctcaagatgccccaagaagtaacggctggatgcgatatcctcgaatgatgtccggaccgggctgtggccgctcagctggagtcagatgtgccctgcgagtgatcgtgcgatgaggcgcaggcgatgcgcctggggactcgtccggagttgaagtctcagtcctcgggcgagtggagacctttgttgctgacagtgatagtcctgtccgagaccttgctgcccactgttgaactctttgacgcggagacacccccttccccaatggcagcctgacgcctcgactccggagtaatgataggaaggggtcagtcagggctctccggggctacaatctggtaaagaggccctcca

SEQ ID NO: 634186 - DNA, 461 bp, Homo sapiens
taactgcggcctccacctcccagattcaagcgattgtcctgcctcagcctcccaagtagctgggagtacaggtgcgtgccaccatgcccagctaatttttctatttttagtagagatgggggttttgccatgtgggccaggctgatctcaaactcctgacctcaagcgatccgcctgcctcggcctcccaaagtgttgggattacagtcgtgagccaccgcacccggcccatccttttatatttaataaatcctactatctttgctactccattttgattatataaatcagactgcattacacaaatgcttataaaacaggttgaagaaatgcccttctgttcctagtttgttgagtgtttttatcacgaaggaacgttgtatcatgtcaaatgcgtttttgatacctactgagatgatggtgtaggttttttcccttcattttattaaaatggtatattt

SEQ ID NO: 634187 - DNA, 667 bp, Homo sapiens
cctcgacggctacagagacgccaagagcaaacccacgcacctaccctgattcccttttgtccagcagattttagttcatgaaacgactgcactgcaagaacggcatagtatggcaactctgctggccagattgtgagcttgggatcggataaggcatcccaactgtaggctatcataggattccggcatacgctaaactacataaccgtgaatgtgcaccactggtatgaacaaaacataaaacaaatgtatcaactggcccacataaaatgcagctaagacatcataaagacaagtgtaggcccaggaagcaccactctggaaaatgatgagactctaattattagcgaccggatccttgagactgtcatatgtccctacctgaaggagcctctacatacatctgatgataacattagcaatgggaataccgcctataacctgtgcacaaccgtgactctttatgctattgagaaacataaagagctcgaaaatgagccactatccctcgtgaagagcagagtgttcaggaacaccgtggcatcaaagcgcaaccagcagatggctccatcacagtcatatgccaactcggagtgagaaagctatgaaggtaagcttcctcaccatgaaggtggatctttgccgacctggaaattattgatctacg

SEQ ID NO: 634188 - DNA, 415 bp, Homo sapiens
ccaagatcaccatcggacagatcaatgcagaaaaccaacaaagacacataggacttaatccgcactacagaccacatggacctaatagatatttatagaaaatgtcatccaatggctgtagattaaacattcttctcctcagcaaatgaatgattctcaaggacagaccatatgttaggccacaaaacaagtcttaaaacattccaaaaaactgaaaccatatcaaatatcttttctgaccacaatgggatcaaaccagaaatcaataacaagaggaattttggaaactatgtaatacacgaaaattaaccaatacactcctgaatgaccagtgggtcactggaaagatgaactaaaataggaagtataagcaaacaggagatattaacagaataaaaaagaatttttaaggtac

SEQ ID NO: 634189 - DNA, 1006 bp, Homo sapiens
gcagaactctggctgacagccactatttgttccatctcctggtgcccttctgagaagtgccagctattttatgaggcaatgctgagaggagaggaacttacattctgatctctgccattctgacacctggcataaaatgatgaaaaccagcgccatctctcctcttttctgcctacgggccagttccaggcaaattacaaagacagcttaagatcacacccaagccattcctagttctctggtgagggttgtggcaggggtcatggaagggcatttgaagcaccaggtcctgtcctagtgagctttggctccacttgggtacccaggaaacctcgcaaggtagtttggcaggaatgacgtaagctgtaaggtggacttgacagatgacaagcgacacatctatacagaatgcatgcccggatctctgggcaaagccttgcagagaaactcagaagatcccaagactgagtggatctcaactgtgcacagtctttttacgttggtcttcccttgaactcaattaactgtagcctgaaaacgaagagcctttggtctctccttactgtaaagctcaccgttagcctccaactctcatcaacaaccagaaccagaagaacctgaatgtctggaaacaaaagagcagaaggcaagagcccagcttattgtgcttttcaaatacattcaacgctgcgcgttaccctgaatgtgtccacgggtgccaagaccactgtgtctggctggtgtcgtgtgtggtgcgtgtgcgtcaggcaaggacagagcgagaccacatagacgggaagaaaaaacccacgacacggatattaaacaggacaccatcgaggaattacacttccaaagcagaagggcccccctcataactggtaaggagaaaccccgcaacaaggacaccagcacaggggacaagaaaaaaaaaaagcggggagaaaagagcccaatgaaaaacacgggttaaccactacttagaacatagggtgtcacgtactcg

SEQ ID NO: 634190 - DNA, 184 bp, Homo sapiens
tcctcccagaccacacaccacataacatacacatcatctatacacaccacacaccacatcactatcacacacaacacaccatacactacaccacacacgccagacaccacatacacaacacacaccacgccatacacaccacacacacaacaccacacatcccgtgcatgccacatacaccgca

SEQ ID NO: 634191 - DNA, 765 bp, Homo sapiens
taaactagaagaggctgagtgttaatcaggcagaggctgcctgagtggttggctcctcaaactgggagcccctacctgtgcgtgtctggccgcctggagccgcatgactccccggtactggaggtgtactgtggccatctgcaggaacctcatcctcaagctggccatcctgtgggacactgtgctaccactggctgggccgcagtggtgggctgtcctgcatgtggccagtgctgggatgtgattttgttgtggccatgtgagcttgtacctgtgttcctgcgtgactggacttctgtcctcattgttgcttggacactgcgttttttggtgtgcaactgtgttgtggatgtgattagtctcctgatgaatgaacgcttgaatgatgtgatgtgctgtgaatgcctgtgatggttatggacatattgccctgtgaatttgtccttggatgcttgagtttattggtgcaggactcttgaccttggcttggggtgtgctctatctcgcccctacctcccctgcctgttgcagggtcatcagatgctgcttgctctgtcttctattgtcactgaaggaccagcccttctgggccagacttgcctggtgctgctgctgcctggcccttggcttggccttcatcacattaagcacctgtcttccctccacgcttgtcttgcttccccggccttcctggtgtgccgttgtcttcctctgctacgcccgtcctggcagtgtacgccctcgaggcagctgctgcccttccgg

SEQ ID NO: 634192 - DNA, 830 bp, Homo sapiens
ggagagactctgggggatggaatcaaggagttctcaggacgcgaaacctgggggctctagtaccccctggacatcttccttgccagtgagatggcctgtagctggaaagcgagtgagaagccgcgtgaatcggaagacgaacgctgagacgcgttaggaagagcaagaacctgccaaagagctgaggttgtcggatttccacttggggagcattgccaggtgtcgagactgacgtgattttccttggatggcatgtgggtgattaattgacctcgccgaatggatgacgggacttttgttgggcgattctctggaccgcgtgaagactcgttccatacgtccaattgttggcgccttaacggcttgccgaacgttgtttgtgctaccacaaagtgggcccaggagcctgcattcctagtccaggtgggtggccaccacaaaaggaatcgagctctgggttggccagcgagttttggccgaggagaacacgcaacttgggtcagcgacacagtgggggggccaagaacattgggtcctaattgaaggagccacaccgggagggcgttggccccttccaggaagttccatgtgctgggttcccggtacacaatcgcttgggccttccaaaccgaagtttggtacgtcacgcaaagggaaaagacccctccctggggcgccgtcgacgatggaacccctgtgttcccccgtttacctgttggacaggacacgcgggacagtacttggggtgaccagcccacactggacgttcccgcgaccgctgagctgccccgaacactgatgtgtcttggggacgggcttcccctttccca

SEQ ID NO: 634193 - DNA, 273 bp, Homo sapiens
agctgggattacaggttcatgccaccaggcccggctaatttttatattgttagtttagatggggtttccccacattggccaggatggtcttgagctcttgacctcatgatccgcctgcctcagcctcccgaagagcatgagcccccgcgcccgggcagtttttttttgtttttttttttaaagctctatggccagcttaattaaaactgatattcaagctatatgtgtacgtgtgtgtgtgtttaaggcctttctgctattgcacttggggcg

SEQ ID NO: 634194 - DNA, 736 bp, Homo sapiens
tgtggatggctcatgccggtgagcccagcacgttgggaggacaaggcaggtgggtcactgaggttgaagagatcaacgagcattcctggtcatatggtgaataccccgtctctactaataaaatacaaaaattagctgggtggtggtggtgggtgcctggtagtcgccagactagctctgggcacggttgaggcacggaggagggtgccttgagccctgggaggcggagagttgcaggtgaggcctgagatcagcaccagtgcactccacgcctggcaaagcaggagcgtagactccggtctgtaaagaaacatagaaagaatgacaaaaaaaagaggggaaccatagtggaggcaggacggggtcatacacaggagggtacatccgggggacgccaaaggcaaagtggagtcgtgaggagactagccggcatgccggagggaagaaggctgagagagacgacagggcacggagaccgaggaaagggcggagggtgacggtagaaccagggccgactgcgtgggtgtcaagcggactcccgtaagaaggaaagcagagagtcgggcgcagtcccgctggcacacacaagcagatctttgggggacgaagctaaaaaggccgaccaacagaagcaaccccttgcgtgggcccaaaagtagcgcgcgcaatgcaattggaaacaggagggatccacaaagcagaacttactgccagagcaaatcagagagcgcacacg

SEQ ID NO: 634195 - DNA, 89 bp, Homo sapiens
gggcggttatggacacctcttaaagctggtcaaatcatattttggggtggaatggcctgataagttaataaatttttttaaactgccca

SEQ ID NO: 634196 - DNA, 118 bp, Homo sapiens
ctgtttcttatttttttcatgaggaaatgtcttaaacttgggaagagtcataattctgggatgtttccaatgttgtcagctttaaacttctatagacacagggccttttctctgtgaa

SEQ ID NO: 634197 - DNA, 345 bp, Homo sapiens
  misc_feature (8)..(8): n is a, c, g, or t
  misc_feature (101)..(102): n is a, c, g, or t
gaaagctnagcacaaaagcgcgcaggctcagacactttcattttgctgactttgatgcctattaaataactttcatgcagtcacactggggtgattttggnnagtgaaatcatgccggggcaacgggtgtcacgcctgtaatcctagcactttgggaggccgaggtgggtggatcgcttgaggacaggagttcgtgatgagcctggccagcatggcgaaaccctgtctctactagaggtgcaaaggtgggcttggcgtggtggctcatgcctgtagtcccagctgcttgcgaagctggggcaggagagtcacttgagccagggaggcggaggttgcagtgggccg

SEQ ID NO: 634198 - DNA, 1123 bp, Homo sapiens
ggtcctcctgggagtctcggatgggaccggctgtgcagacgccatggtgttggtgctggtcttcctctgccatgattcgtgctggtgtcccccatgtgtccttggccagatgcagcttgaaaaggcgaaggtccctggacccatttttcattatgattaccataccctgaggatcgagcgactggtgtacagctgtgcggtccgtcttctcggatggcgtgaatcctcccttatccctaagatccgcaagggtgctaatgtgtcagttgcattactcaagtaagctctcgcaggggcccgcgaagggagatgaggctgccgccagtgtggaaggaacctcatcaatctcgtacaagtgccaataatgagcccctagaagatgctagaggaacttgaatgtgcgagaccaatcgaagttggcacaggacgtctggagagcgtgtaatgcggcgtgtttgaacgcttttggcagtgcctaaaatgtccgatatgctttatcgagaaatccgaggacaccgtgtcagtcaatccaaggcccttgtctctccccatagtccgtaacatctcaaagatacctttgctgttgtccgcacaaaggcataatggcccgcatcataaacgagtccatattcttttacaacccgtgagtgattgcaccttataaaattttggtcttactcctaaatggtagacttggtatttcctggccacaccatcccgggaatggtggtgtggtggtgatggaggggaggtagtcccggagtggtgctgtgtaagacttacggcgtgttacaggcgagaggttcgattgctcgttcgttaacgacgtacccatgggccagcgttctactcctcattgtagccatttcttagtcgccatggggttccttagtgctttaccgaacgaagaagtctaggctatattaaagtacgcaaaggccaggttttggcctacgggctacttccacctttggtaggcataggtacttaccgggggccttataccgccatttcatgctttttgcggccgcatattacgcgcttaatattacccacccaggcccctgcccgcgggggttttaagcgagcacgagtgccccgggcaacaccctgtttggcaaaa

SEQ ID NO: 634199 - DNA, 283 bp, Homo sapiens
gattataggagagtctcattttctaattttgcacttacgtattactttttaaacaaaatgtgtgcttttttttcaaaatcacagaacatattttaaaataaactagtgatgatggaatcacaacagtgaaaatttaagagatgaatttaaagttcaaatcaaaactgattttatgatcttaaattctttaaacacaaaactagaaagagtaaaccttctcagcatattccatataattgataccactttagaactaattttaagacaaggaaactgaacattg

SEQ ID NO: 634200 - DNA, 573 bp, Homo sapiens
  misc_feature (271)..(271): n is a, c, g, or t
  misc_feature (277)..(277): n is a, c, g, or t
  misc_feature (462)..(462): n is a, c, g, or t
catgttgaaagtcactggaaggtgtgccctatgctgcagcgatgcagttccctcctgaccatgaccaggcaggtgtttgacctggctctgtgcagatccattttgatcagaatgttctaaattttgactatgttactttttattatgagttaatatagtttagcagtaaaaaaaaagaaccacacctaaaatagaccgctgaggagaccatagagcggatgctttcatgcaccctttactgcactttctgaccaggagctactttgagttnggtgtnactaggatcagggtcagtctttggcttatcaataaattttaatctctgttaatcttacctgctttaaaaaaaagttcttgggtgttggtatcttaattatttccctaggtttgcaaaaactgttctgaaataagagggataccaagggattattttcaaatgttaactggcacttgaaaaaacgntgtatgtattagtgtgctagattatttagcagaatattcacaagtttctgttgaccttgttgattgagcatgactactaaatattatgtaataaaaagcctttgtcataac

SEQ ID NO: 634201 - DNA, 316 bp, Homo sapiens
ggtacctggagagagacatgcttgtcctctggattggaaagatattactctcgggaatcttctctgtcagcccgtagcctctgaaggcatgtaatctatcatattaggtcaattcacatttttgtcagtcctctgcttgtatctctgctaatactggtcgcatgactgagcagtggtgctctgtcgtgtactgggtatcactctaaagtctgcctgagtggttacagcgatgagctcaggtcacagtttctccaagtcatcaacctggaagttccctgagggttttctcataaatgagggctgcacattgcctgtt

SEQ ID NO: 634202 - DNA, 645 bp, Homo sapiens
  misc_feature (566)..(566): n is a, c, g, or t
gcatgttagtactagaaatcattaccaatgaaactgcaggggccttgaatctgcttgcccagcaagccacaaaaatgagaaatgtcatttatcaaaatagactggccttagactacctcctagcccaggaagagggagtatgcggaaagttcagccttactaactgctgcctggaacttgatgacgaaggaaaggttatcaaagaaataactgctaaaatccaaaagttagctcacatcccagttcagacttggaaaggatagtctccagattcccttttcagaggttggttcttatcccttggaggatttaaaaccttagtacaaatagtcctagccatattgggagtttgccttatactcccttgtctcttacccctcattgtcaaaaatatccaaacagccatagaggctcttgtggacagacggactaccacacgactaatggccctaactaagtattaacccctgccaagaaaagagctacttcctcttgaagaaatgaagatagtgatgctttctcttaaactttactttataaaagcatcaaaggggggaatgaagcangaaatataaagggaaaacaagtaaaggtattatctgcaagccaagcaggggcttcgcaagagtgggcttcaggagcagg

SEQ ID NO: 634203 - DNA, 718 bp, Homo sapiens
gccgagcacaggtggcggagcctggctatgtgcctcggcctggccctgggcgcgctgccgccgaactgatcaccagcctacatcccaggactgaagctacatacatggcatgaccaggaccctgtcggtgcatcagtcaccccatccatgctaaatggtgtgctctcagagcgacctgggtggctgtgggtgtacctctcatcttcatgacgagctccctgcgactgtggtgaagggttctgcctgcgagctctccgctggccctcctagtggccatgtcgatgctgatgccttcctccagacgtgatggaagcctctcgctataccatcattggacagtgcctcctggtattgcatagtggtgtcctggagcctctgtacctgtgttccaaatggtgcccgcgtgtgcgcacctggctttcaagaccctacctcgctatcatcgtggccaaccatgcgatgccgttctgatgtagagatcggatgcaggctacgagggtcacctaggagaccctctgtgcagcggcctccccgacacgcctaggtgaatgaactgatgccagactagccgcacaatctacattcatctgtcgcataactgacgcagaacgttgaaaggtcgctctcctgttgtggtctgacgccctggatctctgacctctacgcgcccatggtggctggacgcgctggcccgcctgggcaccgttgactgtgatca

SEQ ID NO: 634204 - DNA, 1260 bp, Homo sapiens
gggcagccaaggtgtgttggtcgcgaagctggagtgtcctctggtggagcctgcatcttgtctcgtctgcctctgctattacatatggttgtactttcgggcgtggtggcagtaaccctgacaccgtgattgcagcttgtccagccagcagctgcacacagcagcacacagtcagcacaggcatgtgccattgtaatcgttggtaagcatcatccttgcatgtcatcatgtgtaattcaacaattcgaacacagcagcatgggtttgtccacatactgtcccactgcagcacacattatcaaactcagggcacacagggtggaggcaacaagtaccttgcacacatcacagattatattgcaaagcacagttgtgtctcgagcgcctgttgccgtatgtacccaaggcaagccccgcagacagaccatctggacaccttgcaggcctttctactccagtaccatgcacagtaaaccagggatcaatactagttacaatcacgacgtgtggcatacaggaattgttatatatcaatacagaccaagaccacaggggacggttaaaaccacacttggtatgggagtacttgatgcgagaccttgatactagcggtacataccttggagcgattagaacataaggtagccaaggaagagacatgtcgtgcatgatgttcatcaaggtaacgaaaagtactcacaaggcaagcagccgaagggacacagatatcgtgtggacaatagcagccaattcactcgtattggcgactccgttggatggactccgacagtgaaacaaaccgtgccaggcacctagagcacgctacaagtagcgaacccctaccttcatacacgcacaccgccgattcgacaacagacccatacaatttccgttatcagagcctaccacaccaagagcgccaagccatggggaggcaaccagcgcactagggtagagcgaggacaccacaaggaacgccaccaagagcacaccgcaaacgacaagcagcgcacatcggaggaccatgcgaggacaacagggacggacacaggcgtggacaaaacaggagagcaccagagcgacgacactcccccactccacgctggcactaccaagcgtagcagagccacaaaagacaaacacgagcacgccacatggggagccaaaacgacaagaaagagacccaggacagcgagaccgaccaactccaagtacagactaggagcaaaacgaaacaccacaacggaaccaggcagcaat

SEQ ID NO: 634205 - DNA, 509 bp, Homo sapiens
gggattacaggcgtgagccactgcacccggccttttttcctctgtcttaaccaaatgtaatatccgtaggatctgatctaaagcataagttaattaggtgggtttttctgtagaccagacattgtaataaaaccaaaatcagttttgttttggtttaatgggtcctggttggaaaaaaactgaatatttcacatgcctggtttttcaacgtcttttcttggctacattccatctttggcaaaatgttggaaaaccatggaagtgaaataattagccatatggcaaatattggttttgttgaaccaagtcagacctttggtcagtttattctagtttatgcaaacagtgtggccaactaccaaggacgttcatgggctgtgcatgaacatgtccaactgtacacacagagtatttgtctgcttaggtcctacccacgttatctcaggtctctttgactacctatatctaagggtactgtttcaaacacttaaattaaattgtaatttttg

SEQ ID NO: 634206 - DNA, 514 bp, Homo sapiens
  misc_feature (3)..(3): n is a, c, g, or t
  misc_feature (5)..(6): n is a, c, g, or t
  misc_feature (33)..(35): n is a, c, g, or t
  misc_feature (37)..(37): n is a, c, g, or t
  misc_feature (45)..(45): n is a, c, g, or t
  misc_feature (53)..(53): n is a, c, g, or t
  misc_feature (61)..(61): n is a, c, g, or t
  misc_feature (66)..(66): n is a, c, g, or t
  misc_feature (72)..(72): n is a, c, g, or t
  misc_feature (116)..(116): n is a, c, g, or t
  misc_feature (124)..(124): n is a, c, g, or t
  misc_feature (132)..(132): n is a, c, g, or t
  misc_feature (143)..(144): n is a, c, g, or t
  misc_feature (146)..(146): n is a, c, g, or t
  misc_feature (148)..(149): n is a, c, g, or t
  misc_feature (154)..(155): n is a, c, g, or t
  misc_feature (157)..(157): n is a, c, g, or t
  misc_feature (167)..(169): n is a, c, g, or t
  misc_feature (178)..(179): n is a, c, g, or t
  misc_feature (182)..(183): n is a, c, g, or t
  misc_feature (186)..(188): n is a, c, g, or t
  misc_feature (191)..(192): n is a, c, g, or t
  misc_feature (197)..(197): n is a, c, g, or t
  misc_feature (200)..(202): n is a, c, g, or t
  misc_feature (208)..(208): n is a, c, g, or t
  misc_feature (221)..(223): n is a, c, g, or t
  misc_feature (252)..(252): n is a, c, g, or t
  misc_feature (281)..(281): n is a, c, g, or t
  misc_feature (307)..(311): n is a, c, g, or t
  misc_feature (314)..(314): n is a, c, g, or t
  misc_feature (340)..(341): n is a, c, g, or t
  misc_feature (355)..(356): n is a, c, g, or t
  misc_feature (358)..(358): n is a, c, g, or t
  misc_feature (368)..(370): n is a, c, g, or t
  misc_feature (389)..(389): n is a, c, g, or t
  misc_feature (392)..(392): n is a, c, g, or t
  misc_feature (394)..(394): n is a, c, g, or t
  misc_feature (396)..(396): n is a, c, g, or t
  misc_feature (398)..(398): n is a, c, g, or t
  misc_feature (400)..(400): n is a, c, g, or t
  misc_feature (402)..(402): n is a, c, g, or t
  misc_feature (404)..(405): n is a, c, g, or t
  misc_feature (410)..(412): n is a, c, g, or t
  misc_feature (419)..(421): n is a, c, g, or t
  misc_feature (437)..(437): n is a, c, g, or t
  misc_feature (440)..(440): n is a, c, g, or t
  misc_feature (447)..(447): n is a, c, g, or t
  misc_feature (464)..(464): n is a, c, g, or t
tcntnnccccccccccccccccccccccccccnnncncccccccncccccccnggcccccnccccnggcacngggaacccccggcccccccccccccccccccgggggaccaaaancccccaancccccccngggggggggcnnancnnggggnncngggggccccnnngcccccccnnccnnaannnacnnaaaanaannnccttanggcccaaaccaannnccccccccccccccccccccccccccccnccccgccccccccccccccgggggggccngggggagggccgggcccccccccccnnnnngangggggggggctcttctctcggggggnnaggggcttcccccnncncccccccccnnntctctccctctccccccancantntntntntncnncaaannncaacccnnnccccccgcccccccgngancctctcngggggcccccccccccncccccccccgcccccccccccccccccctcttcccccccccaacccaccc

SEQ ID NO: 634207 - DNA, 321 bp, Homo sapiens
gcttaaatctaaccccaaatagcaacaattcaaactcctctctttctgagatcttctattataacaaacctccagggctcattcaaattcctgtataaagtaggattttgtttcatcaaatcttttggaaaacatgggcttgggtgccagtagctcatgtctgttaattcccagcacttttgggtaggccgatggagagcagatcaccttattcaacactgttgaataggagttggtcagagagggcatcctgtcttgttcccgttttcaacgggcatgcttccagtttttgcccattcagtattgatactggctgtggtt

SEQ ID NO: 634208 - DNA, 168 bp, Homo sapiens
  misc_feature (156)..(156): n is a, c, g, or t
atagcctcgtccactgccttatgctttggactgtccacagccttgacaggaactccaccgccgtcttctcaggcatctggattttcgcttgcagcaccaggttcctcaagagagtgtgcgcaaggatctcttggcacttgtgaaagggaccatttntctccatgccgg

SEQ ID NO: 634209 - DNA, 106 bp, Homo sapiens
  misc_feature (24)..(24): n is a, c, g, or t
  misc_feature (29)..(30): n is a, c, g, or t
  misc_feature (40)..(42): n is a, c, g, or t
  misc_feature (44)..(44): n is a, c, g, or t
  misc_feature (47)..(48): n is a, c, g, or t
  misc_feature (50)..(50): n is a, c, g, or t
  misc_feature (52)..(52): n is a, c, g, or t
  misc_feature (54)..(54): n is a, c, g, or t
  misc_feature (56)..(57): n is a, c, g, or t
  misc_feature (60)..(61): n is a, c, g, or t
ccgcttgtgggagaagtggtggtngctcnngcggcccgcnnngncgnngngncncnncannctcgcccggcgctccagtagcaggacccggtctcgggaccagccg

SEQ ID NO: 634210 - DNA, 661 bp, Homo sapiens
agacattgaatgtgttgtatgtaatggaacacaagtggaaagagggaaatcctcatccttcccagtgggaagttagtaagaatataaaacagaaaaattaagaagtagcaatataaacatattactaagataaataaaggcaaatatcaaaagaatcaactaaaagagctaaaagtggtttccttcggagagcaggcaataggagtaaaggtgaggaactggagaactagctgagtgcagaagcgtatgcctgtaatccagcactgaggctgaggcaggaggatctcttgagcctagaagtttgagaccagcatgggcaacatggcagaaacccttctctactaaacacacaaaaattagttgggcatggtggcgtgcacctgtaatcccagctactcgggaggctgagacaggagaatcacttgaacctcggaggtggaagttgcagtgagcctagatcgcgccactgcagtcccgcctgggcaacagagtgggactctgtctcaaaaaaaaagaaaaaaaaataaaattctgtgtatgcaagttgaagtagagactgtgctttttttaccaactagtggtgtgtatatacaataaggcggtggatgaatcttattccaagatagaaggccagaaaatcgacttaaaagctttacaacag

SEQ ID NO: 634211 - DNA, 111 bp, Homo sapiens
  misc_feature (2)..(2): n is a, c, g, or t
anaaatttaaaaattaactgggcatggtggctgaggtggaagaatggaagaatcacttgagcccaggagtttgaggctgcagtgagctatgattgcaccactgtactcctg

SEQ ID NO: 634212 - DNA, 931 bp, Homo sapiens
aacactacagggaggaattcacatgctttagtatgtactacttttgctgatgcttttgaaaatgtttatgccacagaatttgctaatatattgtaatcacattccttaggaggactgtggtaattggttttatgtattgatggtttttttttctctgtggggacaaattgtctgacacgcgggagctacagggagctcgtattctcttgtgttcgtgttgccctcgtgcccatcaagtagagtcggcccctcccaggacaagcacgaggtctcaggtcgcccctgtggggggtagagaggaaggacttccccagacgaggggcttcctctagagtctcactggtggggaggagaggactggctcctgatggaagttaccccggtgctacgtcacccagagcacaggagctgcctatgtacagatgaggaaatctgcctaatgtacataacccagtcgaacagcgccgcacagatacagggtagactgtgctaaagtcacgaagaccactagggtagatgaaaactacgctagtagaccacacctcacggctctgtacactacactactactagcccgcataccgccaagaatagccccaaggtcaccccgggaaacggagctgagcgtaggaagaaggccaatctaccatagagtacgccccacaacggagcagcaatgattccacgtgacaattcgctgagaaacattcccatacgcccacgtgacacgcccgtacggcggttcatactgggcaatatgaggaccgtcaccaaaggcaggcagacaccgatactgacgaatcggagacatggcgctacagacacaaatacgggcatagacagatcataatagcgctgcgagcccaatgaagaaggtcaccctaaggccaaccaggggacaaggcaagagcgagcaagaaaatagatgtga

SEQ ID NO: 634213 - DNA, 418 bp, Homo sapiens
gttacacatacgtgaacattatatcgaacagatctttgcccattactgctagaatagggcacagctctaatgccctgtcagtaataatgcacattggagccctaagaaatgaacagatactcctgcgaggctcgactcatgagtttctatactggtaaaccctgtacgagctgctagctgtacctatataagaatgacctctattttcaaggagaggtagcggaatctagatcggttgtatgagcctcaccacattaacgtacatgagtgtcatacaggcactataataaagatgcactgcactgcgaatatatgaatgcgagacaagacgcctcggcacaccaggagtgagagagccaccatgcagtggagagctgtatgcatctcataccataagtactgtgtgtgctcttctctg

SEQ ID NO: 634214 - DNA, 578 bp, Homo sapiens
  misc_feature (578)..(578): n is a, c, g, or t
aaaaaaaaaagttttaaaattttttttttgggggggcaaaaaaaaaatttctaaaatttttgcaaatcaacaaggggatttttccccctccccttaaaggactggaaccccttttgggaaaccaacttaaaaaaatttgttgcaccctttttaaaaaaaaaaggggggttttaaatcccttgggggaaaaaaaaattttttgggtgtttttgggaatttccccccaaaatggcccccttaatttaacaaaaggcccaaaaagctttggacggaaagggcccccttttcaaaaaaaatgcccaccctccctccggggggattttcccaataaaaaaaaaaggggtaaaagcccctttgtgggtcccttaatattaaaaaaggcgtttttggcacacaccctctagaagagtttctctacttttaaaaaaaacccacaggcggggtttaaaaattaaaagaacccgccgcccctcttgtgttataaaaacctttaaaattctttgcgcccccgggtcaaaaaaaagaaagagtgtattttccccccgcccatatagcgcatatccgggacccaacaaacn

SEQ ID NO: 634215 - DNA, 192 bp, Homo sapiens
  misc_feature (40)..(40): n is a, c, g, or t
  misc_feature (66)..(66): n is a, c, g, or t
  misc_feature (92)..(92): n is a, c, g, or t
  misc_feature (116)..(116): n is a, c, g, or t
catgaattcgggccttctgccggcttctgggtaaccctancgggcgcgaatcgcacctggggctcnaaccagggctgccagggtccatggancccagggcaggggctgatgggaanacacttacatccgtgggggacccaggtcccgcttctttgcggcgcggttttttttttctctgccccaggtttctca

SEQ ID NO: 634216 - DNA, 1037 bp, Homo sapiens
ctaggctccagcggaagagacgacacatcagaccaagggatcccaaccctgggaccaggacccttcagttgcacgcgacatgaagtcctagggcgatgtaatttcaaagccgaattcatcctcaggaaaacccttgaagactacaggctttgcacgaaaactgcaggtggaaacgtacttatctcgtaagaccacgccttcaatgcaggccccaaacagcacaatgcaggagagatagatgaaagacgtcgtcactatggccaggatggtccccgtggggatggacttctgtgcatccttgaggtccccggaccggtttgaacccgccatgataccggtcacggaggggaagtagatgccaaccagcagggtgaaggaggccgcgatgtcggtgagcacgtagggcagtgcgctggcacggctctcctctgccacgggcaccgagggcacacctttcttctccacaaacgcccccgcgtgcgcgtacgtactccacaggttctccaggaagacaccactggccgcgcccgggatgccctggatttcggtgacgttgttctggatgaagtactcgtcacaggcggcgctgggctgggagccgttgcagaagaggccccagagcgcggaggtggctgagttgttgtggatgccgtaggccttgacgcaggcatcgaagctgcgccgtgacagcgtgcggttccccaggaggcagaccgggatgtccggggggtcgaaggcagacttgatgacgccggcatagatggccaggatggacagcacgacgcaggccaggaagaccagcgccagcttgttgacatacttgacgcccacgaagaccaccagggccatgagcacgagcgtgcacgtgccgtacacacgcatgttgtgcagcatggcggccgccttgccacctgcagcctacgcctccaagatggccgcacccggggagatgtacgtcagaaaaatctcgatggtccccgaaatatacatggcccctgccaacgtcgggcccattcgaaacaatttccgggggtccc

SEQ ID NO: 634217 - DNA, 995 bp, Homo sapiens
acccccgtctacaaaaaatacagacattaaccgggcgtggtaccgtgtgcctggggtcccggctgcccccctctacaaaaaatacagatattagccgggcgtggtactgggtgcctggggtcccagctgcttgggagactcagttgggaggaatatttgtgtctaggagttgaggctgcagtgagccgtgatcacaccactgccctccagcctgggtgacagagcaagaccttgcctcaaaaaagagagggagagaaagaaagagaaggagaagcctggagcagcgggctcaccggtcacggaggggaagtagatgccaaccagcagggtgaaggaggccgcgatgtcggtgagcacgtagggcagtgcgctggcacggctctcctctgccacgggcaccgagggcacacctttcttctccacaaacgcccccgcgtgcgcgtacgtactccacaggttctccaggaagacaccactggccgcgcccgggatgccctggatttcggtgacgttgttctggatgaagtactcgtcacaggcggcgctgggctgggagccgttgcagaagaggccccagagcgcggaggtggctgagttgttgtggatgccgtaggccttgacgcaggcatcgaagctgcgccgtgacagcgtgcggttccccaggaggcagaccgggatgtccggggggtcgaaggcagacttgatgacgccggcatagatggccaggatggacagcacgacgcaggccaggaagaccagcgccagcttgttgacatacttgacgcccacgaagaccaccagggccatgagcacgagcgtgcacgtgccgtacacacgcatgttgtgcagcatggcggccgccttgccacctgcagcctacgcctccaagatggccgcacccggggagatgtacgtcagaaaaatctcgatggtccccgaaatatacatggcccctgccaacgtcgggcccattcgaaacaatttccgggggtccc

SEQ ID NO: 634218 - DNA, 999 bp, Homo sapiens
atgagccgtacattaaagtccgcatctgctttgttgctggagccacgttactaatagcaggtaccccaggcaatcattggctctgtgtggtcatgctcgttcgatgtgtatgtggaacgttctactttggtatttgcacaatatcatttcttggtatccaatataacatttggttggtcctgtaggctcggaatggctagggtctctgggttgcttatttaggctggagctgttctcacctgctgcttatcatctttttacacagatgttaggacctcgagcagacaactatccttcattccttgcaggcacaagcctattcagccgcgggtgtattcccatggacaagtcatactcagcccctcgcacagagacggccaaaatgtatgctgtagacacaagggtgtaaaatgcacgtatacagaggtgtgtaagcatatgcatttaatcaatcagtatggttacattgctaacaatcgtaagtcaatcccaggcaacagttatttagacattcatcttgacttagacattcattgctagcgttaatcaaaatgtatgattctcctatactatgtctccctattacttcttatattagccgatcatactctctgctaaccttccacgcctttattggcaacagcacacttacccatatcatttcacagcataagtctggctcacagcaatagtctcgaccacgtatctcgctcacgcgacttactcatatagacgactccgagcactcctcgaccctacgtacatcatcaaaactggtcactggataccttaaagcaggaatacggtcatcatcgaacacaagagctgacacggcaatccttaaaacttttgtgaaggcactatgcacttcaacgctaaccctatcgactttccctaggctgtcgggctaaccgcgatatcgaaccttacataccacgtgggtgcaagtcatctggataagtgttcgaagaacgattattctagtaaactacacgatag

SEQ ID NO: 634219 - DNA, 509 bp, Homo sapiens
  misc_feature (52)..(52): n is a, c, g, or t
  misc_feature (67)..(67): n is a, c, g, or t
  misc_feature (130)..(130): n is a, c, g, or t
  misc_feature (133)..(134): n is a, c, g, or t
  misc_feature (163)..(163): n is a, c, g, or t
  misc_feature (170)..(170): n is a, c, g, or t
  misc_feature (182)..(182): n is a, c, g, or t
  misc_feature (197)..(197): n is a, c, g, or t
  misc_feature (224)..(224): n is a, c, g, or t
  misc_feature (228)..(229): n is a, c, g, or t
  misc_feature (236)..(236): n is a, c, g, or t
  misc_feature (257)..(257): n is a, c, g, or t
  misc_feature (260)..(260): n is a, c, g, or t
  misc_feature (264)..(264): n is a, c, g, or t
  misc_feature (267)..(267): n is a, c, g, or t
  misc_feature (280)..(280): n is a, c, g, or t
  misc_feature (288)..(288): n is a, c, g, or t
  misc_feature (311)..(311): n is a, c, g, or t
  misc_feature (320)..(320): n is a, c, g, or t
  misc_feature (325)..(325): n is a, c, g, or t
  misc_feature (335)..(335): n is a, c, g, or t
  misc_feature (342)..(342): n is a, c, g, or t
  misc_feature (344)..(345): n is a, c, g, or t
  misc_feature (348)..(348): n is a, c, g, or t
  misc_feature (383)..(383): n is a, c, g, or t
  misc_feature (390)..(390): n is a, c, g, or t
  misc_feature (392)..(392): n is a, c, g, or t
  misc_feature (446)..(446): n is a, c, g, or t
  misc_feature (450)..(450): n is a, c, g, or t
  misc_feature (454)..(454): n is a, c, g, or t
  misc_feature (457)..(457): n is a, c, g, or t
  misc_feature (468)..(468): n is a, c, g, or t
  misc_feature (471)..(471): n is a, c, g, or t
  misc_feature (476)..(476): n is a, c, g, or t
  misc_feature (483)..(483): n is a, c, g, or t
ttaatttaaaaaatttgaatcaaatagatcattatttaggtttaaactctgngaatatatatatganattgaatttaattaatatctgagtaatctcaattaccattttctaggaaggatagagtgtaanaannaaacatttcatgtagaaatattaactttnaaaagtnataataccaganttttagagtgaaggngtatttaaaatgtgtctttctttgggngggnntcatttngttctttactaacaataattnggnaatnggnaatttaatatctngggaatangaaaatattatggtatagattancttctaggnggggngagggggggngggagtncnnggnggttaaaaaaacatttaactttttaaagataatangcatatngnatattatttgaacataatagttaagaaaattatctttgggcttttttgaatatngggnattngcnaaataacattngcncttangcatganataaattgtaactagatttaatgggc

SEQ ID NO: 634220 - DNA, 385 bp, Homo sapiens
gatacgactcgagctcggtaccgctactgacgagttgtcatagtcacgatgtggctggagtgtggtgcggcgttgtaggctgtcgtgccccttggagcctgaacggtatggggatggggtcgtagattctccaagaagaactgaggttgtggagcgggcaggtaggactattgttcccgttgcgtcttggctgctgtgggatgctgttgattcctcactacggcctgaggttgtggacgctgtcagtgacacgtgtgttgttgcagttgacgcccgggctgctgtggtacgctggtacggttcttcaacaagggcagactgtggtgctaggacgctgacagatattgtgtgtgttgtgctgctattgaaaccttctaaaactagg

SEQ ID NO: 634221 - DNA, 1014 bp, Homo sapiens
caccgggggcttcatccttccacggaggagaagagggactccagaatggctgaggagaagaagctgaagcttagccaacactgtgctgccctcggcagctccatgaaggtggtggctgaatccatgggcatcgcccagattcaggaggagcacctgccagactgctaacggatgaggcatgccttgcaacgcttcatgcacactggcgaagcggcacaagctcacccaccagtgacacttgacctgcgcctcgaacgccctaacagaactgtcgagccactctactggctctccacgcccaggcacgttcattccttctccgccttccgccttctgcgtgcggggcccggcgagctttaccttcgtactgagcgcacgaaccggacggcttgactcctgagccgcacatcactccaataccgcctctggcccccggcgtgccccctggcacgctctgccctcacaagcctcacttgcgctgacccatcgcagcggctgccacgcccacgctatcccccgagaaacccgccccccagcctcccacaagagcaaaccagacacccgcctcgacaccccaccacgaaacacccccctgaaacgctccagcccaaagccccaggcccacgcgacggcccacggacccggacccccctgcaacccggccacacccggctcacagcgggcccacgcaacagcccgcacgcgccaccgcggacacccacgcacagcaaagcgcggcccagcgcccacttgccatagagcacgcggcggcccccccattagccgcacacgttgcaacacaccccccaggtacacgaatccccccagcaacattggtccgtcgctcggacggccaaccccgagcctcgatacgttaacgccacggcaaccacccaaccccgcacagcgcccctgccgctcgcggccctccctcgcggaacggcccaacccccggggcccggcaaaccccccctgcccaccccgccctacagccaacgggcaccccctggcacc

SEQ ID NO: 634222 - DNA, 184 bp, Homo sapiens
taacatccttgcacaagccttgcagaaaccatgagccaattaaatttcttttatttataaattatccagcctcagatatttctttatagcaatgcaagaatggcctaatacagggactcagagggatgggagggtaggagaagggtggatgataggaggttgcttcgtaggtactctgtatggg

SEQ ID NO: 634223 - DNA, 952 bp, Homo sapiens
  misc_feature (1)..(1): n is a, c, g, or t
ncgccgcctgttggttggccccctcctatagttgagcacccccgcggggtcgcagtatactaccttctacggggtttttttgctttgttcccccgggggggcggtgtccccattctgtcccacaacgggggccactggtttttgtcacatcatgggccctattttttggggggccaaccactcattaagacaaccaccactggttgtgtggccacgcgcacgaaacagcgcgcggttggggatctcgctcgctccgcggtaatctatcccgcggggaattttttgttggtgaccacaacccgcgggtttggctgctatgacacacactctcttcatggaggggcctcctcgccggggctgtaattttttggtggcacgttgctgtctccctcagtaggagacaccttagaaacccagtttgtttgttccaccgccggaccctcctctttggggggcgcccccccgcgcgcacgttttagatagctccgtatgagacgacgacctgctggtaaacagccgcctgccccccctctacttggccgcccgagtgagtatttttcctaatttgtggcgcaacaccacagtttgttgtgcgagaggcgtcgcgtcgtcccaaaactagtggggggcgtgtcttgctcccctattctagttatctcgtactctctactctgctttgccagtgtgtctccccactcctgcttcgccactattctcccatcccccacgccatttattatatttttcgcccagctcgtcaggcgccgtcagccttgtttgtggctctcttgccccccaggcgctcctccttttttaccctgattcggggggaccccccgtagtccccttttccccccttggccaaatacaccccttttttttttctccccccattcttttttttataccccctttttcccttttttaacccaaaaattccaatgggccctta

SEQ ID NO: 634224 - DNA, 127 bp, Homo sapiens
  misc_feature (91)..(91): n is a, c, g, or t
agtatttagaggatccaccatgatcgcagaagcgagtggcgagaaagtccaactattgggatgacaagttacttctcgtggtgggagcccncagccctgtcctgggataccgatgctcgaatttctg

SEQ ID NO: 634225 - DNA, 359 bp, Homo sapiens
tcagacacatagaggatccccattatatctgggacgtgcttatgcgggacggcatatattgatgcgcccacatgagccacccacaatgtggaatggcatgatgatgtcgatactgtaatcatcactcaaagcaaattaaaatacaaagtttatctgcaacggctttgcagtgacatgatgccttcataaattaaggaaactggccacccgtcacagcggctcacttcagggatcttcacgaaatcttcccccttcttgatggaggccttcagctcggggatggcatccgagatcatcttctcctcaaaagaggagactttgccgatgcccaggttcttctcgatgccctttttcccaag

SEQ ID NO: 634226 - DNA, 644 bp, Homo sapiens
  misc_feature (24)..(24): n is a, c, g, or t
  misc_feature (27)..(27): n is a, c, g, or t
  misc_feature (88)..(88): n is a, c, g, or t
  misc_feature (94)..(94): n is a, c, g, or t
  misc_feature (253)..(253): n is a, c, g, or t
  misc_feature (275)..(275): n is a, c, g, or t
  misc_feature (310)..(310): n is a, c, g, or t
  misc_feature (493)..(493): n is a, c, g, or t
  misc_feature (497)..(497): n is a, c, g, or t
  misc_feature (573)..(573): n is a, c, g, or t
  misc_feature (613)..(613): n is a, c, g, or t
gtgaccctggagcccaacaagganctncggccaaggggacacggtgaccatcacgtgctccagctaccggggctaccctgaggctgangtgttntggcaggatgggcaagggtgtgcccctgactggcaaccgtgaccacgtctcagatggccaaccgagcagggcttgtttgatgtgcacaagcgtcctgcgggtggtgctgggtgccgaatggcacctacagctgcctggtgcgcaaccccgtgcttgcancaggatgcgcacggctcttgtnaccatcacagggcaagcctatgacattccccccanaggcccttgtgggtgaccgtggggcttgtctgtctgtctcattgcacttgcttggtggccctggctttccgttgtgcttggaagaaagatcaaacaagagcttgtgaggagggaagaatgcaaggagctgaaggaccaaggatgggggaaggggaagaaaggcttcaagacagcccttgcaancctnttgaaaacaacttttgacaagcaaaagaaagatgatgggacaaaagaaaataagcctggaccattgaaggaccaanggaagcttgctacccctttccttacaagctactacccttntgggcttgcaatgggggcttggacttgtgga

SEQ ID NO: 634227 - DNA, 345 bp, Homo sapiens
ggacctggatggccgagtatgcgcacgtgggctttacagccttttactacatatttaagaatcctgtgtacggtgagatgacatcttggggcttggttaccattcacctccttccctggtgactcttcttcgtgaacaggcaccatccccatcacccgatggccatggcgcacgtgccttgtccttttctccccgtcctgttgactccacaccacacatgctgccagcccgtgctctttaaagtgtcgattctggtggaagccaccctgtgtggcctcaaaagcccttccctagcatgggatgtttacaatcactcacaggtttccctcaagcttctctgagcta

SEQ ID NO: 634228 - DNA, 1000 bp, Homo sapiens
cacggactcctggtctgagcccaataaagactgttaattcctcaaaaaaaaaaaaaaaaaacaaaaaaaaaaaaaaaaaaaaaaacacacaagaaaaaaaaacaaacaaaaaaaaaagttggtgtggcggctgccagccgcgcgcccagaagaagagttcttagaaaccaatggtggggtgggcgcgcggcggccccatgatgatagtcagaacagtcgggctcaatgtgtcgtcccagaaagacactcgcggcgcaagacaacaccgctggtgggagttcccccccacaaaaaaagacgccgcgcgggcggaacaccacacggggtgttttagaaacaaaacaacccgagaaaggagtggtctcatgagcgcacgcactatgggggggctttcttaacaacagagggaggcgtgccaaccagaggagagctgctcttaatattataaatatattacgccccccccccctgtgtaggtggttgataccatagcaacctagtacgaacgtggtacttcagatggatgttcacatacgatatcagacgagaagctagcgaggtgactgaccgtaacggtaaggaatggtgacgagggtagccagaataacgcaacagagaagcggacaaagaggcaggcgcgcgagagagaaagaagcggacgaagaggcagcgaagaggaaagggatcaaaaaaagaagaatagacaaaaacgaacagaagagaaaagaaaaaaaggagcgagcaacggaagcagagaaggagaggcaaggagaaagcctaaagaacgaaggcgcgagacaaaggaagccaagcagacccagccaagcgccaacgcgcggccagaagcggtcgcagagcaaaagccacagaccgacaagctagatcgaccacatgagaagacagaagaagcaaaggaaggtagcacggcgcaggacggtcagagaaaagacaaaagcaacaagaaacaaaaaacaacaagaattaatggcagcgtgttcag

SEQ ID NO: 634229 - DNA, 667 bp, Homo sapiens
gccgggctgagaggagcgtgacagtcgcctctctccggcatggcgtgtgctcgcccacgtgagtatcgagcgtgctccgacaaaagggggagtcatctggcgaaaaatgtcacattgcctgcgtgtattcaaggctcctattcgaccagcatattgtgaacttgttcagccccaacttgcgcaaaaactaacagatagacctatgctgtctagtgaattacgcaggtccattcagcacgtaatgctgcagtcttggggtactgggctcagattgtggttcgaaattcccagaatgttcgaggtgggtgggactcaccgcttctgggcctaggggtgtctttccgtgaaatcatgatgtcgtggaggccgcagtgttatgcaccaaccaaatatctggaaccgttggcatcgtaaagagaaccactaaactgataaacgatacggcacagtctggtttctgtacacgggaatggtctcagacccataaccagagagctggttgatgtataataggtcatcggtgttgaggaaagtttcctgaactttaagttatggatagattgatagatagagagtgaacgggtacagatgaagactggtggaaggtgtggggttccttaagaagagttaaaagtctggtaatgatcttgtccttgtctaatggggt

SEQ ID NO: 634230 - DNA, 363 bp, Homo sapiens
  misc_feature (32)..(32): n is a, c, g, or t
tcggttgcgttggtggtctgatataacgatgnagtctcgccccatagcctaggctggagtacagggtgtagatcggtgccgattgcatcttccgcctccaggattcaagcgagtctccagcctcagcttccacaggagctgggactacaggcatgtgccaccacacttggccaacatggtgaacccgtgcctttatgaaaaatggaaaaattagccaggcatggtggtgggcaccagtcaatcccagccactcgggaggcttagacgggagaatcgcttgaacctgggaggcagaggttgcagtgagctgagatcgtgccattgcgctccagcatcagcaaccagagcaaaactccatctcaa

SEQ ID NO: 634231 - DNA, 300 bp, Homo sapiens
aacagcgaattaaaaagtgccaatctcgtgcacttgtagtcccagccactcgggaggctgaggcaggagaatcgcttgaatccgggaggcagaggttgcagttagccgagatcacaccactgcactccagtctggcaacagagcgagactccatctccagaaaaaaaaaaaaaaaaaaaaacccaatctttcttgaattctctgttaaaaatttggctatttttccttttatcttttcccaattatgctaggttaaaaaaaggacatacgtgttttaacaccgaattttatcctcctgac

SEQ ID NO: 634232 - DNA, 1642 bp, Homo sapiens
gggcgagcggaggtcatagctcctgtggggtccgttgttttggaggtgtggcccagatcgtgtaggcagactatttcgaaggccgactgggatgcgtcgtgtcgaagggcgttggagtacgggaaggcatgcaggccccggggttggtggttccagggactgctcgggtctaatgcgtttatgctcggacgcactgcccgtgtctcgtctaatccgctcgctcccgtcctcccctatcaaatgagtgattcgtcaggtcgcgatgagctgcagccttggcagctgaggtcgaaaccctcttcagacatcgccaacagatcttgcagactgggtgccctgaatggtcatcagggagacactcctgaagcagtggtcccacagcgggccccagcggcgctcatgcccaccctgcctgctccgtccgcaaagcctgtgccagtgcagaccgccctgttgagaagaacgttacagattgtgacatttcgcgcttccgacggagagttgatttactgcatcttggtgttggctttttggagtgcgcggattctatcaaagctatgatgggatcgtagcacaactgagaactgccttggtgagatgtcacgacctgtgacatttgtaggtgccaaagtgacacggattaatgacagtcgttggtaagccccctcagaaacatgttatcaaatgggactattcattttatactgggcacttacttccaagttatagcaactataaaaacgaagggaataaggggtagttctaccgtagggtttcaagggctaaaacagggaattgggggccttcccggaaacttattaccctataagggcgtacacttccccaaatggcgagtgggaaccctacgtgaccaaaaggttattagcgacttatataaattcggaacaggttcatatataacacaaggctccgtatagattaattacagccaaaatataagtaggcaattggggaaggaagaggaaggacaagctaaccatataataccactccgttgtgtgcagcccaccgcagttacacgtaaattatatcgctggaggactatgaccctcatcctgtgcccacagtgtggcgttggaaactttacattattggctctgtgaccagatatggtacccagtggcacactcacatagttgggaacagcttgcactaaacagggttacgcagatattcacaacaccccccagaccagaggatgttaattgaccaacgaacatttttgtcagcggaatgtacgtgtctccccacaatgtgatatacgggaaacaacaggcgctctaaaagcgactcctacaaaagggagggatgtgcaaccactcatcttgggagtatcaagaggaacccatataacacacaggtgtcaacaatgccgacagtcacggacaaggaacgggtgaaagcacaggatcaaacaagagggggctacagaaccaccggacgactgtgctcatgccacacaaacagacagaatacaaaatgacgacgcaaaaaaacaagaacaacggaagaaaagaacacacacagatgatagatgagcggcaaaacaaagaagaggcagtagacacaacgaaaataaggagacggtcataggaagcaacagcagaaaaagaggagacca

SEQ ID NO: 634233 - DNA, 306 bp, Homo sapiens
  misc_feature (6)..(6): n is a, c, g, or t
  misc_feature (26)..(26): n is a, c, g, or t
  misc_feature (56)..(56): n is a, c, g, or t
  misc_feature (90)..(90): n is a, c, g, or t
  misc_feature (112)..(112): n is a, c, g, or t
aaaaangggggggggggtttttttcnccctttgccaggcgggtaaagaatgaatgnccccccccccccccctttgggcggggcccttttnttccctttataaggggtttggnaaaaaactttttttccttgggggggccggaacaagggtaggggtttttatgggaaagggggcccggccccccaggttttttggtcccttttggggccccccgggtaatcccccccccctccccatttacggggaaatggttttccccccccctttttttttcggggaacttggggaattaactggaatttccca

SEQ ID NO: 634234 - DNA, 989 bp, Homo sapiens
gctggtaaccgctactcccggacaccagagcacgccttccgtacacaggggcccgcatccaccctcccggacctaagagcctgggtcccctgtttccggaggtccgattccacggcccccagattctggcatcccagccctcagatgtccaagagccaggcagcccgggtccccgcctcccggatccaggcgtccagggatcatggccaccagaacctagacctcctgcagagctccgacatctgggggcactcaagctcctggagccaagggccccacgtacacaccagagaaactctcgtattcccagctcctagggccaaggaacccgggacgctccgaactcccagcgttacggacatctggcacacgggggcagagcagagaagcctcagacgcccagcctggggaacttcacacactccagcttccacagagccaaggaacttcagtcgctgtgaactcaaccactctaacggagccctcccaaagctccagtctccaggtgcctgtgactcacactcagtcctagggaacgtcgggtcctgggaaggagccacaagccgctccccagaccacgctacccagggagcttaacgaaagccccgggtgctaccacatcaatggtgcgccggatcacttacatcgagaagtccaaagggggcatcgcgcaggggcggaggcccaaccggcacaaacgcgggcggcctaggcaagctgggaccagtcaccacatcggaaggggacaccccaaagaggacgcagcgacaagcaaagcgacggggacttaacagtggcgagaactaccccggggggaacccacgaggtcgcggcagaacggaccgcaatgcggagcacccaacaccatggggatagtcagcctaggagtggaacaggtatgcgagggcaccgagggggggaacagggacgatagaggccacaggaggaaacagggggcagtacgacacagagaggcaccagacaggtga

SEQ ID NO: 634235 - DNA, 1072 bp, Homo sapiens
  misc_feature (772)..(772): n is a, c, g, or t
tcttattgttccaataaaatcttatttaactaaaacaaatggagggccgggttaggtccatgggctggggttggttgacccctagcatgtgtggcctagtgggatttggaagggccgaatgggggctttgctctagcccaatcccttcccattgctttccctctgggggactgagctggcccccggggaggcgctagttctcagagaggcttgtcctgtctgcgcaggggaggcaagtgtgtgtgggacctggatatcagtgggagaatgtctctggtgcacatctcctgggactgtttatgtccacggaacgcccaaatggctcctcaaaagggaacccctatgtgcctctacaaagcccagctcttacaccagattcactcaaacggtccacggtgtgagacttcttcatctccacctgtgaccctcttggggctcatagattctctatacactcgggcctcagggacctgtgtccgggatactcacaggtgccattctggagggatcccccgggccaacaggtgcgggccctcctcggctgcccgtgtttgccccgtgtcacagggaaagggcccaaaggacagaccacgtctcctacattgggtgggcgcgttagcgcgtgttgtgcgtgggctggggcgcgacacccctcacctcgggcccggccagcccagaaccatgcgcagccaaagcccccaccaaacgggacccaccacaccacaatccgctatcggggagacgcacccccaaaacaaaggcactgacccgnacagcgaccacgctgcgggacacccccccgaccccccaggccaccccccacacagcaaaggccccgcaccagggcggataacagaggaacaccaacccacacccagcgcaccaactgcgaacacccccacacagcacaccaaacaaacacccagaggaacacacgcaccctcggccccaccacacacccagcaaacgtaaacacgccaagcacgcagccgggaccatgtccccacccggccatcgtaacccccaaccaacaacacaaaacccgcgcgccaatcccaagctcccggaatga

SEQ ID NO: 634236 - DNA, 242 bp, Homo sapiens
ggatccccgtcacacgccgaaggcccagacacttcttcaggtcaagtcttggttggacgaaggttgttgcaggtcacagtggacgaagttgttgctgcacacgccgaaaatccataccacatgagctaagtctggaggttcggagatcacagtggacgaagttgttgcaacaacttcgtccactcagatctccgagcctccatctctcggactcgcggcgttgtggcctctcggcgtgtgca

SEQ ID NO: 634237 - DNA, 188 bp, Homo sapiens
gcaatatggcggaagtagttaggagtgagattagtccgccgtagtcgtgtactcgtaggttcagtaccattggtggccaaattgatttgctggtaagggagggatcgtatgacctcgtactgttatgtaaaggatgcgtaaggataaggagggcgataaaggactagagatgatagcgggccaggata

SEQ ID NO: 634238 - DNA, 127 bp, Homo sapiens
attaggctgaagctcctattccgcacgagacgccaggatgcggcccggggtccccaccacgagatggggacagttcttcttcaacacttctccatccttcttgatggagcgaccaccgacgcacaca

SEQ ID NO: 634239 - DNA, 1298 bp, Homo sapiens
agatcaagttaggaagctacttgcagttgaacccatgagaagcgatgacgcgcagagtcccacaggaacaggacagtgccttcgggagacccactggacaccatggcgggtactgcactcaatcttatactgagtgacatccagtttagaatccatgactaagaatctcgagcagaaacgggggcctgggcatcattacaggtggttgggtgatatcacccaatctaatgtcacgattagacggatcagtctgttaacagactagctatgggctaaagaacattgtcaccttcctacgacgcacacagtggcggatcgacagaccagcacgacaccatcgcgcaaccccaaaatgggatcgaaccttcctacgcgagaagaccacaatgaagattgaagttaagtgacgccacaggtagtcataggcaccagaaggggcaaacttaaaggcaacaatctcggacagcccgttaggggaaacaaccccatgctaaacagcgggccccacagccagacgaagaggccaaaaagaggagcaacccacgaagaccccaccggcgcagtgaatgaaaggccacccacgcggaccacaggagaggcccaaactcccacgccccacagagcaacaccaacagaccccaaaccaccacgacgaggcaccaacaactccgaacgggaacaaataggaaaacgtacatattccctggattctcaataatgtatgtcaatccgttccatttacaatcaataattccgttacagcatattattcaattacccaacttacctccaattaacatttccacatatcttatccacaataatcacaccactatcttcacataacaatatatatcacctaacataccattcactctataaatcttaaatagtgcccagttcccacactatctcaacctatattattcagtccattagcttcgactccacatcattcccatcaacctaaacacaaccaaaacccaaatccacccattaccagccatctccacacacaccaaatgctaaaaactcctagatgatgcgctccatctccacgtgcagacaataataacacactgtctatacggcctgcgatcagagtgcataaggtagagggacgcgagcgcaaacaacaaccatgcgacctcaaaaccgatggcacaccgcaataaaacggaccggcacaaaggagcaagcagaacaggaatggataagaggagaaaaaggaagaacgcgacaaagcccgccagcgcagccccgccagctgccacacctcaagagcgcagctcacttga

SEQ ID NO: 634240 - DNA, 897 bp, Homo sapiens
ctatcccctaattggatatacgtcagtctttgagttcctggattttccccatgggccccctgagattcaacgctggatcccaagatttggaaattttctgagtgctgaacaatcccttgccgtcccgttgaacgacttgtgcacccttgcaatcgttctccggtggtcaccccccggagtgttttagcccctgaccccttaagtacgcttgtcatatgtagcaaagcaaggaaaaatggggcggccaaaaaaagtgtaataaaccgaaaaaaaacaccacgattcggtcattggttaacaagaaatatatgcccgtgaaggtgtgaaccccacttgggggcagttcaccccctaatggtacgaataaaaagctgtcccccccaaagtagccccggcccagaacttgtcaaacgtggaaacaattgagcccaagtggggggggccccacccctgcaaagaagctctggcctaaagtaggtattctcccgaaagaccgcgccacccacaacatcttctgtcacaggagaaaccctgggatcacaacaatcaacgagatgtcgctatagtttaaacatctcaaaatagggaaaccacattttcccaaaatccgtaaaatccacaaaggtgaatctatgtgttacagaaaaataaaaagtgacattacagggtaatggggaaaccccttcgtggagactgcggggtgctttgcataccttcggtgaatcagaatggcgtaagaataatctccccccgtcgactcctatgaggcagcaacccacatttcaagagtttgcctattggccaaaagggtatctacacccgtgcccaaggcacacaagatgtaggatgtgtgtttaaccgcaataaaaaaaaacaaggctttaaccccccatgaca

SEQ ID NO: 634241 - DNA, 784 bp, Homo sapiens
cagaggtgcctggcaggaattcaaagcagcagctttcggcgagaaggatgctggatgcccagctggacgcctataatgcgagaatggacaccagttaaacagaccagcaaatcctgcgtgcggaacatggacccagtgcgtctcctcttgctccctggtaaggcggggcgtggtggctgtggctgtgcggccaatgatggatttgtttctttgatgttattaaaatatggatttaagaaactcatgtaacaggttcttctctatttatttgcttctaatatattttttatagcttctcgaaacccacacctgtgttggttgaccccgagtgttccttattgtcgggcgattcaacacttgtacacctgggtagtgcgagtgatggttgcgtgagcacaaactgggcgcgcgcgcgtatcgcccgacgcattaatcgcccacatcagtattataactacttaggaacatacggtcgtgtcatagacacatttgtggggaacaattataaccatataggatctaggagacacaaccagggtgggcgcgcgcgccaggagctagatagaaattagatctccccggacagtagcggggacgaccaggcacctgtgcacgacgagagtacgccgaaggttcttgtaattggtgaaaagtacatacaagttatggggcgccaataggtaatagagtgggagtcgcagatagaatatgtagaaggcccaagcgagcgggatgcgaggcgcggggtgtatgaatgcttcacccaagggtcgtaggtttagtg

SEQ ID NO: 634242 - DNA, 172 bp, Homo sapiens
tagtggtccagtgctacctcacaaacagttcacattagggctcactcctgccgtgtattctacgtgttttgacaaatctttaatgagatgtatccactattatggcaccatacagagtggttccattgccctaaaaatcctctgtgctacccctgtttgtggaggtagcact

SEQ ID NO: 634243 - DNA, 116 bp, Homo sapiens
tcagctcaatatacacttatgaggcaacctgaccactctacttaacactgccatctgtccccatacccaccatgctcatttctgagctgtctattttagaaacaacgatctatgct

SEQ ID NO: 634244 - DNA, 335 bp, Homo sapiens
tttgctagagtctcactctcttgcccagactacagtgcaatggcatgatcatggctcactgcagcctccacatcccaggctcatacgatcttcccacctcagcctcccttgtagctgggactacaggtgtgcaccgcacacccagctaatttttgtgttttttgtagggacaggtttcgtcatgttgcccaggctggtctcaaacttttgggctcaggtgatccacctgccccagcctcccaaagtgctgggattacaggcatcagctactgtgccaggcccaattcccaactttgatttctgaacttcaggcccacttctctctcttgtcgacg

SEQ ID NO: 634245 - DNA, 639 bp, Homo sapiens
gggaaagggattctccaggaaactagtcaagaaaataaccagtgatgtaaaaagtctggttctgtatgatcaagtgagatttctcccaggatgcaaggatggttcaacatatgcaaaccaatacatcacatcagcagaatgaaggacaaaaatcatatgatcatcttaatagacaaagaaaaagcatttgataaaattcaacatcccttcgtggtaaaaactctcaaaaaaccaagtacagaaggaacatacctcaatataataaaggccatatgtgagacccacagctgacatcatacctaatggcgaaaagcttaaagcctttcctctaagaactggaatagacaaggacggccattttcaccactcttattcaacatagtattggaagtcctagcaagagcaattaggcaagataaataagtaaaaagcatgcaaaattggaaaagaggaagtcaaatggtccctcatttgcagatgacatgctttttttttagagtctctgttgcccagactggagtgcagtggcgccatctcagctcactgcagccaccactcctgggttcaagcaaatcttgtgcctcggactcctgtagtgctgggactaaaggcatgtgccatgacacccgggtaattttg

SEQ ID NO: 634246 - DNA, 672 bp, Homo sapiens
ggtctatgcaaagaaattagcaaggtagctgggtcgctgcctgtacaatcgccgcatagtgccatcaggtcgtgtcccttaataccggcattggactctttgcgcgtattcattgtcgtcgcctatgtcccgcgttcggggtacttcggtatctcacgttgactcggcactgcctgcactgaagtctctcggggggcgtctagtgttgtacttgttgcggccaggctgttccgacggactgtctcccgcacttagtccgggttgacaagaccctttgcagcgagagtactagggcttgccggctaatagaacttcccggaaggcagggagaacccacaaaaaattgttaccggggaaatacccgggcgaaactttgatccatctcggaatgtcgcttgattcaacccacatggttggtaaacgcggaggaccatttgggacttgaccccgggtacaacctgggggcccctcggacagggcccaactttccacaatttgcgaagcaaatcaagtagaacacggcttggggagggaacgcatatccggtgaggtcccaaggccaacaggttgcgtccggcctgggcgtccggagctagtgctcacacacgcgaactataccccagcgtagacttttccaaaggactcccaactgattcaccccgtcctgtgccc

SEQ ID NO: 634247 - DNA, 429 bp, Homo sapiens
agtaagagtagagagctgttgtggcgacaggtgcgtgccacattacctgtgtaaatagctgtatgtttagtagagacatggtttcactgtgatagccaagatggtctgtatatcctgaccttacacactgttatgtgagatctttgtgtggctatggcatgagagctgtgtgagcacaggagtttaagaccagcctggataacacagtgagaccctgactgtaaatacatacattgtataatccttcaattaaggttaatgtgaacctgtaactgaagaaatagcaacttagttgttgaatgactgaatgacttgcaaagaatagtcgtcgagtttatttagactcttggcagctcactacagtttgagcctagattattatatcacgatttagacacgcagtcatacacacctgtacacacatgcacc

SEQ ID NO: 634248 - DNA, 113 bp, Homo sapiens
agtgatcgagccggtccgcataactatctctaaagatattactcagttctagctgtccagttgtctccaccaccacctctgcctccctaacaagaagaaaaaatgggcaatga

SEQ ID NO: 634249 - DNA, 766 bp, Homo sapiens
gtcttgaactcctgtcaagtgagcctcccacctcagcctcccaaagtgctatgattacaggtgtgagcctccatgcttggatgagatgttgtttttaatgttttggttttttggtttgttgttttgtttttttgagacagggtctcactctgtggcccaggctggagtgcagtggcaccataatggctcactgcagcctcgacctcccaaggctcaggtgatcctcttgcctcagccaccccttccccggccaccaagtagctgggactatgggcttgtgccaccatgcctggctaatttttttatttttagtagagatggggttttaccacgtcggccaggctagtgtccaactcctgacctccaaacagctaatttttgtatttttaatagagacaggttttcgccatgttgcccagcctcgtctcgaactcctgggctcaaatgatccacccacctcggcctcccaaagtgctgggattataggcatgagccaccacacctggcttttcagtttttttatttttattttgttctttgagacggagtctcgctctgtcgcccaggctggagtgcatgtggcgtgatcttggctcactgaaacctccatctcctgggttcaagcagttctcctgcctcagctcctgagtagctggattacggtgctggcacatgctgtttaatttttgtatttagtcgacgacggttttgccactttgcccagcttgtgttgactcctgggcccattgttcacttgcttggtcca

SEQ ID NO: 634250 - DNA, 837 bp, Homo sapiens
  misc_feature (253)..(253): n is a, c, g, or t
catcaggaagaacccgagaccatccctgagaggacccactgctgagtctggtaggttctctccgtcctgcgttttccgggtactttgtctaccaggaggcttgtcgggccacctgacagaaccctgggccgtctgcgatgagtctgtgccagtcttgtggcctgattgctctgagggtcgtgcttccacaggtacgtcacgatgctggtatgctgctggttgctggagcagttcctgggcatcctgacctgantaagtgtccggcccgtgggttggtggcccacgttcctcctgagaagctgctagatggcagccgtccctggttggagggcctcgtctgatttcctggtcgtgccaggatgctgctgtgctcccctgcgggactcatctctctaatgtcttagtgatggtgtgtctgagaggcagcatgtgatccatctgctgcttccaggcgagctcgcgagccccatgcatgcccttgtgagctgggtgagagtcccggtcgaccgttctgcagactgcggtgagtgcccgagcgtagcctggcatcctctgctggtccttaggtggggtgttgggccgatgtctgtggttggcgacgaggtgcagacctggcgagccagggccgtcagggagctccatggtccatgctatcgttcgggactttcctcctgttgtctctcgtgactgttcgaccttgtgtactcagattaagtcttcagagattattgccgattcatccatacttaaccacaaaataggtgaagaaaacatccattccattaaagaaaacgaaatcttccaaagccccggatcatgaacgctctgaaagtcaag

SEQ ID NO: 634251 - DNA, 595 bp, Homo sapiens
  misc_feature (9)..(9): n is a, c, g, or t
attgagtgnccatgtgaggtggtcatgcctgtaatcccagcactttgggaggccaaggtgggcggatcacttgaggtaaagagttgagaccagcctggctagcatgcgaaacccagtctctactaaaaatacaaaaattagccgggtgaaattagccgggcgtggtggtgtgtgcttgtaatcccagctactcgggaggctgaggcaggagaatcgcttgaatccgggaggcagaggttgcagtgagccaagatcaggccactgcactccagcctcggggtcaagagcgaaactctgtctcaaacaaaaagaaagaaaggaaggaaggaaggagggaaggaaggaaggaaagagagaaagaaaaaagaaagaaagaaagaaagaaagaaagaaagaaagaaagaaagaaagaaagggaaagaaatatctttgctatttgtataaaaatggaaattttaacagcttagcctctagagagttactgaacgtggttaccttgggaatgtaaatagaactgcaaattaaaatgactggccacttcaactgggtaagggaaacagctgcaataaagcttcgtgaatataaaaaaaaaaaa

SEQ ID NO: 634252 - DNA, 521 bp, Homo sapiens
ctcttttatctattctgaactctattttttttcttttttaagagacaaggttttgctctgttgcccagcttggactcgaactttcctgggctcgggcgaccctcctgcctcagctactcgggaggctgaggcaggagaatcgcttgaatccgggaggcagaggttgcagtgagccaagatcaggccactgcactccagcctcggggtcaagagcgaaactctgtctcaaacaaaaagaaagaaaggaaggaaggaaggagggaaggaaggaaggaaagagagaaagaaaaaagaaagaaagaaagaaagaaagaaagaaagaaagaaagaaagaaagaaagggaaagaaatatctttgctatttgtataaaaatggaaattttaacagcttagcctctagagagttactgaacgtggttaccttgggaatgtaaatagaactgcaaattaaaatgactggccacttcaactgggtaagggaaacagctgcaataaagcttcgtgaatataaaaaaaaaaaa

SEQ ID NO: 634253 - DNA, 1658 bp, Homo sapiens
  misc_feature (943)..(943): n is a, c, g, or t
  misc_feature (1174)..(1174): n is a, c, g, or t
tcctaaaaggtttctacttctgcttttttttacaggccttgttgggtatttacacagttcaagaatacaggtgtttagaaaacacaaaaggtgtttgaaaaaaaaacttctcaaaattgggtttccagaatctctcgaggaaaagtgattctccacatgtggtagaggccagagtctctctccgcagtgtgtgtgtggctccactccgagaagaggcaagctgtggtgtctcacgagacaccctcctttgtgtgccgaaaagccgtggcgggttctcgagagaggtgtgctctcgagaacacaacacagaggtgtggacttatatagaaaaaagaggtgggacatctcgtgggtggtgtggggtgtgaatactccgagggcggccgtgtcgcgtggggccaccggcccgagagacacacctgtgagagggctctccgagactctccctgtggccgaggagagcgcgcggcggcagcggtgtgtctctccaaagacactgtgagtctcctctcgccttgtggggtgtgtgtctcggcgcgctctcgaaagatatcacactctcccacatatttttctctttgtggggagcaccccgcagagagagggtctccaccctttaaagtatcaccctgtgtgccccttttgggggacatatctccccgagagaagggggggttcagagacaaacaccccgacacctttgtggggccccttgcgcgcgtggggtcctttatcccgcaaaaactctctgtgagatatattctccccaaattctcgcatagagttgaaaacaccctataaagagagttctcaccccagctgtggtctataagggggcgacagctcaaaagttatacccccaagaggggagtgggcctctttgggggccgcaactgtgtttaaacagggtgctttggcggacacagaagggggataatcacangggcgttacacgacaccgttctataaatacacgcgcctcttctgaaggacaccagtgagcaggcctccttgtgtaaaaccaacacgtcggaaggcgttagtgagcagtggacacatctgtggggcaacaccgcgggttcacaacactgtatcacacaaggggagcgccctttgtagaacatcgtgtcacaagaagaacatcccttatgtttgtaaaaacaattccccccgnttttatcacccttcccccaacgataacaggaacatatctataagcaaaccagcaggggctggatcaatttaaaaccaccattaatcgtcttggcggaacaaaaaggacaagggttcgcccctcttaacaacacgaaccaagaagagagagtgcatagacccaatatctaccataaaaccgaacggcaagcccgccccagggggtgccacatggcaacaaacaacggcggggacgtaacacttcaaggggggacactccccccccagagaacaaaagtgtgtccccccgtgtggccacagtggctagtgggtcccggtgggcaactaaaggaggaagccacaccagaaaggaagagtggcagaccaatacgcggggacagatcaatgtagcaacgaagtagtatcacaagatccccgccaggttgtaccacgcgcgtacagaaatatcgtaaaacagtatcatcgtcgtgggagcagcaagccac

SEQ ID NO: 634254 - DNA, 269 bp, Homo sapiens
  misc_feature (49)..(49): n is a, c, g, or t
  misc_feature (180)..(180): n is a, c, g, or t
  misc_feature (255)..(255): n is a, c, g, or t
gacccatgagcaaggagtggggcctccgcttgataccagctggagtctnctctgcccctgctctactggcttgcttcctcctggaaactgtgagcttctgctacgtccagtctacaactatagaccaccatttaaccgcctctttgatcacagtgctaaatagtgtattcaccttctccntacaagaaggctcagcgagatctgggctatgagcacttgtcagctgggaggaagcaagcagaaaacctcagagtngatcgggacactag

SEQ ID NO: 634255 - DNA, 424 bp, Homo sapiens
tagaaaaattcctttttttttttaattaatttaattcattccatttttttgggatggagtccttgcctttgtcaccccaagatcaggccactgcactccagcctcggggtcaagagcgaaactctgtctcaaacaaaaagaaagaaaggaaggaaggaaggagggaaggaaggaaggaaagagagaaagaaaaaagaaagaaagaaagaaagaaagaaagaaagaaagaaagaaagaaagaaagggaaagaaatatctttgctatttgtataaaaatggaaattttaacagcttagcctctagagagttactgaacgtggttaccttgggaatgtaaatagaactgcaaattaaaatgactggccacttcaactgggtaagggaaacagctgcaataaagcttcgtgaatataaaaaaaaaaaa

SEQ ID NO: 634256 - DNA, 348 bp, Homo sapiens
ctgcctgtgactatgattaggagccttgcttcatttcagaatctcccttcaacctgctagggcaggtatcagaaattccaaagggcatttatgtgaggcccctaattagagcctatcaaagtaggaagggagagccatttgaaaggcatcatatttcaaacttttgctattatctgtgttatctttacagtcacgggaacccactagcgctactgaaaaaatacttatacaattttaagtgtctttaaaatttgtgtcccataatgggacatcccctgttgtatatatgccatgtattctattttagaatcctgtattttatgcccataaagtcatagtcaaggccca

SEQ ID NO: 634257 - DNA, 848 bp, Homo sapiens
agcgtgaccttaactagctctgaatcagaagacagagctatatcagaggctctgtgtgccctcatagatagttcttctgggttcaaccactttggccagaatttgatcaattaaaagtctgtcatggggaacctatattttggagcacatggaacaaatatatacttcctcattcatattatgtggatacaaaagacctgtggcagccatttctcccagcagtttacagggatgaacatgggatttcatgccatcccatagaaaacctgttttaaaatttaagggatcttaacttggtcatacatgaaaagtacactgcttagaaattaatagactatcatgatctgtccacagtgcccatggtcactgtcttgtctcatttcttcccttggtccttagtacatccaaataagcctgaaaagcataagagatatacttactgaatatggttggcaataacattagcattgcattatctaacaaagtgactataatttccaggacatggtaacaatgtgttaataacccccagacgaatgaaaatttcaagtcataccagcagattcattgacgggtaaagtttagtcctataaatgttcaggcgtaatataaccacaaggaacacattacgtggaagggggaattaccaattcgcgtagcaaaaaaatctggtagggccttaataactcctatctagggcgttccacatgttatcagttggccactccttgtaacccgaaagtcttttactagaaaatttacaataacgtgcagatgttttagagggttccctatgctgacgcaaggtgtcccgaagggtgggtgtgtggaaaacaatgcatgtcggg

SEQ ID NO: 634258 - DNA, 696 bp, Homo sapiens
gtagggtcttcatgctacctgggtcagcgaaacttatgtatcagaaccatattgaacaaggctacatttacaatactgatataactataaaggtggctcgtgacattaagagcagcaaatatagtaacagttcatttcacagaaagcattgagacctatccaagatgagcgaaggtcatatatagtagtttggatggaagtcaggggttaggaagggagtagggaggcagaatgaaggaaaaggcaagcagcaatgtatgatagtgtgtatcatttagatgaaagttgaaggcacaggagaggtagcgaaaggccaggcttagctcttgggtgtatcttcaaaccatgagattcgcacacacataacaccactgccattacactaagtcaaaggtaaccctagaggctctaagtctcgaggaaacgttgtcgtggatgacaccatgatgcgtgtgggagcacgacattgctgctgcatcattagtcggtagtgctcatggagaggttggggtgctaaggtaaggtggacacgtattttataggctaatgtaagaggcaaggttgaacaatgtgacttgagactgacatggctgggtatatcatgagaatattgcctgtacgcattctaggtctaccttgaagggaagtggagagccgtagaggacgaagactaaaagaggagggtttgtgccctaa

SEQ ID NO: 634259 - DNA, 222 bp, Homo sapiens
tacgagcgcaacaatggaacaccaaatcttatcacacagagacacagtccgtatttaccagcccgctccagcagagcgggacattgtaaggaagcggtggcggctggtgaagcaagtctcacatgtcggcgttcttggccaagtggatacaagagataagagcaaatgtttgcctttttctagcgaacctgtcagagaattcgtcatgtcctttcagagact

SEQ ID NO: 634260 - DNA, 209 bp, Homo sapiens
acatcgtccttcctctcaagctagcccagcagggtgggagcctaaggaagcgtggggtcacagatggagtcaatggtcacgaggtcagcaccactcccaaagctcagccttgccaggctccctttctcctcttccccaggtccttcctttaggtctggttgttgcaccatctgcttggttggctggcgcgtgacagggggtcctctcac

SEQ ID NO: 634261 - DNA, 114 bp, Homo sapiens
  misc_feature (89)..(89): n is a, c, g, or t
agtggccattacggccgggggccgggcgcggtggctcacgcctgtaatcccagctctcagggaggctaagaggcgggaggtattaaacncctccggatgtcgtcccagggagtt

SEQ ID NO: 634262 - DNA, 295 bp, Homo sapiens
ataatagttttatactatattaacaagcaaaaaaaagactttcgggcgactcgggcattatgtcagtttagggcacttatggataaaccactataaacatttgtgtgcaggattttgcatggacataagttttctgttcatttgagtaaataccaagggaattacctgaggattgtattgcaggaggatgtttagctttgtaagaaactgccagattttcttccaaagtggctgtaccattttgcactcccaccagcaacgaatgatattttttgttgatctgctcacctgcatt

SEQ ID NO: 634263 - DNA, 280 bp, Homo sapiens
tgtggcgacggggtctcaccgtgtaagccaggatggtcttgatctcctgaccttgtgatcctgcccgcctcggcctccaaaagtgccgggattacaggcgtgagccaccgcgcctggccggaaatttttttttttttttggggggaaataaattctcattctgccacccaggttggagtgtagtggcgcagtttgggttcaggggaacctccacctcggggataaaagcaatttttctggatacagcctcccgagtagttaaaactacgggtggtgtgcc

SEQ ID NO: 634264 - DNA, 508 bp, Homo sapiens
tacactcatcaaagtcctgtactgaaactccgctcgagtgcgcgtcgtgtggtgcacactcacccccgcccagacgaactctggcatggaaacagtgggctaatgcataccacgtgctaccagaagcaccaacacgtgtggtactccagtccagcaatcacagaccagtatctactccaaacatcctgtagcgaaaactatggcatcttcccaggaacagcaaggcaggcttcttactcacgatgaaccatgcacgaataaacccagcaaaaagagaactgcatactttaaatgtatggatagtcattcatgaggatcgtcaacaattccaatataaggaacaaatcccctggctctccccaacaacatcttttgactctagccaatgttgtccttgtttatagaggcctcggtcatcaaccgcattattatctcctttggtcaaaaacttgatatgcccgttatgcttatcatgaatcttcaagactcggtggtgaatacgcgaatg

SEQ ID NO: 634265 - DNA, 578 bp, Homo sapiens
cgggaaataaagactgagctgctctccaaaagatggctaagttgtctgtatactttatttgaatcccaccaggaattcacttagagatttggacctggtcccttactgcttaagttcaaaaacaattcaaaaacttgtcaggctgtattttgacccagtgtagtccggaagattggatattaatctaactcccaaagttgttgcctctgtggatatgagtacaatttggaaagttatcagagctcagagaaaagaggaagagtgatctaataacaagattgaaaatgtcagctgagcagagtggctcaggcctgtaatcccagcattttgggaggctgaggtgggaggatcacttgagcccaggaattggagacccgcctgagcaacatagtgagacttcctctctacaaaaaataaacaaaattagtggggtgttctggcacgtgcctgtagtcccaactactcgggagactgaggtgagaggataacttgtacccaggaggtcaaggctggagttagccaggatagtgccactgcattccagcctgggaaacatagcgacactctgtctccaaaca

SEQ ID NO: 634266 - DNA, 374 bp, Homo sapiens
tggcatttaatttgttttggctatttacataagtaggttggcaatacaaccttatctccccatatagtcctgccttatacctgctgtccaggcataattataaatactgtcctcttttacttttgtaagttaatgggtttggatttataagtaacactgattagcactgtcggctggtgtggtggcttacacctgtaatctcagaactttgggaggccgaagtgggcagatcaccggaggtcaggagtttgagacccgccttgccaacatggcaaaaacctgtctctactaattagctgggggtagtggcacacgcctataatcccagctactcgggaggtggaggcaggaggatcgcttgaacccaggaggca

SEQ ID NO: 634267 - DNA, 611 bp, Homo sapiens
  misc_feature (424)..(424): n is a, c, g, or t
gacacagtaaggggaacatcacatactggggcctgttgtggggtaggggtaggggtgagggatagcattaggagatatacctaatgtaaatgatgagttaatgggtgcagcatgccaacatggcacatgtatacatacataacaaacctacacgttgtgcacatgtgccctagaacttaaagtataatatatatatatatatatatatatatatatatatatatatatatatatatatatatatatataaagtgctggctcctccttcaccttccaccatgattgtaagcttcctgaggcctcctcagccatgttttctgtccagcctgtagaaacatgagccaaataaacctcttttctttataaattacctagtctcaagtatttttttaaagcagtatgagaacaaactaatatacatagntattactggcatttaacttttaatatcctttatcttaaattgacaaactatttctaacatttagatgccctttgaggtggaccagtgttacattaaggtccacataaatcgaagggcaattggggatatcatatttttgtgcttaacccaaatttttatccaattatttagcattttgttttggttt

SEQ ID NO: 634268 - DNA, 148 bp, Homo sapiens
ctaaaaagatggactggcaggtcatatgtcatcaagacccctgaggctgtgtcacagggcatataaaataaaataaatataaaataaaaagttggctgggtacagtggctttggtctgtaatcccagcactttgggaagccgagataa

SEQ ID NO: 634269 - DNA, 145 bp, Homo sapiens
ggacaaagaatgaagcagccaaaattaaaaccctgggatgtctgtgtaccctctgtccccagggtgtagggaaatggaagaaaaaaggtttacgccaagttggggagggtgaaaagatgcaaaattattaaacccctcggttgga

SEQ ID NO: 634270 - DNA, 199 bp, Homo sapiens
  misc_feature (89)..(89): n is a, c, g, or t
  misc_feature (98)..(98): n is a, c, g, or t
  misc_feature (100)..(100): n is a, c, g, or t
  misc_feature (142)..(142): n is a, c, g, or t
  misc_feature (156)..(156): n is a, c, g, or t
  misc_feature (175)..(175): n is a, c, g, or t
cgaggatccgcataccatggcccccatcttacgagcccttactcctcatgatgaagaaactccaaaccctttgacagctcctcggggtnaaacctggnanaaagctgactgaccaggctccatgaaatctcccatctccatnatgtacctccttgntgccatctctatataaagngaaccagtcctaaaatcaaacact

SEQ ID NO: 634271 - DNA, 413 bp, Homo sapiens
gcacgagaagcgctttactcatcgcggtgttatatccagactaattttacgctcgtggcagaaccagatggctgagagaatattgtggctatgtgagcttggccccacaggatatattattttatttcacagaaagaacacgtgggcgaaaagaggacacgggaccgaggccatccctataaccaaatatttatataccgtgtctgagattatatcacgaggctataaaatatgtgtgagctacctcattcctgtgaaacccttgcgtgtggtataaatatggcgaggaataaacactggcccatatccatatgactctttgagggttctataaggtttgagtaagggtcaataagtgcgtacactttagcacacactctagactggttggtgttctttctgcgttacacggg

SEQ ID NO: 634272 - DNA, 435 bp, Homo sapiens
  misc_feature (347)..(347): n is a, c, g, or t
  misc_feature (357)..(357): n is a, c, g, or t
  misc_feature (378)..(378): n is a, c, g, or t
  misc_feature (392)..(392): n is a, c, g, or t
  misc_feature (416)..(416): n is a, c, g, or t
  misc_feature (423)..(423): n is a, c, g, or t
ctaaatttaaagaatctaagtatccaccctctggcaaaaacagatcatggaaaagaagcaagtaactgctttcctgctgaatttctcttagggccattgactgatttcccctgggtatagacaggttactctaggaacatggggtcatgtatggctgtgcttttttaatcatgccagctctgactcttccattaactttgtaatttgaatatgtcacatggtagttatgatcctccacttcctcaccaataaaatggggagtaataggcgacacttccccacctgtggcaggaagggcaaaaatgttaaagaagggtttaaaaagcactcggacaagcccaagtggnttttgttaantatttttaattactttggttngtttgagggttaantgttcaggggggattgttgggggncccaacnggattccttttt

SEQ ID NO: 634273 - DNA, 130 bp, Homo sapiens
gggcgaattcctcctcctcctgggcgaattcctcctcctcctcaaagtgccgagactacacgacgtgagccactggctgcccggcctgaggctatactcttgagtaaaacgcgcctgtgcttgggctctt

SEQ ID NO: 634274 - DNA, 273 bp, Homo sapiens
gggcattattaggtagtgaagtgttgagcctgtaactgctttcttgattggtggctgcttttaggcctactatgggtgttcaaattattactctctctacaaggttttctcctaatgtccaaagagctgttcctctttggactaacagttaaatttacaaggggatttagagggttctgtgggtcaaatttaaagttgaactaagattctatctaggacaagcagctatcaccaggctcggtaggtttgtcgcctctacctataaatcttccc

SEQ ID NO: 634275 - DNA, 763 bp, Homo sapiens
  misc_feature (1)..(1): n is a, c, g, or t
ncccacaggcgcccgacaccggataggttgttttactgcgggctccgtgtcgtggattccccgggttgttcgcccgctgttgtggtttctcctgttgaggacccgcgatagctggttgcttgcgtgatgcggagttcgtgggtagctatttcgtccgtgcggtgacgacctcctcctgcgggagggcaagtgtgtatcggtcatccggtgtgcgggctgcgtccgcttgtccccggtgcttgtcgctgtatcccagctaggcccgctctctgttagctgcgcggcgtgtaccgtcgcctggcgcgtctcggtgctcatgcccgtgtattgccagcactctctgggaggtccaatggtggctgatctagtttggtgctaagggagttcgatccacccctggccaacattgggtttaccccatcgtcctccgctcagtcttaatttatgtggctgttccatgttggcgtcatggccatgtaatcccagcacttttggggaggcccatgccgccccggatctgcgaagtcaggagtatcgagtctccttcctgggtatacccggtgaaccctgtctctactaatacacgattagtccatggcctggtggcggtgcacttgtattcgagccagtgcaggagggctgaggtcaggagaatggcgctgtggagcgcccagtgtcatgaggggtggcagtgatccgccgccttgtcaccccccccccgctggatgccagggggacatcgttcctttttcacatacataca

SEQ ID NO: 634276 - DNA, 215 bp, Homo sapiens
tgtattacagatgggatgcaccatgctcaggaccaacccctgcccccctttaaaaaaaaagtatgcagagggtccaaaatctgttactaggaattaagaagacacaaactgtgaggcgggcggatcacaaggtcaggggatcgagaccatcctggcctacacggtgaaacccatctctactaaaaacacaaaaaaaaattagctaggggtggtgg

SEQ ID NO: 634277 - DNA, 242 bp, Homo sapiens
tctgaggatcccctgcaggctggaatatcccatggcctgctcttccaccagacgggctcctgcacatttgatgaatatttcaagtcgaagctgtgccccttggtctgacccgagatctaatctctgtgctctgtgtattggcgaccagcagggtgagaataagtgcgttccccacagcgacgagagatactacggctacactggggctttccggtgcctggcttagaagctgttgcgggcgt

SEQ ID NO: 634278 - DNA, 649 bp, Homo sapiens
  misc_feature (204)..(205): n is a, c, g, or t
  misc_feature (212)..(213): n is a, c, g, or t
  misc_feature (241)..(241): n is a, c, g, or t
  misc_feature (448)..(448): n is a, c, g, or t
  misc_feature (494)..(494): n is a, c, g, or t
  misc_feature (559)..(560): n is a, c, g, or t
  misc_feature (576)..(576): n is a, c, g, or t
gccccattgtgtttgccccccgcgcattcggccattatggccggggctcttacctcgcttgagatggtgagagcacgatggttcacccaaaagctgtactgcatccacccgcaaaaatcgggccagggtcctcgatgtctgtagtgtcttaaaaaactcggaacaggtctgatcacgaaaatatgagtctaaatatagagaagnnagtgtannacgataagaacgtagaagggatagaggnttaattctaggaaaccttctgtttatgtttctacgttcttagggctcaatttctttatgtctggcgaacctatctatatttctccttctttctggcctcgacctctcctctccacccaacacctcttctactctacctcctcccttcttcctccccccctttctcttctctcttcttaaactcactcacacaccacaaacacccccncccgtgccgcgtctcctgctctctccccggcactgtttacttaccnatcaactccgtcgctctttcccctccttgaccactaccctcgttaggcgagtgctcttccggtcnntcttgtcggtctccgnctcctgctccccgctttgccctctctaaacctaacccagtcactaatgacgttatctttccttcacccaatca

SEQ ID NO: 634279 - DNA, 325 bp, Homo sapiens
tggttccgctgtcgcatgtactgggtcactctggcgcacattgtattcctggccccgcctcacccagaatggatagctccctccgtgacacagcttttgtctggtcctctgcgccccagtgagagtttcctgcggtacctcagcgcttccacaacgaccacacggcttgccatttgatctgcaaccacaaccggcggttgtttgtcctgtgcccactttatgaccctgtctgtgctaccacccctgtacgactgcctccctcatgtgtacgctcctccgacctgtctcactacacggtgtgtgcaacgacaaccagtgtatctcc

SEQ ID NO: 634280 - DNA, 426 bp, Homo sapiens
  misc_feature (21)..(21): n is a, c, g, or t
ggtgtcatcgatgccaccgantttcttgacaatataaagggccggcaagggtgtctaagtacaatagaaatcggaggcgtttatctctcttactttgaaaatgttcatggtttcattaataaaccccaggaagagcaatttctcaaaatctctaccaattcagtggtcacgggcggttggcagttaaatgtctgcaactccaaccccggttgtgttggaggaaacggtgaagacatctatagctcttatcatggctccggtccctggggatggtcagggaaacacggtgaagtcaacatcgatgaaggctttgcaaacccctgtatccatggcaacggctctgacagagttgcagcctaccacggcggatgtgagcctggatacacgggtgtgaacggtgaagtgggatcgataaacagggtaccg

SEQ ID NO: 634281 - DNA, 325 bp, Homo sapiens
aaaagtaccaaataacacagcagatgattccccttaacggcttgacctatttcaactaatcattaagtttggtcttaagtaatgagatttagcttcagatctatttaatattagtcttattatattattataactaagaagcgtaaaaggattcacaaatagtgatggcctcaacctgaatagagtagatgaaacctatggtcatagggattacaggatagaagcttcctgctgccaaccaggtggtgaaagaccttacttttacactcagggcaccggatcgcacacacctaataattgtcggtggcatcccccagagagccgg

SEQ ID NO: 634282 - DNA, 421 bp, Homo sapiens
  misc_feature (164)..(164): n is a, c, g, or t
  misc_feature (258)..(258): n is a, c, g, or t
  misc_feature (266)..(267): n is a, c, g, or t
ccaagcccgggggtcacttttcccataaggggggtttaccccagagcggggggggaacaaaagaccctctttgttaatttagggcccaggggtgatccaccaaccacagagatgaacctctggggccgggggggtcaccccccacctttcggggtccttttggnggtttttgggggcacccccaaacctcggggggtttccccccaaatttttgggggggcccccccaatttccatgcccccaatttttggggccccnttttcctnnggaggggagggggaaaaacctccccctcccccaaccaattggaaaggtgtttcctcccccaaaaagcccaggggcgggggttttttcctttttcccctgaaaaaggggggttttttttttttgccccccgcttttttaaaagcctccccccgca

SEQ ID NO: 634283 - DNA, 850 bp, Homo sapiens
taatcgcccagatcctgtgtgaagacacgttgctaaccacgaaccaaaaaaaggtttccgcccacaaagctcaaaacctcgctggtggaccactccccccctgtacctgatggtgacaaaacacctgttcgtccccccaccccagtagttcccccccccactaaacgcgtgttgtgttaagagcttccccacataattctgggcaagaaataccacccctcctcaccggttctcaacaagacaggaacccctgtcaaagtgcaagacaactgtatgcctgtgcgacccgcattgtcaaaatcgcgagggtcacccacaccgttgaccaccaatgttattgggttcaacccccaccctttgggtaatgcttattcaagatctaaacccatctttccctcatctttcttaagagacagtaagggacttctattttctcacgtgggacccccctaagaagataaatcctcccctgttaaaaaaccatctttaaaaaagaaaatgatgtaattcagaagtatatatttcacccccagagatactattcaataacatccctctttatcaccccccaggcatacattacaatgttttcgctttgtataacaaccactgtgaaaattagaagcactcgaggtgtcttgtacaccactaaagtacaacgcgtgaacaagagaatagcttctcaataacctagccgattagttctacgcgatacactatgtacacctaagacttgtctcccctttacccctaacaaaagactaaaggcccttctgtttgtttagaaactgtaccccgccaagaaatgcccctttcaaaaaaaattcaacttggaacccccaacaaaaca

SEQ ID NO: 634284 - DNA, 148 bp, Homo sapiens
agtgaaaaacaaagacgagacatatccacagaataataacgcatcgttgtgcgagggcatacaacagacaaaggcctaatctccaaaatatataaacaactcatacaactcaacaacaacaaaaagcaaacaatcgtaataagggtta

SEQ ID NO: 634285 - DNA, 245 bp, Homo sapiens
gcacaagcactgaaattagagatatgtgccatgcatgcctggttgaataggaaatgatctggtgtgagacaggggatctctctaatgttagcccaggctcatcttgaactctgggggctcaaggtgatctatccgtgcctgggtattcccaaatgtgtgaggataacaaggcagcgagcctcaccatgacctggcatgtatggttgtctattccactccatcagatatgcttattgaatgtgtga

SEQ ID NO: 634286 - DNA, 1327 bp, Homo sapiens
cgcacgcgtgggccctagttcttctaacaggcatcatcaacagctgcccaatgatctgcgttgcacttttgcacgtcgagtccaacttttcacccatctgtagcatcctatgtcaactgctgcctcaggtacgcaaggttacatggggacgggacttgcactccattctccaggttgacacgagaccacaccctgtcagtgctgggctcttgagatgttcgatctcttgcacatctgtgtgtgggaaactgaactctacacatatgttcatgggtatcattcctggagggcttcgatgaactatggtagtacttcctcagataccatgctaggtgcgcctcttcagaacccaggtgatcctctccatgctctgccaatagcgtcgccacccctatgtcagacgctcagtactactgattgaccatcttcgaaattccaaatccattctatgcccagaccctttggatgcgagccgaaatccttggggccatccgcgaacacatcgggtacaccgaggtgaacgcaaatgtaatgggttcataacttaggggatgctccaagaccacctaggtggttccaaagactacgcaaaggtaatagacttcgggggcgggaagtcctaaaacgttgtggccataggctagaaacgggtctgagcacccaatagaccaacacccaagcctttgtgggaattggccgggctagacgacattatcgacatgggcgtcaattgccaatgttattttctctacccataggtaaaccgcattccccccgcgttgttaaaattagaggcgcttaattcgcgtggtcattaaccctaaccattgcctaaattccagcggggcttatttgcacttcacggcgaggtacctctcggacaccatttcgcctcctccgacacaaagattttgggccgataaggcacttcgtttccccttgggtaaaaatatgaaccttgtcaaaatccccaaacggcccattctaatagctaattgacccacagaccccaatggcgccatatggatatactaggtgggaagccataccctatctccaactaactgcgcccaccgctttcttggggcacgcacctggggcaatttccaccgacggtagcgcccaaacgaagaaaataagcagcggtaccaataggtgattaaaaagcgtctcgcacttgcgcggacaacgcacacgcaccgtaccgcgacactttctacccatcccacacataaataaccgcaccccattgtattgccatatacagggccctagtacaacacagctttccctctttaaacttttaccaacagacccgagacaatcc

SEQ ID NO: 634287 - DNA, 154 bp, Homo sapiens
  misc_feature (104)..(104): n is a, c, g, or t
  misc_feature (148)..(148): n is a, c, g, or t
tcatctagagaccctgtgctcctcttcatagacattcttctgatccagcacacagcataagtaggttcctgtcactcactctttctttttctctatctccattntggcttaaaggaactaagctggaatacaaagttaccccctcttntgaaag

SEQ ID NO: 634288 - DNA, 914 bp, Homo sapiens
  misc_feature (60)..(60): n is a, c, g, or t
  misc_feature (112)..(112): n is a, c, g, or t
  misc_feature (195)..(195): n is a, c, g, or t
aaagacagtattttgacaaaatacgaagtggagatttacactacattgtacaaggaatgnaagtgtcacgggtaaaaactctaaaaggttaatttctgtcaaatgcagtagnatgatgaaagaaaggttggtattatcaggaaatgttttcttaagcttttcctttctcttacacctgccatgcctccccaaatngggcatttaattcatctttaaactggcttgttctcgttagtcgctaacttagctaagtgcttttcttatagaaccccttctgactgacccaatatgcctccttgtattataaaatctttctgataatgcattagcaaggtcaacaaagtcgatctagtaaacagtgctttccatgttactttcattcagagctaataagtgcttctccttagtctttctaggtaactagcgtgtaacacaatcatgtgtcgcagctttatagctcatacaaatattccagactacatcctttaacactatgaaccttcttaacatcactgtcttcgccagattaccgacactgtcacttgaccaatacatgaccactcttatacctcggcaccacgcaggaacaccacgcctccctgatagtcgcaattagcctatggatgtcccataagggatcctgtcagggtcacgaaaacttgtacatagtcgctgaacgacggtactggtacaactaacttcaactggcgcaaaaattaccaagcgatgacaacccataccaaccacctacaccaagacacttctatactatgaaacggtttgccaacatttctggactgacataaccacatgaactatacaggaaacagtgcactataggcataaatgttcaaggcattttttaacctacgctcataccttgcactgtattaacaaaaacaatacacacacaa

SEQ ID NO: 634289 - DNA, 81 bp, Homo sapiens
  misc_feature (53)..(53): n is a, c, g, or t
aagattggtagttggatctaaaggattgttcatattgaaatgtgacgtttggnggtcagttctatagacctggtgagatct

SEQ ID NO: 634290 - DNA, 871 bp, Homo sapiens
gtataacccaggccatgacccctaacaggagccctctcagccctcctaatgacctccggagctagtccatgtgatttcacttccactccataacgctcctcatactaggtctactaaccaacacactaaccatataccaatgatggcgcgatgtaacacgagaaagcacataccaaggccaccacaacgaccacctagtaccaacaaaagggcttctgatacagggatacaatccttatttattgacctcacgaaggtttttttcttcgcatggatttcttctgatgccttcttaccactccaagtcctacgcccctaagcccacccaaattatggagggcatcattggtccctcaaccatggcatcacccccagttgaaatcccctaagaaagtagccaatgcgctaagaaacgacaagctaccgtgatatagctacgcatgcagcgagtatcaatcacgctagagcttgcaccatagtctaatagaaagacaaccgaaaccaaataatccaagcactagctgattacaatatcactgggtgctctaaatttatagccctcctacaagcctaacaagagtacttgccgagtctcccttacagcagttccgacgggctctacggctcaacattcatgaagccacaggctttccaagggactttcgactgtcatggattggctcaactattccctacactatcttgcttcatccgaccaactagatatattcacttttacataccaaaaattcactataggttcgaaaggcgccgcctaaaatactaggcataggtgtaccactcgattggtagaagatagcctggattgtcctaccatctgaattgaaaagggcttaaacaaaaaactaag

SEQ ID NO: 634291 - DNA, 202 bp, Homo sapiens
  misc_feature (92)..(92): n is a, c, g, or t
ggtacgctgatacaccaatgctctggtagtgtgaatcagttgccaccaagaggtatataggcgcacagcatcacaaaaggtgaagagtgctncagctgtgacgagtgtacgaggggtcgtgccgagtcaggccaaactggaaccaggatttataactattatgatcaaggatatggaaattacactagtgcctatggtggta

SEQ ID NO: 634292 - DNA, 179 bp, Homo sapiens
cattcattttctaccttgcatgccatatgtcctaggcgcacaggggcattttgagaataatcttctactaccccaacggtattgagttgaaaataacgcacgacattttatagtcgcagcaagctctttaacaactgcattagctattgccgtcctattaaatgtggcagcacctcttc

SEQ ID NO: 634293 - DNA, 101 bp, Homo sapiens
gtgctgagcaagcggcaggtccggtaaggggcagcaaagatctggtgacgaaaacttcgttctcgtgcagagagtgagaaacaggggttagtggacagttc

SEQ ID NO: 634294 - DNA, 102 bp, Homo sapiens
ggctggctcctgcctctgggatttagactttatctcaccctttccattttctttgggggctcgggaccgagacctgcttcgacgatttcgtcatactcctcc

SEQ ID NO: 634295 - DNA, 2287 bp, Homo sapiens
ctgataaatatgttaaaaactagctatttccctctaaatactgctttagttacaccccacagatttttttctaattatgttccacagatttttatatagagagctttcactgccactcatttttaaatgtttatatttttcctttaacccacaggtcattttggtagtatgtttcaagattatatacttattttggttttctgctgctgttctttactacctttattactactttactatctttactcctgatttctaattttgctgcattaggagtgcaaagtcatgtgactttgactcttgggaattttaaagtttcctttatgacccagtacatggttagtttttacgactgttcagtaagttcttgaaaatattgtttattctctatgttaggacaaaattctatatacacatctatgaacttgagcttgttaatgttattaaaactttatgttgatgcttctttatttgatcaaattctgacaggagcacatccaaatgaccaactacaattgttgatttatctgtttcacctcattgctgctatatatacatttatttgtttacttatagacagaatcttgcgctgtcacccaggggtatgatcttagctcactgcaacctccacctcctgggttcaagcaattctcctgcctcaggctcccaagtagctgaaaactacaggtgcgtgccaccacgcccagctcatttttgtattttcagtagagacagggcttcaccatgttggccaggctggtctcgaactcctgaactcaggtgatccacccgcctcagcctcccaaagtgctgggactacaggcgtgggccgccgcgcccggcccgctttatgtatttaaatgccatgctgttaggtgcatcgatcggcacggttatattttcttgatctactgtttcttttatcagcatataacattgctctgtgtgccttaaaagataatttaatcaatattaaaataaatcatatttgggaaggcctattttcctgatataacttttatttttaaattttttttctatctctgtatttttaactttgctgttactttttgtctgtttaactcttgttgacagtatctttctgtatctttttagcccaactgagatgtatattttcattttgatctaagtacttatttgtatttattgactttcccatgatttgtacttatctcagccttctttttcatggtgtccacatgctatcacatttctttctctcccctccccattcttctctattctccactgggtaaactgggttttactctgacggtttgaaacttatacattccattttgatttttctagcgtattaagagccatacttatgcttgtattttcttaagcttatcattatcttcttaagtaactgtattttcttaagcttatcattatcttcttaagtaacttaatgtaacttcttaagcttatcagtatctacatcttcccacaaacaagacattaccccatcaccaccgtaagcagtgccatctcaccagctggagctgggggagtggttgtggcaggaagcaagcctcccagatcagaacgcctctggtatgatcatctgtaccgctgctagaacaaatgctctgccccaggtatagagaggatgctgaaaggggaaggagcactccaaagccagtctaccttcacaagcagacttgaatatcataccagtgtcaccctgcagcacccacccccaacccctaccccataactcaacaacccacatacaacagtgagagaaacacattcatctgaaaaagattctaagccctatctcttttcatagcacccagtcctcttttactctgagcagctgtttcagagatttagatagatatatacagatatatcaataggcacagatagagatagagatagagatttagatagatatatacagatatatcaataggcacagatagagatagagatagagatagagatagagatagagatagatatatacagatatatcaataggcacagatagagatagagatagagatttagatagatatatacagatatatcaatagacacagatagagatagagatagagatagagatagagacacagatagagatagagatagagatacagatagagatagagatagagatagagatagagatagagatagagatagagatagagacagagatagagatagagatagagatagagatagagatagagatagagagagagagagacatagacatagagatagatatagatagagatagagacac

SEQ ID NO: 634296 - DNA, 858 bp, Homo sapiens
  misc_feature (6)..(6): n is a, c, g, or t
  misc_feature (32)..(32): n is a, c, g, or t
  misc_feature (103)..(103): n is a, c, g, or t
  misc_feature (289)..(289): n is a, c, g, or t
  misc_feature (353)..(353): n is a, c, g, or t
  misc_feature (386)..(386): n is a, c, g, or t
  misc_feature (529)..(529): n is a, c, g, or t
  misc_feature (532)..(532): n is a, c, g, or t
  misc_feature (540)..(540): n is a, c, g, or t
  misc_feature (549)..(549): n is a, c, g, or t
  misc_feature (551)..(552): n is a, c, g, or t
  misc_feature (554)..(554): n is a, c, g, or t
  misc_feature (560)..(560): n is a, c, g, or t
  misc_feature (563)..(563): n is a, c, g, or t
  misc_feature (567)..(567): n is a, c, g, or t
  misc_feature (572)..(572): n is a, c, g, or t
  misc_feature (578)..(579): n is a, c, g, or t
  misc_feature (582)..(582): n is a, c, g, or t
  misc_feature (585)..(587): n is a, c, g, or t
  misc_feature (595)..(596): n is a, c, g, or t
  misc_feature (601)..(601): n is a, c, g, or t
  misc_feature (610)..(610): n is a, c, g, or t
  misc_feature (612)..(614): n is a, c, g, or t
  misc_feature (623)..(624): n is a, c, g, or t
  misc_feature (674)..(674): n is a, c, g, or t
  misc_feature (778)..(778): n is a, c, g, or t
  misc_feature (838)..(838): n is a, c, g, or t
tcaacnttaaacagacctttagtgactgaggnggggtttaggacttcaaggttgtgatggcccaggcgggaaacagagtggagagctcagtaggccgtctganactgctgctggcggtagccaccgcggcgcatgtagccctcgtttttgcggtagccgtccttctggtctcggaagtagcccccgtaggtgccctgcttgtggtcaaacacccgttcgttgttctccaccaggctgcccagcttctcggccagctgcagagccaggttctgctgggcagtgggctcantgcggtgcatcaccactgtctgtgttggctggtccagggaggccatcagctcctcattaatgancattttgctgatgatggagtgcacagggggcanatccagctcaaacatgtttgacagcgttttcatgctgatggagtcatagacactgctgtaggtgaagagggaggtcctcagtgacttttcctggatcttcctaaccagcatggggcggactttgtcagcctcggggaaaaggnccnacactttnccattcatntnntnattganganaaanctgtnacaggnnttncannnacccattnnatggncttggaggnannnaccacattnnccgctggactcagggggacccagcaggggctgtcgctcgctcacgcgcantggtggtggaactgcttgctgaacatgcgttggcgggcatcgctcttatgggcggccatgtaggggatctccaggagcatgggagaaaccagggagacacactncagcagccccaggttgatgttcaggtggaaggggacctgacggcgccgctccaccttctnctgctcctggttgcgctcct

SEQ ID NO: 634297 - DNA, 133 bp, Homo sapiens
  misc_feature (110)..(110): n is a, c, g, or t
gctacactgggacggtggggttcctgccggctgaattcgggtcttggactggactgagaatctacggtggagaccatccatgtgaaaagaaccccccatgatgtaatacngggctccgcgtgcacgtcgcctt

SEQ ID NO: 634298 - DNA, 494 bp, Homo sapiens
  misc_feature (364)..(364): n is a, c, g, or t
  misc_feature (493)..(494): n is a, c, g, or t
gggcgtggtggtgcgcgcctgtaatcccagctactcgggaggctgaggcaggacaatcgtttgaacccgggaggcggaggttgcagtgaggcaagatcacagcgctgcactccaatctgggtgacagagcgagatttcgtctcaaaaaataataataataatcaatgaaaatgaaaactcgccgggcgtggtggctcatgcctgtaatcccagcactttgggaggccgagacaggcagatcacaaggtccagatatcgagaccatcctggctaacacggtgaaaccccatctctactaaaaatacaaaaaattagccgggcgtggtggtgcgcgcctgtaatcccagctactcgggaggctgangcaggagaatcacttgaacccgggagatggaggttgcagtgagtcaagatcgcaccactgcactccagcctggggcaaaaggagtgaaaactttgtcttcaaataaattaataataattaatattacann

SEQ ID NO: 634299 - DNA, 368 bp, Homo sapiens
  misc_feature (350)..(350): n is a, c, g, or t
gaggcctggacggagctgggtctgggcatggctcaggctcgctggtgggccaccttcgctagctatgtgattggcctggggctgcttctcctggcactgctgtgtgtctggcggctggaggaggggccggggaagctgccatactgctctggacccccagtgtagggctggtgctgtgggcaggtgcattctacctcttccacgtacaggagatcaatgacttatatagggcccaggctgaaaaccagaatgtgctaggaagagagcacaggacagccagaatctgagacacagaacctcagcaagcccaaaacatagaggccgcaggaggaaaaaaaaataaagaaacntaaaaataggaactttaa

SEQ ID NO: 634300 - DNA, 85 bp, Homo sapiens
ccccccccctgctccccccccctttttttttttagagggggcctttttgtgtcccccaggggggaatacagtgccctgttcttta

SEQ ID NO: 634301 - DNA, 949 bp, Homo sapiens
aaattaagtgaggaattgagtggtggtagattgaagccaaaacctattgatgtacaagtcattacacaccacatgcagcgatatgcagtttggtttggaggatcaatgctggcttccacgcctgagttctaccaagtatgccacaccaaaaaggattatgaacgaaattggacctagcatttgtcgtcacaatccagtgtttggagtcatgtcgtacacacttggccttcactacgttattggggttagaggaggtggggacagacgactacagtcttatctgattacctgtattagatctggatgggctggtacatgagcgatttgaaaacctgaccttgaccagtagataacaccaaaacatgattgatacaggacatattcttaatacacagtgtatcaccatgcagatgtagaagagacgcgacagtgattgtgtagaacacttgtagattgcacctcttttgaactctctatgtgtaaccgaaaacagaaggtggggtgacaacgtaacttatctgtgccctgaatactatctgtactattgacatgaaattatccacagcttccgcatggcgatctcatcacgatgtgtagcatagctcgtagtacatcgccttgacattcgcaccaacttcctcaaggttgttgccaggtggccaagacagacttggatccactacttctcacatcacgtatacaataccttatcgcagggaaaaaaagcaagtcacaaacagaagcgcagcaccggcaaaatagcggcgggcggcaaagagaacaccaatgcagacccaaaagcaaaacgggcaaacacaacgccagaaagaaaaaaacgaacagtcaatgaagaaaacggagaataacagacgcagaaggaaagacaccaaaggacagttaaatggacgacggcgacacaaaccaccatacgcacgacccgcacgcccca

SEQ ID NO: 634302 - DNA, 1240 bp, Homo sapiens
ggccagccgcgcacgccatgggagccgatgacatgacgacgaagttatacaggaagctgtctcctcattgatggagatggtgcttggagatgatcggagaattaatcttgctagatgaagagttacattaaatggtgcaactctggagtcccaggaagagggatatagccagtaccaacgtatgctgagcacgctgactcaatagtgaatatacaatgggcaacactttactagtatatgatatgaatctcagaagaaatggaaaatatgaaaaaatttacaaggacctagaatgtagacatagactggagacacatgaaaaaattgctgagtgcaaaaagcaaattcttcaagcaaaacgaatacgacaaaatcgacaagaatatgatgcataggcacagtgatacagcaccatccagacaggcatgagacattcaaggaactagaggctctgggacaagaatagagcatctttcacacattaacgaaagtgtagaagataagctggaattgagacggaaaacagtaacatgtacttcattaataacatccatgaaacttcagacacaccattggcaccatgaatgacaaaatctcagcaggtcagaaagacagcatcaggaaagcgaagcgatggcacacacgaaccaacgaccaacagacacaggacaagatgcccacacaaaacccaggaacatacaggacacacggcatcaaatgaccaacaacggctcaacaatgaggacatgcacaggaaaaaacacaggtacgcgcagaaaaccacaggaaaaagacaagacggaaataaatcatcttacactctacgcacagacatgacatcactatcgaatatgctaatatacaacataatactaatataaatgtaaggaactcacaacacaaagaataaacacaatcacgcaagaaaagaaatcaagttgagcaaacacacactcaaaataacatccatatgtgaccaacaacaatataatacataagcaaagcaactgaatatagatgacaacaacaaccatacattacaatacatacaaacaaacaacaactcacaaaacaacctaacacatataatgtcaagtcaataacctcctatatccataaagtaaaaagaacaaaaaatataacatatcaagcaaaataaagatagacataaacaacactgcaataataaaaaataaataagagaaaaatacaacaataacaaacatataacattacaaat

SEQ ID NO: 634303 - DNA, 271 bp, Homo sapiens
ggccccccccccccccgtttttgggcttttttgggggggaaaaaaaaaaaataaagggttttgaaattgtttttggggggaattttcggggacccccccccccttggggtatgggtttggcccccccgactccggggggttcaggaacccccggggggggtttcgcccggccctttttctccaggggtttggggttcccccccccccccccctggggggggggaaaaaaataaaggcgggtgggggggccccttttttttttttttaggga

SEQ ID NO: 634304 - DNA, 817 bp, Homo sapiens
  misc_feature (101)..(101): n is a, c, g, or t
  misc_feature (156)..(156): n is a, c, g, or t
  misc_feature (258)..(258): n is a, c, g, or t
  misc_feature (266)..(266): n is a, c, g, or t
  misc_feature (272)..(272): n is a, c, g, or t
  misc_feature (296)..(296): n is a, c, g, or t
  misc_feature (332)..(332): n is a, c, g, or t
  misc_feature (337)..(337): n is a, c, g, or t
  misc_feature (378)..(378): n is a, c, g, or t
  misc_feature (383)..(383): n is a, c, g, or t
  misc_feature (399)..(399): n is a, c, g, or t
gcacagatgtagttgactctgcgcgtgtgcgttttccctcctcccccgcctcagggtccacggccaccatggcgtattaggggcagcagtgcctgcggagnattggcctttgcagcggggcagcagaccaggctctgcaggggaacccccagcggnttaagccatggcgcttctcgacggcattcagcagcagcgttgctgtaaccgacaaagacaccttcgaattaagcacattcctcgattccagcaaagcaccgnaatatgancgaaantgagcttcctgagcagcgaggtgntggtgggggacttgatgtccccctttcgacccgtcngggtntgggggctgaagaaagcctaggtctcttagatgattcaccntgganggtggccaagcacttncaaacctcatgggttctccagcgacaaaggctaaggcgggctcctccgaatggctggctgtggatgggtgcgtcagtccctccaacaacagcaaggaggatgccttctccgggacagatggatgtggagaacctggattgaacggagttcgacttggatgccctgtcgggtatagatgacctggaaaccatgccagatgactttctgaccacgttggatgacaccttgtgcatctctttgcccccctaagtcgaggggactattaagcagccccccagaggtgaaccctattgggcatctccagaaagtttaacaagacccgacaggtttgccccttcaccttttaaagctcttcccctttcccggggcgggctccacccagaaactcctttattagaacggccggcagggatcccag

SEQ ID NO: 634305 - DNA, 873 bp, Homo sapiens
ggcttcccgctcccgctgggcgcccctggcacttcctgaggctgggcccagtgtgggggatccgggagggtgcagttcgggatcagcgaaggcatgccccggaatgggcgggcggagcctggtcgagtggtcgcacacatcttagttcggaaccctgtgcctggtgtggcagatgggtgccctaggggacgccgaaggacagccagcatttctccgtagagcgttatcaccgagacccggggtgctccccctcatcagtcttccatccgttaccccaacttggacatacaagaatcaacctagtgacagagctgaatgaacctcgtctccacatgaagatcgaaatctcctctctgtggcactacaagactgtgcgttggtgccaggcgatcttccatggaggagtcattagcagacatagacgcagaaaaccatggctgatggaaacgaaaacgaaatttggagaaagttcaacgcttaccgggagaaagacttgagaacggagcctggagaccagtattgcacatgcatgtccatgatcatcctgacttgacaaggtacctagaatcaccgacactgcacctagcataatccaagtacttgacgacgcacacggatgctattacacccttgaacacctgacaggggtcgattacctacacagcacacattacgcaccacgacagctcagcacaccctggcacacgcacagcaaacaacccaagcacggcgacaaccacacagcccccaccacacagacatgcacctaccaaaaggaccagcaccataaggcaaaactcgaacacaaaaccagcaagcactgacaacccccaacgacaatccccaaatcccgaacatgagaaccctgagaac

SEQ ID NO: 634306 - DNA, 599 bp, Homo sapiens
  misc_feature (349)..(349): n is a, c, g, or t
  misc_feature (362)..(362): n is a, c, g, or t
ttatttgcatattaaaaaaatcgtgcattccaataattaaaatcatttgaacaaaaaaaaaaagggcactctgattaaactgctttacagcctgcaggacacctgtgggccagctgggattttactcttagaattttcacgtggtcgctcccaccccactttctttccagccccaactttcttcctttcaccaaacatgtgcaagttctctttcctttccctgtgcctagccagaatagaatagaccagactgggaaacagggcagagcgcgggcctttccgttggtacagtcagtctctatggactggtgacaacgggggccagcaccaggctcattcttcaaacctntggatctccgaanccttccttttggcatttctttaccaacagggttcaaaccagggcttaaacaagaaggttacacaacttaagaaggggcaagtgcatgtggtggcaactgctaccaggtgcactactgtggcggggcgacagcgccttcattctacagaattgcgccgtgcttgtgcgttcctccgtggtctcaagtcgggtttccttgtggaacggcacggtggaattttacctctttggcgctcct

SEQ ID NO: 634307 - DNA, 243 bp, Homo sapiens
tcggtaccaatgatggtcacggtcctaccggtgtcttatgtcgggcaaacggtctctgctcttacccggagaatccagctgggctagaggctgagcaccttgggaaacaacatttaagggaatgtgagcacaatgcataagtgtcttgaagaagcatgtagtgatgtacacatttggtaacttaccttttttgtggttttgtagcaaccattggtaaaacattccaaataattccacaggcct

SEQ ID NO: 634308 - DNA, 588 bp, Homo sapiens
  misc_feature (291)..(291): n is a, c, g, or t
aaaatataccaagcatatatagcaaggactaagccgctttaccttctgcatctgaattacctagtaatttactttgcaatggagagcccaagactagtgacccccgaaaccagaggagctatcttacaacagcttaatgagcacacccgtctatgtaggcataatattgcgaagatctatgggtggaggcgagaaacctactgagcctgtgttattcctggtctcttccttgtataatattagttcaactttaaatttgcccacagaaccctctaaatccccttgtaaatntaactgttagtccaaagaggaacagctctttggacactaggaaaaaaccttgtagagagagtaaaaaacttaacacccatagtaggcctaaaagcagccaccaattaagaaagcgttcaagctcaacacccaccacctaaaaaatcccaaacatataactgaactcctcacacctaattggaccaatctatcaccctatagaagaactaatgttagtataagtaacatgaaaacattctcctccgcataagcctgcgtcagattaaaacactgaactgacaattaacagcccaatat

SEQ ID NO: 634309 - DNA, 327 bp, Homo sapiens
tgcttggcatagttgattcctgagtaacccattctacactggttcaaaaacgagatctcgtacagtgtctgcatgtctgtgtgtaccttgtgatggtattattatttggcctatataacactggttactcctactccaagatctggaggcgtgatttcattcattgcaatgaatcaatacatcttttgtgtcaaaatgtttgaaacaaaagacatagatggtagacttttattaaaacatatattgatgtggaaagcacatatattaatgcagtcatcccttttcaggtgggaagagagcaaaccagttgattttttaattcatcct

SEQ ID NO: 634310 - DNA, 875 bp, Homo sapiens
  misc_feature (350)..(350): n is a, c, g, or t
  misc_feature (359)..(359): n is a, c, g, or t
  misc_feature (361)..(361): n is a, c, g, or t
  misc_feature (386)..(386): n is a, c, g, or t
  misc_feature (405)..(406): n is a, c, g, or t
  misc_feature (427)..(427): n is a, c, g, or t
  misc_feature (479)..(479): n is a, c, g, or t
  misc_feature (518)..(518): n is a, c, g, or t
accgacagcctgagttgggacagccctggagctggacagacccagccatcatcacaggtattccagcgtcttcaggaaacagtttagactctcttcaagatgacaatccgtccacactggctaaaatcccttcaggccctcacagagatggacggcccagcgctgttccatcacgagatccagccacagcgcccccttcagcacacagatcccgctgcacagagccagtgggaatccctaccctcctccttcaaacccttccagcttccactccccaccccaggtttcagacggcttcagacccccagaaaaaccccacagatttactacagagttcaacactggaccgncattaggcnanagaggagcaaccattagaaaatgcnggattgtcccactctgttnnctccctctcagccaccaccanagtcccttctcatctcttatgttctgaagaatccagtacctgatcaattttntttctccctaaccccagatgcaatgcgatcacagggtcnttaccatctctttattaatggtaaaaattttagtggatccagcattttgagtgacactgtgtgaatgtttctaaagaatgcctttttaaggagagaaaagaaaatcaaagggcagtctcaagtacttagaaaatagtgtgtctgtgcgcagtaatagtgacataagtctgcttagcagaaaaaggacgattaatctataggaaaagctcagtaatgcattatcaactgagaagtttgaaaccagtctttctgggatgcaagctggggaacaagggcgacaccacgtttggcaaatatggggaagcggctaaaaatattttggcgagggaggggggtttcccatgggttgggagatca

SEQ ID NO: 634311 - DNA, 411 bp, Homo sapiens
tccttaaatatcagctataggctatactattataaatattgttattcactcaacactagagcacccagatacataaacaaatattacagctaagagagagagaggcgttaatacattaatagatggaggcttcaacactccacttcagcattggacagatcagatcatccagacaaaattaacgaagaaacatcaaacttaatctgcactgtagaccaaatggatttaatagatatttctagaacatttcatctgatggctgcagaatttacattgttctctttagcacatggatcgccctcaaggttagaccatatgttaggccacaaaataagtcattaaaaattgaaaccttgatactaaaagcagacaaagacacgtcaaagaaagaatactacaggccaatgtctc

SEQ ID NO: 634312 - DNA, 309 bp, Homo sapiens
  misc_feature (14)..(14): n is a, c, g, or t
ccaagcggccgttntctaatcttgtcttcctgaggatagatagactagctcggcgctccttagtgaccttaggccgtatgcagtgagtgatattcatcagcagcatatccactgagcacagtcacgcttcccctgcgcaccggcagggaaagcactggttccgacacccgaataggcttggacctgccatggagggtgcccggcagatgtggtgcgagagagatggctcatgaggcttggacctgccgtgaagtggtgcccagcagcacgtggtattagagggttaagggcctcccggaggattaaggg

SEQ ID NO: 634313 - DNA, 590 bp, Homo sapiens
ctccttctccccccaaaaaaaaagaaggggttctcctccttcgggggggagggggggcgccccccccccccctccgccgggggggggggggtttttttctccccccccacaaaaaaaaaaaaaagaggtgctctcctccccccaaaagaatttcccccccgcggggttttttctctcccccccaccggggggtttttttttcccccccaacccaaaaatattttgtttttgcccccccaaaaaaaatatttttttttttcccgcgccgttctttttttttttcacgggaaggtttaaaaaaacaagttgggccccccctcttttttgtttttttttcgcccccccccaaaaaaggggggggggccccccccgggggggttttttttgtgggggaaaaaaataaaaagcccttttcgagattttcccccccaaaggtgctcaaaaaagaccccaaattttttttttaaataaatttgggggtttttccccaaaaggttttaattttttggaacctttgggcaaaccttcatggggtttttgaacgggccaacctttttttagaatgggttcataagtcttgccaagtctca

SEQ ID NO: 634314 - DNA, 605 bp, Homo sapiens
  misc_feature (121)..(121): n is a, c, g, or t
  misc_feature (128)..(128): n is a, c, g, or t
gatcccacacggttgagtcctgctgccctgacagactacgtgcaccatggcatgtcagttaatcactaaacattgcttttcccatcccatctgtgaaaagattggacaacatcatcttgtnttcctcntttagatgaagatacttggatatggacagaactcgaatgtagtgagagaagagactcacgtagtcgaaatcatggtctagaatttgggctgtagtgcgatagaagagctgaactatggtagtctagtgtatttccctcttgaggcttccataactggcctggttgatttttctaggtcatttgggagcctgaattctcttgataaacatgcttttgataatatggtacaacctcactgtacaggcagtcctttgaacggcagttggcagaggtaaaaatggccatgcaaaaaactacccaaagtgctgggattacaggcgtgagccaccgcgcccggcccacatgaaacgttttacatttatcacttaggtaatattaatggtatagtgaagctctagtctctgactgtagatgcctggaaaatgtctttgagtaatgagaaactcagaaaaaattgatgaaagaatatgttttctg

SEQ ID NO: 634315 - DNA, 343 bp, Homo sapiens
gacatacttttatcctccgaacgtttttgcccggctgggctaatgttttgagcggttactccgacagctaatgcaccgcctggatgggaacgaagaactccgtgatggaagcacacgtataaagctgcaagcacgttacagcattgtacagttgacccgtgacaaactagatgccacatacaggagttttcacgtatgatgcccaaacagagtgaacattaaacacaccgagtccactcctcaagttggatcacttaatgtccctttcagatcctgcgtatatctctctaaataatcgcttttcccattacccccatagacatctagacactgcatcagcctt

SEQ ID NO: 634316 - DNA, 1503 bp, Homo sapiens
aacaaatatgaaattaagaacagctttggacagagggtttactttgcagcggaagactactgattgctgtacccgaaattgctgtgggccatctagaccttttacccttgacggattattgactcactatgggtcacagaacgtcataacctctggagacgaccactaagatgtagcagactgtagtagtccctgctgactatcaggagatagaactccaagctcctcctggtgtaccaactaggtcactgttattcagcacttggcagccatgtctaacaaagtttacaattcaaacatgagacaccgcgaggcatgtacgtacacatacagtggtccactgtgttgtagtgcacgctgcatgtgcacgatgtagactcttgacgattaaatctcttgactgaacagtgtgtggcttggcaaacatatccaagcactggactggaaatcatgacgagacgcatttacagacgctgatacctttggactccacttcccttaagaccctgatggttcaccatgaaagactgctattgattggtgcctggtcgcctcattggactcatgatatggaagcccctggcagcacgacccacactcagcgtgggactcgcatcgggaagccctcaggaaattgacgctgcattgtgcgacatctaacctccgatgataacgcgaagcgtgtcctggtgcaacatggtccaacaccctccgcacggataagtcgggacttctctcgcccgcacgccaatggactacaactgtcaaggcgcttgccccccaacgccatttcttctttgccatattactatatagtgactgaaccctgacgagcagaaagcgcccagccccccaccacaacaacaaacgacacccgcagggaaagatggaagcagaaggaggagaggagaagagaaaagggcggagagaagcagagaacaagtaacgtgagggagagagccaggcacgcgggcccacgatgagccggccagcaggcgagacggcagacaacagtaaccgcgggcagcgacgagtgcacgacgagggaagatcaccgggcgcggctgcgctaggctcccgggccaccgggggaacgaacgcaacgcggccacagaagcacgcgacgcgagagcgccagaaagaccaagaagacgccagagggcggccaccgacacgcgaagacaagcaagagccggcaaaggagagggagagcgacaggcgagggaagccacccgagagagacgagacgcgaccgaaaggaggaagcaaaacgccaggaagaaaaagccgcaagcggaagaaagcgaaggagagagcgaagcggaaggaagagacagagcacaacccacacaggagcaaaccaacacacagcgacgagagaaaggaggaacgaacgaccagagactggaccacaacaaacacgctagacaaacacccgaacacaaacaaacaagcgcagaacgcaacaacgaacgaccaccacaacgaccgaggagcaaacac

SEQ ID NO: 634317 - DNA, 81 bp, Homo sapiens
ctagaagattcagcaaagtacttttgtgctcttggggaactccatctggtatactgggggagcttgacagcacaactcttc

SEQ ID NO: 634318 - DNA, 316 bp, Homo sapiens
catgaaccgaatggaataacacaacccctgacaaaccccagagacgaactaataaaaactgcgcacagaaggagatggagtatacaccttaaatgataagaagcaatggataaataaggctgttggagataaacttcctgaatgtgaagcagtatgtgggaagcccaagaatccgacaaacccagtgtagcgaacactggatgcgcacatggatgccaaagaacgttccacttggtaggctaagacgtcctccaccacaatgtaacaatgggtgtcacattgattcatgaccaatggctgatgcccacagctagag

SEQ ID NO: 634319 - DNA, 621 bp, Homo sapiens
  misc_feature (1)..(1): n is a, c, g, or t
ntgaataccttaggagctaaataattaaactcatggcacattgagaatatacggatgggtcccataggctacggagggtggctggagaagtgaggatggttcatgggcactaaaaaagtcgaaagaatggctgggtgcagtggctcgcgcctgtaatcccagcactttgggaggccgaggcaggcggatcacttgaggtcacgagttccagatcagcccaggcgacatggtgaaaccctgtctctactgaaaatacaaaattaggcgggcgtggtggcacacacctgtagtcccagctactggggaggctgaagcaggagaatcacttaaaccaggaaacagaggttgcagtgagccgagatcatgccaatgcactccagcctgggcgataagagggagactctgtctcaaaaaaataaataataataactaaaagaatatacttgggttgtttataaacacaaaggataaatgcttgaggggatggataccccttttaccctgatgtgcttattatgcattgtatccctgtataaaaacatctcatgtaactcataaatatatacacccattatgtacccacaaaaattaaaaatcaaaatacatttagaatttcttaaa

SEQ ID NO: 634320 - DNA, 1070 bp, Homo sapiens
  misc_feature (580)..(580): n is a, c, g, or t
  misc_feature (752)..(752): n is a, c, g, or t
cattcacttccctaacccctccacgccccaccccttcaaatatcaccgcattgattctcagaagcaaatgtcagacagacgcgagaatgacatgtctccaagcaacaatgtgcgctcctattcctgttccaccaattactagaaaacaatgccatgaggtcgcagtccctgtcattaaccattctacaggctatttttctctctctccccgtatcaatcgctcgagtataatgcctattttctctcaagtcctcgacgatttcaaattctatcttcgcactcctttctgtgttcattgttctcgctctctcatctacctaccatcacttactcaattctactgccatgattcatatcctctccccatccgactaacctcttataacatcccctcccacctcctaccctccttcacttgtactcctcgttctcttccaccattctattccctattacactctattcatattactccttatactgacttcccctattctatcttcttccttcccaatatctaacctcatattacgcaatttacgtctccaacaccttctctaccagcacaccaccgctactnctctatatttctcccacactacatcccctttatcttcttctccctcacttaccttcacatcgttgctaacgatacttactgattccccaaccatccccatcaaccaccatcacacctcctcgcctaccttcctaaacttaatacgacttcctttccctaattcaacctacantctacaaataccattcaatctactcgacctctgaaccaatgatctccgactatctacacctcctctccctatcaaaccttctcccgctcattccattcataaatatacaccttctttctataatacttaacctgttatgtaattctgacccgtcatactatatcccctcaattacaccctttactccactctctctatcactcctcctccactaccgcaccattcaatccaatcatacacgctcatctgttacttaccttatccacatctcttaatactccacacccctaccttatcttctcttcccctctcctctcg

SEQ ID NO: 634321 - DNA, 470 bp, Homo sapiens
taactttacagaaatacattgtaattggactttttgctttttttcatttctctaaaaatgtttctatatggtaccaatcgttcttctactgtttgctttattttcagtgtccatatcatagaagagtccatgttgtaaaagaagtcaaaagcagccttgaataattggaacccttctgccagattgtcttacatcatcttgttctttggcattgcttctaagttttcttcctcatcatcttgcactgatttggaagcactcgtctccatcaacaagtcatctgttaattcctatggtgtggggtttattagctcctgaatttctcttgaaacccttcacaccccacttttttttgccacatccacaatctctttcatgatttccttgattgactcttttgtaaatcctatgatgttttgcacaacatctgcacaggtttctccagccagaatttattgttttgggcttgt

SEQ ID NO: 634322 - DNA, 468 bp, Homo sapiens
ctgtaccccttgcgcactgcctctgaacactctggttgccggagccaactgcggctacgtctctaaatcccttggatcagccaagcgaaacttggagctattgacaaggaactttcctaggatagcgctgataaccaggacaaaagacaatcaagggtacacgcaggcatgcacgggttacctgcccagcgacggcttaagccagcccccgactggcctggccacagtgctctccagtagcacagatgtctgctcctcctcttgaacttgggtgtgaaatcccacccaaaaagcccctattgtacttaggcaataccccttccctgactcccgagggctagggctagagcagacccgggtaagtaacggctgacccatggctcctctagcctcatacccgttgcctcacagagccatgcccgggcactttgccctgtgtcttcatacttctacatgtctgcttgagat

SEQ ID NO: 634323 - DNA, 1881 bp, Homo sapiens
  misc_feature (314)..(314): n is a, c, g, or t
  misc_feature (548)..(548): n is a, c, g, or t
  misc_feature (1813)..(1813): n is a, c, g, or t
  misc_feature (1881)..(1881): n is a, c, g, or t
tgtggtttacaaggtttaaatcaaagctggtatataaaataacttaattccgggatcttctaaagggtttcttccttggtatttggccctttttccttttccatacttgggcgagaagatggggctttaccggtgtcagagggactcttttatgggcgggtcattggctgccagtttatacgccatagggaataaccacctatgtggatgggggtgagaaggcctatacggtgtggcacaagtgtgtggtgccaattatacgcctattatcccggcgtgtgacaccccgggtcaagaggtggtaacaatacacnatatatattcttccctgtggtacacaccctgtgggcaccatacttgtgtgcgcaacaatgtggcgtgtgcacacctttatatatacgtgtgtctcacacgcgtatacacaaccacgcgtcgaaacctctttacatatacacctcgcgcttgcgcgagaatgtgtgggacaacgtgtggatattccgaacacgcgtgtgtgagtaccttctgctgtgggtctctacacgaacctncgtgtgtcgggaacacaagaacgtggcgagcaaaagcacaccactcaaaacttccttctccacatttacggcaaaaaagtggggtcggagccaagacgtgggtgtctccacttttgccacaagagctgcgcacaattatgtggtggggcgacaaaattccgtggggggactactcgccgagaacgcgtgaaacaaacgttaccacacacacgaggggggacacttataaaaaccttccacacttacttgggggaacctcccaagaggggaccccctccgcgggggcacaccaatataccaaaaggccaaccggtgggtactatgtcggcctcttgggcgaccacaacatctacgagggtgaacactgcccccgtcgcccccacaaacgacagtcggcgcgactaaatcaccatacacttcacgacaaccagctgtggggcacacattacaacaactgcatacagcgcacacagatcaacagggggcgccattataaccacccaccagacggatcctcagctgtagcgcccagaaacaaaccatctgtggtggacgcagcggaatggtagaaacgacgagcatcgtcgcgacaacacgcatacagcaggccacacagtcgtgtggtcacaccacagaggcggaaacctattcacaaacgcaacgaagcgctaactatcgcaagacagcaaacaggacaaatcatggtcggcccaaaagagactacacacaatcccacggcgagtgagtccaacagatctgggtgcgcccaccaaacgaacaccacgacgaaaggaatgttgtccgcgcccgttctgactgattcccaccctcatgaggcagtcgccacgaaagcaaaggaaataggtgcaccccacaccgcaggacactgtggtaacaaccctccacgaggtgtgtcaatgaggacagaggcaaccacgtgtggtggaccacacgatacaacgctgtgacaacaagtgtgggcaccccgcaatgaaaaaaggagctttgaagccacagagaagaggattcacctgtggtgaaacacccaacgtggttttgtggctcaggaacaagcaaaacgccaacacaaggcaacccaggggtggatccaccacggggcggacacaggtgcaccacacacgggggttgcacacaaagtagcgacgtgtggcaaaccaaccgagaacgaaggtacgcagccacaacacaacacaacacaggaagcgcgagctagacacaaaggagcggaccggatactaggaganccgagaacacactacgacagacaagaaaccacaattgagtagacagacgacgagagaacaaaagagan

SEQ ID NO: 634324 - DNA, 167 bp, Homo sapiens
gccgaggtcgacgggtaagacttttccgccgcctccgccgaagacgccgccggatggcctacgtggcctcctacctctggctgccctaggggaacttcctccccagcgccaggacataaggaggtcttggacaactggtattcaggggacgagaccgcttacaaggt

SEQ ID NO: 634325 - DNA, 664 bp, Homo sapiens
ggccgggcgcggtggctcacgcctgtaatcccagctctcagggaggctaagaggcgggaggatagcttgagcccaggagttcgagacctgcctgggcaatatagcgagaccccgttctccacaaaaaaaaaaaaaaaaaaaaaaaaaaaactttggtgggcgcggccttgggcccttggaaaaggttttctatagaaccattctcggttggggcgcgcgcgggggccacagtaggtgtacacggtggacactgtggggcctataacgcgggtgcccaaaggggagaacccggggccatatggaactaaggcgcggggggtattctccacaccaatataacaaaaaacgcgcccggggggggcaaaaccggagagggcgttttctggaaaccaaattcccgagagaggggcgagatccacgggagaggggcctataacgcgggatatctctattccaacagcgggagagtccccaaaagggagagaacggctctcagagattatctcaaaatttttaacgcccccgagccccccggggggggggggaacctggggcagacaatcacaaggaggagagtgcacggatagaaacaacacaagacgcagagcgacaacaacacgaggacaactagaataggcagcacagaagaggcacgaacagacag

SEQ ID NO: 634326 - DNA, 998 bp, Homo sapiens
gacatacgccgatagttactggatggacataagcccgaagtgtatatggtctttagaaaattgctgccactttacattctctcaggcgtcatcggactagctgtagatccatgatggacatttgtaactattctgacacacgattaggaagctagcatggttcttgttagactatttgcttgcgcaaagtcgcttggagtatcagcatggttgtgcagagatacgcaggctggtgggaagaaacatttttggattctcgaaatttacaagtttgttatccatcattggttggatgttcgatcggtgactggccagttattgaaaggagatcacgaggcgttaaggaaagatggatgaggagaaaataagaaatgggctttctcaagaagggcatcctcgggaggacattaacggacgatagatccctagttgagaaagaagactttatgtgcaatgaaggtcactcggacaagtgagctagttgttggtccgcctattatcgtactatgagagtcctatctatccatgcttgttaataactaactaagagatacttactgcatatgttttgtgccaggacaactcctgtgatagctaggttctgtagactctgaattgttgcaactagagctccttggccttttggggatgagactgttatcatgtcatacccaggcgatggctgtctacaagatgggggggcccgatatgtgtcgggttactggcctatgagtcgtatgctgtcaccagagtaacttagagtgggggcggcttgtctgacattctggtgcccgggttagttccggtgcccatctgaacctgagaattggacaactttcccagtgaaaaaattccggggcgaatagatcactgataagttaggcgcaacttgaaaggtcttttcgcccaacagcgtgcgacattggtctctcgccacacatccggttagtacaaaggtgttgtgcgattaacaccgggggggggaaatacattaagag

SEQ ID NO: 634327 - DNA, 767 bp, Homo sapiens
  misc_feature (10)..(10): n is a, c, g, or t
  misc_feature (14)..(14): n is a, c, g, or t
  misc_feature (16)..(16): n is a, c, g, or t
  misc_feature (48)..(48): n is a, c, g, or t
  misc_feature (74)..(74): n is a, c, g, or t
  misc_feature (77)..(77): n is a, c, g, or t
  misc_feature (83)..(83): n is a, c, g, or t
  misc_feature (91)..(91): n is a, c, g, or t
  misc_feature (138)..(138): n is a, c, g, or t
  misc_feature (142)..(142): n is a, c, g, or t
  misc_feature (153)..(153): n is a, c, g, or t
  misc_feature (160)..(160): n is a, c, g, or t
  misc_feature (269)..(270): n is a, c, g, or t
  misc_feature (272)..(274): n is a, c, g, or t
agcacgagantgtngngccaattgatggactgagtgagaaatacttcncgcacaatgtgagcagacaccatccnatnttctangagcccanataggacccaaaaaagcaaagaaaaggcactctcctggaatggggantctnctcttctccgngccccancatcagaactctaggctctctgacatttggactccaggctttataccagcaactccctagtttcccaccaaaacccaggttcctggcccttagcctcagactaagaatnntnnntcagcttcccagggaacttggacggagatacgttgcgggggccccccggtctccagcttccagatggcctgaaatagaaattttcaacctccataatcacatgagccaatttcccagtgaattctctctcatatatgtatatgtatccgattgtgtctgtctctctggagatccttgatttcaccacatcatccatgtgactccactggaagaagataccttaaagcttgcacttggtttctccaggatcctgctctttgtcgttttccctttggttaccttaatccgtacgttttactatcacgacctctgctcgtgaccgaacattaacatcggcgtagcttggcttcgggcgagagctctggactcgatccctctaaggacggtaacgcatgaccttgagcccggactcgagtgtgccggccgccccggtgcggcgcgggtcctcccttaatcctatgccgagttagggggcggccaggtaaaggtaaca

SEQ ID NO: 634328 - DNA, 424 bp, Homo sapiens
gtgctcgctcaggaggggtagaaatggctaggagagagtgagtaagatagatagtgtggtggagatagctggggagaggtagagggtggcataagaatgggaatgagaataagattgagtataaaagtaaagaatagaacttcatcagggtgaaagtattggagggtgccctgccagcaaagatcatctatccactctaagagggagttaagagtggcggtttggggatagcaccaggagatatcagctgcgatggcttggagaaacagtgtaaactggcagtataaacaagagtagggtatttatgagtagttgagaacggtgaataggagtgtgactagacagaagacagaagggatgaccagtttttggggcgcagtccaagtagtgggggtgactgcataaagccatggagtaaatggca

SEQ ID NO: 634329 - DNA, 293 bp, Homo sapiens
tcctccctttatctgtctgttgtttccctgtgctggagccacactgcctattgcactgatgttattaataaccctgcaccattcgtatgtcaattcttcctgctcttcttatccatcaaaaatcactttatctccacttgcttctttactcttccatataaatagatcatacaaccatcatgttcacaaaaaaagcctgatattatttacattggacttacatggaatttgtagaatttgaaaaaacagatattcttatgagtcttcctattcatacaagtagtatgactcca

SEQ ID NO: 634330 - DNA, 754 bp, Homo sapiens
taaaggctggttaatttaaagggctgatctatgtaatcccagaggccagtttgtccagacaaagggggaggttataattcctgggtctcttacctcctgggataaagtcttcgatggatctcctaccttactgggcctggaggcgctcttcagggcggctatgcgtagctatcctagggtcttaaaacctgggggcctcagccgggtcacgccaggagcttcttgcggggcctatgtactggccttacacctgtgggggatgtgtcccagtgagaaatccgctgtgtacttggaacacattccccttacaccttcaggttaccaggctgtgaataacactgttggcgaatcgatcttctattcagaatctcagcggaatactatctgaagcagcgcggcgcaaaatcctacattctcctcatccatgttgcaccttctcgatggcattcgggccatgggctgtacccttcacgtttacctatgcccatgtgcctgccctatccggggggccaagggtgttttcccgggaatcgagcccgggaaatggaccgtcacagagcttgcgaaatgatccagcccatcttgtgatgagcttccggatcttgctggacgggcagtgggcactgggcgatctgaacctgggtgccccatggccgacagcctggcgaagctgacagaggtgtgcctggcggtgctccgggaagcgcgctatcccaagaggctccggccacagaaggaggccaaggcgatgggg

SEQ ID NO: 634331 - DNA, 630 bp, Homo sapiens
atttggggcggggatttgtccccaccagacgggcccccctatgtaaagcgcctggttatctaaatacgggctgtccagaaggccattatcgcgtgcgtaagaacagggtcagatgagggcatctccccccgggggtaatagctgacgtatagcccccccggcagttaatatctggcggcgctggacttctgcgaggagaacacactcccctccttctcggttccaggaaaatgcgttacacagagttctgtggcgatctccggcagatgttcactggggtccgccacggtcttcttctctacaaaaagagacaattgttcgttaggcagatgtattcaagaacagagaaggtgcaaggcaccgacttttgcgccaggggattcctctgccaataaaggccagttaggggcgtccaaatcgggcgacgagtcattgcaacgaggagggcgctcggcgccagcaagcctcacaccccggactgtggagcaccgacaatgttgcagagcagcctcattgcacggtaagtccgcgcgtcggccaggtctgacggcagatatcaaagccgatccctcccctttgtgagataaattaaatcttctttctaaaaaccagaaaaccccccacataaca

SEQ ID NO: 634332 - DNA, 428 bp, Homo sapiens
agatcgagaccatcctggctaacacggtgaaacccagtgtctactaaaaatacaaaaaattagctgggcgtggtggcgggcgcctgtagtcccagctacttgggaggctgaggcgtgaacccgggaggcggagcttgcagtgagccgagatggcgccgctgcactccagcctgggtgacagagcgaaactctatctccaaaaaaaaaaaaaaaaactttatgggaacagtcgcatatgtataatagcagatagaagactgatgttagagagtatttctatgctttcatctgaaaatgaagggcagggctgggcgtgaaggtgcaggcctgtaagcccagtactttgggagccaaggcaggcagatcacttgagtccaggagttccagagcaagcagcctgggtgacatggcgaaaccccgtgtctaca

SEQ ID NO: 634333 - DNA, 293 bp, Homo sapiens
tccctcttgtggatgtgtgaagcatagggcgtggcagccaccagaggcgggccagcagccgcggcggcctgcatcatcggcgtgggctgaggctggctggtgttggtcctgagctgctgcggaggacagggagcctatttgctcccctggtacttagccctgcttgcccagtgcacttgaatttggataacaggatactggatacatcttgaggtgcctagcacaggctaggtcccaatgtaggaatctagacggtatgtacggacgattgtactaggtggagctgtataagc

SEQ ID NO: 634334 - DNA, 260 bp, Homo sapiens
acgatgtcggtgatggggatgcctccaattttctttaacattatgcgtagatactagacaattttttatttttatttatttatttattttgagatggagtctcgctctttcacccaggccatagtgcagtggcacgatcttggctcattgcaacctccgtctccctggttcaagtgattctcctgcctcagcttcccgagtagcaggactacaggtgtgcaccaccatgcccaactaaattttagtgtttttggtttttt

SEQ ID NO: 634335 - DNA, 885 bp, Homo sapiens
  misc_feature (1)..(1): n is a, c, g, or t
ntcgttctgctcgccttgtagtgtttggccctgccgcgaagacgagcgatggcggggggtcgtatcccgatgttgatcgtgttcgcccacaatgagtgagtcggttgttgtggcatgatgataggcgatgaacagacgcttttgtggtggggttggattgttctcgtgtccccccgagtgattttttgttggtgcccctgtgctattctggtctctctcgccgaacaggattcgtgtttggtgtgtttgcttcggattccgaccccccccccgcccccgctctgtgtttgttttgtgtcggctccgccccgcgtggatggtgtgtgttagcgtgccgagttccaagggctcccgcctgctttttggttgtcgttctgcccaccgtgtttttgctggtgggcccccctcagatgagcgacgcccctcctccatgttgttggtgaaccgtcgtggggttgaacgcccctcccacacttattgtgtgcggcggcgacccgcccctcgcttgttccgtcgctcgagtccgccctcttcctgtcgcgtgagatgctcctgtcctctctccttttgatatatggtccgcctctcccagttctttctgtttgatagtttggttgtgctcccgcgccgcgttgtgtctcttagtttggtattttctttgtttgcgaccaccactcttgttgtccgcccctcgtggtgggtcatccctcactggtggggggcttcccaccgctcgttcgtctcgcgcaggacggatgacttattttttcttttttttcaccgacctccgtggggggtcgtctccctcctctttccctttttcccccccccccccgccgctcccttttttttttctttttctccctccccaattttccccccaca

SEQ ID NO: 634336 - DNA, 885 bp, Homo sapiens
gggtcaagccattctgcttcagccccaagtaggtgggactccaggcatgcaccaccatgcctggctaatttttgcatttttagtagagacagggtttcaccatattggccaggctgggactcgaactcctgaccttgtgatctgcccgcctcagcctcccaaagtactgggattataggcatgagccaccacgcccagcctgttatttttttattattattgtttttttttagtgacagagtctcattctgttgcccatgctggagtgcagtggcgtgatcgtagctcactgcagccttgaattcctaggctccagtgatcctctcacctcagcttccctaatagctaggattacaggtgtgtttgggcctcccacccaccccaccttcacacctggctgatttttcaaaaagtttttttgtagaaacagggtctcaccatgttgtccagcctggtctcaaactcctgtcctcaagtgatcctcccacctcagctttcaaagtgctggaattacaggtgtgagccactctgctggctaccactaacttgaatacattcagaatcactcctctccccataatgtagaaatagttttgaggaagcaaagcaaagcagaactttaaagtatgttcttgtcttgttactgtgtattaagcaaatatagaggtgctaaatgttcatgtaccttctcggccatcaagatgggtttcaagtgcatttgtctgacattcttgcagttacaaagggcgacacctgaagggttgggacaaagatatttgtcacaggcgcatgtgtaaacgcccacgttggtgttatggaagaacattttgggggcgcgccacagaatgtgaaaggttgtgattgtaaataagagagaagtgttac

SEQ ID NO: 634337 - DNA, 81 bp, Homo sapiens
gctgaggacactgccgtctattactgtgcgaggtccctcccgggctattactactatggtatggacgtctggggccaaggg

SEQ ID NO: 634338 - DNA, 117 bp, Homo sapiens
ggctgaattgttaagtcatttgctccagggtcagggcccttgttcaaggtcacagagcaggtcagcctctgaaggaacattactgccccacgaaccagccacgcaccaaacgcttct

SEQ ID NO: 634339 - DNA, 846 bp, Homo sapiens
ggccaaggtgggaggattacttgaggccagcagtttgagaccagcctgggcaacaaagtgagaccctgtctctacaaaaaattaaaaaattagctgtgtttggtggtgtgcacctgtagtcctaactacttgggaagccgatatgggaggattgcttgagcccaggaagtcgaggctccaatgaagccatgattgtgccactgtaccctggcctggggacggagtgagatcctgtctccaaaaaaagaaaagatgtcaatattaactccataaaaagcaaaatgtaattaaaaatatgtagtaagaatacagcaaatggttcagctgtgaataatatttacatattcataccagtgcaaatgttgaatactgatttttaaataaatgattatatagtgatagcagggggatgggaaagagagagagaaagaagactattcttgttttcattagtgtggagctcatagaaattatctaaaactgaaaaaaatcaaggaattatagtataaacttttgatagaaatagaaacatggaactcaatagaaaagaagcatctaaacggttgaatacgattgccacttaggtgtgggaatcagaagtgggcaggaaacagctatttttaattacaatcctctagaagaatttgtttttttaaacaatgtgcatatatgtacatagtgtgcaaatctattaatgtaattaatcttatcaacattttacaagagctgctaaaagcatcatctagtaaaatcaattaaaccacttagtgttaaaacatttaacaaagacgaaatgacacggaatttctgcaggatgtctaacccaaaacctgttgcactattaga

SEQ ID NO: 634340 - DNA, 125 bp, Homo sapiens
  misc_feature (100)..(100): n is a, c, g, or t
  misc_feature (117)..(117): n is a, c, g, or t
gagcggtctaacaaaacactcatcattccacaaactcttattacttcaaaaaagtgtgtttaggcagatcctatcaggatgcaccatagagaacactctngagaaaggggctcactnctaacatg

SEQ ID NO: 634341 - DNA, 461 bp, Homo sapiens
gcctcctgcggaattggacactcggctctcacaggcctcaagcaccaccccaacacatctgtaccatgtgcctctcccaagcaatgcgctcaccccgggtggtgctctgcatagcacatcgccgacagatccccagccttccagcctggcctggacaccctggagtctgcctgcctcttctctcgatcacaccacacactcaaccccctcactactgcacagccatctctactctctaccctagtctccttttccagctccgagcccagcagccagagtgatcgtctcacagccccggcacaagcatctcccttcagcacctttcagaagccctcatctcacttccaaccatagattcagcttccaagggcccctcccacctctaccccagcaggccaccctgcttatcactctctgtgtggggaacaggctgctgcctctgtctgaacaatctcctccag

SEQ ID NO: 634342 - DNA, 931 bp, Homo sapiens
gctcacgcctgtaatcccagcctcccgagtagctgggatagcaggcgccgacacacgcccggctaatttttttttttcttttagttttgtttgagactcagtctcgctctgttgcccaggctgaagtgcagtggggcgctctcggctcactgcaacctctgcctcccaggttcaagcgattttcctgcctcagcctcccgagtagctgggattacaggagcgtgccaccactccgggctacacttttggtgtttcaagtagagatggggtctcaccatgtggcttcaggcagatttcgaatcccttgacctcaagtgatccacccgcctcgcgccttcatttacttatttccttcaatacacacggggtcatgttgccagccaatgttgcccaggctggtcgtgaactcctgggctcaaggtgatcctcccgccttgccctgtggccttccaagtgctaggattacaggcgtgagccaccaaccagccctgccctgaggcaccccttcccaacactccggatgtccctgacaacacttcatcacaccgccctcagcagtgtcctgcccatcctcacatcataggatctccgtgccttcggccacgagctcctgaggcttcaacagccccctgggccacgagtaacactccaaggagccctgtacaccaacgaaatcggccggccgcagccctaatgcaccactcgggacagcgactaccctgcccacaacaaccaccagcccccactgccctcacgacccgagcaccgactagcacgcaccggagacgcacgacacacgaaacacacgccacccccccgacacgcgtaaccccacccggacccacacccgcgccgcacgcagaaccaccacccaacactccacggacagggcacaaccagagccagccgcgccgaccacacccaacgccac

SEQ ID NO: 634343 - DNA, 137 bp, Homo sapiens
  misc_feature (6)..(6): n is a, c, g, or t
ctacangtatgcctgaaaaatataatttccccagatgcccatcagaagcggtcatcagaacggaatacagacaagagtaaaagaaatgaggtggaaagagagcatcaagagagagagccagatgagactgaagacat

SEQ ID NO: 634344 - DNA, 189 bp, Homo sapiens
atggctccttccaagcatctcatcactccttcaaactctctctccttccaacatctcattgctccctctcctcttccctctcctcctcccccctgagggaggagatgtggagcgatgagatgttggaaggagagatgagatgttgaaggagtgatgagatgtgggaaggagcaatgagatgtgggaagg

SEQ ID NO: 634345 - DNA, 222 bp, Homo sapiens
tgcagtttattgatgcagtggatctatgcaggtggtgcagtgtaatccattgaatgaagctgattacatgcagcttggtagaattgatacggattgaatgcagtggattcatgcacgtgtgattgaatgcactgcattccatgcagcattgtgtaatgcactcagagtgaatgaagtggattgactgcagcttgggccaatggatcctgattgaatgcagag

SEQ ID NO: 634346 - DNA, 150 bp, Homo sapiens
aattatctatcggttactgaggatatctgcacgttgaagcactgcaggttacaggttcaggcgggagcatctggggggggcgttggagagggcacaggcacgcatgtgcgttgtccagccgcttcccattgtgacaggtgcagacaggcc

SEQ ID NO: 634347 - DNA, 565 bp, Homo sapiens
atgtacttttcactatgcttaaaaaacactgtatttttgtgtgaccaaaatagtaaatcagtgaaagaaggttatgttctccattcttcaaaactgagaagtttattagtatttagcaaatctagactcactggttaaagtatgccttggtttaactattagtttattatatcaatactgagtttaagatcacagatttgagttgatagtgttaggtagctattacagtattaaaaagatagtgttttgcaattatgtattatctgagtgcccattttggcagtgggtttctagttgtgttttgctgagacccagggctgctgtacagattaagggtaggactaagggacatttcagcaagctgggctctaacccttttctccttctcaccctcacccaatatctgcatttatttattctgcacaggaaacctttcctctttgaaaaaaaagtttatattatatttaaaagtttggagacagttccatgcttagcagttgttctagtgaatctaaacctaaatgttgatgttcttcctttataccattgtagggatctggttaaa

SEQ ID NO: 634348 - DNA, 111 bp, Homo sapiens
tcccttgtaacgagcgcatcttagatatcaaagggggttctgttggtgattactggaatctgggtgttacggagggcgctcgttaaggaggcgctcgttacgggtgcgtgt

SEQ ID NO: 634349 - DNA, 413 bp, Homo sapiens
ccactatgtctatattggacatatccataatgactggctttgcattatacagaatgctggtcttggctctgtcgtacctcggctatctagttgtcctcactgccccctagccgaccccatcccatctgactgactaccccatcacagcagtacttttatttacgttttgctctgcctaatggttattttatactgtcacgcctgatccgtgtccaatttcagtggtctttgcagttgaaatgctcccgttcacactgtcttgtttaaaatgccattaagttcatacaaaccgctagcttgcacctcctcgtctactttcatagagcgtagggctgggatgggttgtttaccaagcttctggcactgtgtggttcgctcttcccactgggaagatctgtgtaccctgtaattcg

SEQ ID NO: 634350 - DNA, 112 bp, Homo sapiens
ttcagtctctcgaatagctgagactacaggagtacaccaccattcctggttaattttttatttttgtaaagataggggtgcgtcacattgcccaggctagtctcaaacccgc

SEQ ID NO: 634351 - DNA, 815 bp, Homo sapiens
  misc_feature (403)..(403): n is a, c, g, or t
  misc_feature (516)..(516): n is a, c, g, or t
  misc_feature (518)..(518): n is a, c, g, or t
tttttttttccttccagggccggtttaaccgggttctttttcacaaaaaaagttgggccaaatatgtattggcctctttatatggaaataactccaatattaaaaatgtttatatgccaggagaggttttcttctctcctctcgcgtggaagagaggtttctcttctctctcgggagaggtcttctctttacacgagcgggggctgggttctctgggaaaggcgtggtgtgcgctcttattattcacccacaccagagagaggtcttctcttgtgtggtcttctctataacacacacccacacagagacagagactctctctctctattctctcctttctctatacactctcacaccccagagagtgtcttctgtgtgcgctgtgagcaagacgcgggcgtgnctctctctctctccatatgtcgtgagtagtgtgcgggcgtgtgtgtgtgagtgtcgcgcgcgcgtcgtgtcgtgtgcgcgcagcgcgcgcgtcgtgcgctcctatatactacncncacccgctggagagctcgtgtgtgtgactatcctccgtcgggcgcgtcgtgtgcgcagacaccaacatagtgggtgggttctccccgccggcgccgcccgtgtgggtctctctgtgtgccactatgtagtggtgtatatcaagacgactttctccacacacagtagtggtactctctcctcagagagtatcttctccaccagaggagtggggggtcgtcctctctcctctcttgaggagaggacactctctcgtgagcagaagagtggaggaactcttatatctgtgagaggcggag

SEQ ID NO: 634352 - DNA, 360 bp, Homo sapiens
accgtgtcaagcgggctcgctggcggcgacggaccgagatcggtgcctcagctgttcgagctggacacgagagcacgtctccagactggagtgcgacgtgcccaccagctgccgacggccacgacgccaggtccggtgcacgtgacaagcaggacatgacatggtccggtgtgactgcgatggacagaggatgcgcgtccggccttcctgaacaccttaggctggtgaggctgcggcaagaagcgggtctgtctctttacttcctccacggagtcggaacactatggctgccctctgagactcccagaagccacaagatgacagaaatggtgctacccagctcaagcctgggcctttgaa

SEQ ID NO: 634353 - DNA, 210 bp, Homo sapiens
tacttagatatacgaagttaactaaatctcatatccggctggtcaatatcgtgccagccaccgcgttcacacgattaaaccaagtcaattagacgccggcgttaaagagtgttgacagatcaccccctccccaatcacagcttaaactcacctgacgttgtaaacaaactccagattgacagcaaaatagactcacgaaagtggctttaa

SEQ ID NO: 634354 - DNA, 538 bp, Homo sapiens
tagatccccccgggaaaagggccagcctgacccagtccccgggggtgaattttcccagcacattgtttaagttgattaaaaagggttttagaaagcaggggcccccttctagctgtttttttgggagggttaaaaaaaaataaaaattcataccccaagggattccccccttgggttgttggtaaggttttgccccacccgaaaggcccatttttttagtgaggggggcgttagggttttaaaaaagggaatttgggcccacctcccggttggagggggccagccccccccgcttggcggtttttaaatgcccaaaaatgccccggggtaaccacccggggctttttaggaacccgcccctggaaaaggcatgttccccaaaaggtttttgggggggcaaaccccccccgtaaaacaaaaggtttcatgaaaaaaactgtttttttttgccaagaaaagaaaattttaaggccttgttaaaattaatcaagggcccgcgggggcgggccacttaaaaaaggttgcttttcttgggcca

SEQ ID NO: 634355 - DNA, 244 bp, Homo sapiens
  misc_feature (29)..(29): n is a, c, g, or t
  misc_feature (42)..(42): n is a, c, g, or t
ggaggcgcctgcctaatacatctctcctngcatatcccatcntccattatccaacacaagcatatacgcccatagccatcatttattgactcctagccgcagacctcctcattctaactgaatcggaggacaaccagtagctacccaccatcattggacaagtagcatccgtactatacttcacaacaatcctaatcctaataccaactatctccctaattgaaaacaaatactcaatgggccc

SEQ ID NO: 634356 - DNA, 1372 bp, Homo sapiens
gctggtcctgagcttcggagacttagaaatgggtatgtgcttcagcggtgctctgacttcaggaagccagtgaagccggtgtgtgacgtcacgtgcagttagtctgtgatgctctctcccagagcccagccattcatccacatcaaataaagacaagtcctaggccccagcttggggcctgtccccggggtcacctcacagacagcatcctgggatcaggaaaatccatgatgttcaacctggtctggagaaccagactggaaacctagtggactttagttcgatgggcatgtctgctcttggagcagtgtcttgctgtgtgctacgcgtgcctatcatcttgaacgtacccggttgacaagagtcttccagccctccgaggtgtcgtttcatagtgaaaaccgtgtcatttgctgagtagctaaggagaaggccaatgattataggaaaacttgaggggcattggaaaataggttatcgacaacgttatcccatcagcatggggtcaggcaaaacatgatgtgtgccccgtggaagaactaggaattcgtcattacgccattcccaaacctggaagttccagacagtcaaccctagcggaaagcgcgctctccctgggtcgaaatacaggaagaatcgtagcaaaagtacattcagtctaccaaatacgattgccagaccatagggacagtggctaggtttccccagccgaacgtgcacactcggttgaggcgccacaattattgtttgccggcatggttcgtattcctcacgggggcgatcgtggggtttcccacggcttcatagggctcctgggtcgtcgttatggtcgcacttttgcccttgtaaggggggttgtgctctcgtatgcctttagtctcttggttagaatcacctttggcttggtccaattaggagatttaaggacccaaaagcatttgttgcgatccctgggaatttggtaccccaagtacataatctcgtacgtggctttataaacagacggtcgaggtgtaccaaacattcagctttagagcataaccgtaaacttggagagatccaaacaatcatggtttgcccgtggggcgcccttctcagggggagaaaaatgctttgaaagcccttgcagtgggttccaagggaaggcccaagggtgccctgggggcgattaggaacggttccccaccgcggaatgaacgagccaactgaccttggtgggggaccatttttgccctaggtgggcatcggcgaggaagaatatcgacctccacatggcattgaacgcctccccgggaccctcttggtacacacaccagggtgaggacccctcggggcacgtttacaacagatttaggcaactcaagatcatcgc

SEQ ID NO: 634357 - DNA, 257 bp, Homo sapiens
ttttataaccgctttagtaactgtttgaaaataaaaaggccaggcgcagtggcgtatgcctgtaatcccagctctggaaggattgcttgagcccataagttcaagaccagcctgggcaacatagtgagaccttgtttatacaaaaaaatttttaaatgaggtgggaggatcacttgggcctgtgaggtcgaggctgcaatgaagctgtaattgtaccactgcactcctgcctcagcaacaggagtgagaccctatat

SEQ ID NO: 634358 - DNA, 371 bp, Homo sapiens
cattccctttaatgtccatatttctaccagcagtctcttcaaggcagtctaggtttttcctaacatacacctcaaaattcttgcagctttggccaggcacagtgcctcacatctgtaatcctaacactttgagaggccaacatggacagattgcttgagctcaggagttcaagaccagcccgggcaacatagtgaaaccctgcctttacaaaaaatacaaaaattagcccagcatgctggcgcaggcctatagttccagctacccaggaggctgaggtgtgaggatcgcttgtgcctaggagattgaggctgcagtgagctgagattgggccactgcactccagcctgggagacagcaagaccctatctga

SEQ ID NO: 634359 - DNA, 125 bp, Homo sapiens
gaactggatgctgcaacagctgccgctctgggttgaggtgttgttccttcacgggaatccatgccgtgtatctgcggtatacaattttataggtgcctcattcgaccagttccgggtggtatttc

SEQ ID NO: 634360 - DNA, 391 bp, Homo sapiens
accaggccgaggtacgtcggggcaagccacaatcgtggtggatcactccctatgccttctcccatgaccacccgacagacgtggactacagggtcatggccaccttcaccgagttctacaccaggcttgctgggcattgtgtcacacattcgcggcctttaccacagtgtggctcaagccttcccacgtaattcgcaccccggaaaaggcctccgacgcgggtccagggcccccaagtcaggcaggcacaatggcctggtcgacgggcaccttactgctgtgtgcgcactcccgaagacgttggctactggcgaccgaaaaacccttgggggcacaaggctcacctttccaagggtgtgtgccacaagggccccttgtggtgccccccctg

SEQ ID NO: 634361 - DNA, 301 bp, Homo sapiens
acgtactatgtaccaattaaaaaaaaaaacgagtctatagggcctttcaaatgcctgaattttggacattggtacatcagctgatggattaatatttggaatggctatgtgatggctctgcatgggcatgggggccagtgcttcagtttggacagcattaccatcctgggtgatgacatggacagcaaggtttctacaatggttggaaagggtaaatatattttggattacatgctgccttttaggcatacgctcttattcattccaagtatttatcgaacctgctgttacatattacggg

SEQ ID NO: 634362 - DNA, 178 bp, Homo sapiens
tggtttccccccaggttttttttcccccccccctggggggggacaatggttttgggccccccctttcaaattttttttttttcgggggggcccccccccttggggtgggggccccaacttccaaggttttttttggcccccccaaaggggttccccttttaaccccccttttttttta

SEQ ID NO: 634363 - DNA, 524 bp, Homo sapiens
  misc_feature (355)..(355): n is a, c, g, or t
  misc_feature (520)..(520): n is a, c, g, or t
gagtggatgttcgataacaaggagttgagcacaattatatctgcatattattgcctttccctggtgtaaaattatttcccataaaatgctggcacattcaatcatatataaatcaaatattgatggacttagccctcaattttcaatatctatacagtactagaccatgcattcttacaatattagataccaggtagtatatattgtcactgtacaaaaatgactgtattctcccagcagtaggacttaaactatgtaactccaggtgtcttagctcctgtacctttgggtgatcactagcacccattattgagaaagctggtactacatggggggatagctgtggaatagatantttgctgcatgttaattctcaagaactaagcctgtcccagtgcttcccagtgcttcccagtgcttcccagtgcttcccagtgcttcccagtgcttcccagtgcttcccagtgcttcccagtgcttcccagtgcttcccagtgcttcccagtgcttcccagtgcgntcac

SEQ ID NO: 634364 - DNA, 218 bp, Homo sapiens
  misc_feature (200)..(200): n is a, c, g, or t
agaagaagaagaagaagaagaagaagaagaagaagaagaagaaaacaaaaacaatggcacaatgggagggaacactacaccttagctcaagagaattaagtttcattgttcatttctgtcatgtttttgaagcatgctctacagaggatcagtattccacaaagacaaatgagagctatcagaatgatatggcaaaggtngacgcggccgcgaattta

SEQ ID NO: 634365 - DNA, 212 bp, Homo sapiens
cgcggtgtgggtcggggtaccggcttccctctcggcgacttgtcagctcggtgagccgcgcgcgtctgagcccgtgtcctcacctgtaacgtgggcgccctgcaaaaggacctgaccttcctcgggggtggtggcgagttcaggcacggggttgctgttttcagatgcaattctcaaagcaagtcaggaagagaccgcagggtacggagctc

SEQ ID NO: 634366 - DNA, 415 bp, Homo sapiens
  misc_feature (353)..(353): n is a, c, g, or t
  misc_feature (357)..(357): n is a, c, g, or t
  misc_feature (359)..(359): n is a, c, g, or t
caggatcttatacggtctgttaccctctcgcccccttctacctgtcatccgtcaaattactagcctccatgcgcatcagtgtggataggtgcgtggcggcgattgtgataacatccggcggtttccagggctgccccgaggggttgcctattaacgtgcagatccgtgtcataactcgttgatttgtcgtaagtcgttgtcaggcaccgtgccggcagcggcgagcttcgttcgtcccgaatggatgtgacgaggtttcacccgacaaaggaatcaggcttctcatggtcgaactgtgcaaagaaatcctcccggtcaatatcggagacgagctgaaacagtcctacctcgantacncnatgagcgtaattgtcggtcgggcaactgccctgatgcgcgcgatggattgaaagcc

SEQ ID NO: 634367 - DNA, 454 bp, Homo sapiens
  misc_feature (439)..(439): n is a, c, g, or t
ggtattggcaatcactagatggtccatcctttcgtcacacttccaaattttgtctctgtaactccttccatgggtgttttgtttcctattctaagaaggggcaaagtgtccacactttggtcttcattcgcttgagtttaatgtgtttagcaaattgtatcttatatcttgggtatcctaagtatctgggctaatatccacttatcagtgagtacatattgtgagagttcctttgtgattgggttatctcactcaggatgatgccctccaggtccatccatttgcctaggaatttcataaattcattctttttaatagctgagtagtactccattgtgtaaatgtaccacattttctgtatccattcctctgttgaggggcatctgggtcctttccagattctggctattataaataaaggctgctatgaacatagtgngagtatgtgtccttc

SEQ ID NO: 634368 - DNA, 367 bp, Homo sapiens
gacatattcttttgactaattagaccacttatggctgggattacaggcatgagccaccacacccggcctttgctttggtttttaaaaaaaaagaaatgcaagggaaggaggcaggcttctgaccatctgtctccaaggctgaagtgcagtgcatggtcttaagttaatggcagcttccgtttcctgggttcaggggatggcctggctttgcccgctgagtagctaggattactggcacccgtcacagggcccagctaatttttgtatttttagtagagacagggtttgattatgttggacaggctggtctcctcctgacttcaagtgatccacccgcctcggcctccccgtgatgggactatagact

SEQ ID NO: 634369 - DNA, 175 bp, Homo sapiens
aggatggctagtgcatgtccggcgcatgggcggggatccgatagcctaaatggttatttccttggccggggccgaactagggttggatttcgattggtaatctcttgcgcccagattgggaaatgggggcagatgaggagaaaaaaggctttaattgggacgcagaaccttttgg

SEQ ID NO: 634370 - DNA, 406 bp, Homo sapiens
aatggcctccggcaaccggcgacaggtggtaagtaacagggagtctgcgagttcggcggtggtatctgtcagcacatctggggtgtagccaactcggatcccacgcttcttgatttcatccaaagccaagtggtcgatgcccacacacatggtgctgatgactttgagattggcccttgcagcatccaggatcttcttgtccacgtggtcgaagagaagccagaccagcccgtgggccaccgacacacctcgctcagagctccttggcaggaatgggctcatccgagtaccactgctccacctcacagtgtcccgtgcgggagagcgcgaccctaccctaggcgggtatcctgcgggtaacgaacgccctcatgactcgcagcggtctcatccacagtgcaggccc

SEQ ID NO: 634371 - DNA, 230 bp, Homo sapiens
gaggtgggaggcgaggcacattggcaggctggtcacggagatggaaagatgttaattccaggaacttcacaggaccgaggtcgggaagaggatgcggatagcttcttagcatcccatggcttcagaaaatgcttgtcatctagcaagttctcctcaatagcaggtactttggggtcactttcaccatccagaatacccccatgtcggctgggcacggatgctgggaggtg

SEQ ID NO: 634372 - DNA, 208 bp, Homo sapiens
atgtatgatagtccgtacaaatgaacgaatcactcaccgcataggaatgattgtttatgcgttctcaccttggaggattgtgagatcttaaaggttgggcccatgcctttagtaattttttctttttttttttttttttttttttttttttttttttttttttttttttttttttttttttttttttttttttttttttttttttttt

SEQ ID NO: 634373 - DNA, 914 bp, Homo sapiens
gttgcagtgagccgagatgcgccactgcaccccagcctgggcgacagagactcaaaaaaaaaaaaaaaaaagccgggcgcggggtttcacgccggtaatcccaacacttggggaggccaaggcggaggcagatcacgaggtcaggaaatcgagaaccatccgggctaacatggtgaaaccccgtctctactaaagaatacaaaaaattagccaaggtatagtgggcggggcacctggtagacccagctactggccgggagaatgggcggtgaacctggggaggcagagctggcagtggagctggagatcggcgccattggcactggcagcccggggcgattggagcaagactctatctcaaaaaaaaaaaaaaaaacacctttgtttgggccaacagcgccccttaaccattccaacgaagaaacccttgaagaaaacacattttccccaaaggcaaatgagaagtggcgcgctctcggggcgttcaaggagaaacgccagggagaggggtgtgtgccaggaaatgggcttatcccccagggggctagtcactgggagacggcggctttcttcaccccacgtcgttggaatgcaccattggccggaaacttgtgggcgcccacaatcttctcgtggaacaaactgtgggtctccagcacggagagctatagccgtgtgcccttcatataccccaagacccggttgcatgagtgtgttcacaaacacgtgtgccagcaaccgagtgtctccgtgaaggagaggatccctataccagtagcctcatgtaaacgtatccggcactcagagagcaagactcctaaggaacgcgtgcacaaccccctggggggttcccccagggctgtggcaaaagtgggttctttccccaagaaaaatccaggcgaaaacatcaaatt

SEQ ID NO: 634374 - DNA, 148 bp, Homo sapiens
tgtaaagttgtaaagaaggaacggagaaagtcaaaggaatcgccctagggacctggaagtgtaccgttaacgttggcgaaacaccaaacccgccgagttaatgccccgtacaggcgctaagaggcattttcgggatgtggggcctttg

SEQ ID NO: 634375 - DNA, 535 bp, Homo sapiens
tgctctcagtgaaagcagatctacctcacatctgtgctggcgaaggtttcacaacattggccttcaggaagtccggcagagggagggttttccatttttcctcgaatagatgataacggggagacggggtgggctttccattccaagggcgggcacacaatcacaggggcagggctggagttctggaaactctcacgtgggattttaatttctaaccagggctatgcatccagtctttgctagggttcacttctgggaattaacatattactttttaaatttttatttaacatttttctttcttaagcgtgtaatccataacagggtttcttctcccagttctagatcaccgggtgggccaagccatcatggatgccacaccaactctgcactggagtggacaacatcccaccggggatgggcaggggtgtgggcagcacgaagacctcacaagctggggacctgacagggccatccaccagtcggaaacactctatgggatgagaccaaggcaggactgcgacccccggtgccg

SEQ ID NO: 634376 - DNA, 758 bp, Homo sapiens
ggaggagggacccggaggggcggcgtgggtcgggagcgggcgcctgggactacttctcgtttgaaagtttttcagaggccagaagttgtgagccggggctgcggaaggatccggctctggcggttgccgcgctcggcgacaacgtggcgactgaagatttgctatagaagagagtggcccattcggtgtccacccgtcaggccacaccagcagccaggcacgctcataagcccgcgttacggatggtgcggtcgggtgcacaggcccgagggaagcagaggcctcggcctcccagctcccaacccctggaccacccacagccgggagtaccccatggacagctgtggccgaggagaagccagggatgagggggatggggctcgatcgtcctcacagcagcctgtggtaagggggtatggcccctggcaggtaggagggaagctgaggctcacgagacttcatgaggatgccagctcaaggccatccaggcttggtcctcagtgctgtcattccagtagggtaagtgggacccccaggaggtgtagggggacagtcgtccactcggccagattcacagtctgttcaccgccaaggcagcaggctggactcggtgcgggaccgatggttggcgtggcaggttggagtggccctgggactgaccagcagggggcgtgtgggctccttgagggggccgagtgggggacgtgctgtgttgggtaccctgctgggtctgtgtggggggcacacaggcagtgtgg

SEQ ID NO: 634377 - DNA, 195 bp, Homo sapiens
cctgcgtatcacaatgtcgtgcactgatcaacacccctcattccaagccattgaatctgttctgaagagagagctgatcagatccactgaaagccgtttcttgtaatcttgtggattgtcctcaaacattcggaacaaaacagcagctgcatatgtcgccacaccttcattcctagatatcccttcctctctctc

SEQ ID NO: 634378 - DNA, 246 bp, Homo sapiens
cccttaggggtagcagaagctctgggctgaccaggctgaggcccgcaggtctatgaccagggaaagcacgcaagcgcggtgaaaagcgcttccaggccaagaaaggaggagatcatcaaaacttaatccagggaggaggagaccagaaattaaaacctcccacttggtctgtacatacgggcctcgggtgataacatagatcagccataaaaataaaacaagcctaatctggcgcatacctaatct

SEQ ID NO: 634379 - DNA, 286 bp, Homo sapiens
ccgccgtccttgcggatagtgcacaccaacaccagtgagtgtccaatcatctgggacaaaagtcaaagtagatgataacgccttacaaaaagcaattgccgatgccaaagtggcaggaatgaccactacacaggataagtctgccacaaaaacagtgaatttcaatcaattccctgacacgcaaaaaactatcttggccgattatcaatcacaagctgataatattaatgcattggtccacaagcacactgatttaaataccactctgctaagtcaaaggcaacct

SEQ ID NO: 634380 - DNA, 1189 bp, Homo sapiens
tcgtgtggtcccgcgcggccacaaaaaaaaaagggggaggtgacaatactcacatagaggttgcgaccccttcgtgggagaaggagggagaaagaaaagggtcgccccacaaagaagatagataaggagagatcacatcaccaacaaggggggcgccaacaaaagaaggcgataggacaaaggaagagcgggcgcacatcgaggagaaggtttgcatcgccgacgctacacgccggctacaccgactataatgtggagaagagaagcagcatgtggggtggcgcccccccttttaagagggggaggaagaaacacccaccaagtgaccaccctagaggaggaagagagtagtctagggggggcgaaactctccacgcaaatggggcagcacctccgccctctggtttataacaagcagacagtggcgcgcccccccttgaggtagtagaagacgttttgtgagggccgtcaaccgcgcgacaagaatgttccttctcgtgtgttcctcagggagaaccccccggcgagttgtttttggaaaacctctaggaaggagatttcatagcgggggaccaacaatggtgctatcatttggacgacgggccgcgcgggttagtgggtcgccccacgcgcaaagacccttgtttgacggacacccttctccctttggccacttgggcggagggacgccatctttcttgggcacacaaaggagatatgaactccctcagcgcccccgctgagaggagatacttctaagagaagccgtctcaattgggtgtgagccccaagcagcccactgtcgctgtgttgcccatctgaccgcacacatgggtgtgtttttcttctcctgagtcacacccaggggtgtctaaggccaggcccattcttgggagttctaacggacgtgcacaagagtagagtcgccaaagtgggagatagccaggagagggggcaagcgggtctcagagacatgggcgacccaaggagcctggagagcaccctctcccggagagacaccaagaagtcgaccatctccatctaggtctcagctcccacaccaagggggctatgggatgcacgccccctgtagatcctttttggtatataccctcctgtggaaaccctgacgacactttgcctggccctttccagagggcccaagagttaaaaagtttttggtttttta

SEQ ID NO: 634381 - DNA, 184 bp, Homo sapiens
gggcccccaaaaagttttaaagggctttgtccttttgcacaaccccggggaggaagccaggaccctttttggtttagtaaaaaactgttaggggggggggcccccttttttctttttgaaaaaaaaaaagtaaaagtggggcccccggggttggggtttaaaaaaaaagggggttggcttttta

SEQ ID NO: 634382 - DNA, 184 bp, Homo sapiens
  misc_feature (5)..(5): n is a, c, g, or t
tggcngccggctgctgagatggcaaagggctccttcaagtatgccccaaattttttttgacatgcagctgatcagcagcggggggtcactattgacacctccgtgggcaaatatgagaccagcaagcactatgatactctcatagatgccccagtatacatacacgtcatcacaaactatgcca

SEQ ID NO: 634383 - DNA, 518 bp, Homo sapiens
ttgcatatggcaaggcaagtactttatggctgaacagacacgccactcacaaagaagccaccgtaattcgagtccttccagccacagcagagaagtggcatcaatgctttttaagccttactgaatggaaggctcaaattaatgaagtcatcgttcgctgacttcccccagtaagaatatatctcctatttaatttaaggccggtgaacggcacttacattttgtaaggaattcagagtaacagactaaactagccttttttttttgagagggtttcactctgtcacccaggctagaatgcagtggtgtgatcatagctcattacatcctccaactcttgggctcaagcggttctcctgcctcagcctcctgagtagctgggactacacatgagcactgccatgcctggctaatttttaaacattttcctgtcgacacagggtcttactatgttgcccaggctggcctccaactcctggcctcaagtgatcctcccaccttggccttgccatatgcaa

SEQ ID NO: 634384 - DNA, 921 bp, Homo sapiens
aggtgacaactgaaaaagcaacgaaagtgctttacatacggcgaggtttattgcgtcaataatgaccggaaacacgcgtgtgggttcacacggttttcattaagggggttcctgacagaggttcattctattggggccccagcgctcaaggtggtacagcatgacacaccacgcggtttgaaaagttgtcgctgagtgtgtgggaatgctccctgcgccgtggattgtagcgcccgtgcccgccgtgcgttggagccggcggggcagaccgtgtgctgacgaagagaatcttgtgagttcgtgtcccccggcgtacaccacgttggtgttaggacaaacgattgtacccccgttgggttttcgccaagcgaccatgaggataacccgaggtgtgctgcgagggttactgttaacctccaaaacacgctggtggagaacaacaaaaatggtctaagccacggggtctgtgacctacatcgtgcggtactcccagggatacgggcacgcgtcgccccgatttttttatgctagaggacacggttgtacataaaggctatgggggaatgcgtatagaaaagagcttcgggggaggttctctcccgcccggtgtggcgatgtccaaggacaaccctaactcgggagggggagtggcagaagaaccccgttccatataggcgccaggcgacgtaataacaagcaagaaaagggaagaaaagaagctgcgccagatcgccgaaggtctcggagaaggagggggaacgccgccccccaaagatgaaagaacgggtgatatacttaaccagtacattggggagaaggcggagcaccccaggggagagacatcaaatgggaagaaccgcggattaaatttcttcatgttcaacccagaaaaattttccaaaaatcccaaaaaacataaca

SEQ ID NO: 634385 - DNA, 973 bp, Homo sapiens
caagagtctcggttgttttttttgaaaagtggaggttgttggtgagtaatatgtcgcaagatagttggattgtaaatgtggccaatgtttgggaaggatgtctgaagcggtggtgtagcgccggaaaatgtgttctcagaggggtataagaatgttcgctcgggtgatgagacgagttgctccagggggctaatgggggagtttttgtagcgcccgcggggccccatgcataggttggtgttcccactgtgtgcccccgagtgatgagtggggcacggacctcttggggaatggtaaggagttgtcacacgtgtgggatattgtgtcccagtgtgctgtacccgcgctgggggtgtatgactcgtgggctttttcggttgtctgttgtttcttgtgtttttttgggttgtttgagactatttagaagtaacggcgcccagctcatatcatggagtatagcgggatagaaacatggtcttgatatggggctgccaggaccctcctcagaccaggggttcccctccgcatatattctgcggaaggaagagatatagggatggtggaatatttcagaggaaccccgcgagaaggtggcacaagcacaatattagactttgataataagaagttggtgccacataatatgtggatagtgccacaggacacagcctttgggagaaaagaacacttggagaataaggcttgccacactgctattgtagttcctctctgccacggaaggtgtttcgcgtagaaaagagtataatgctgtaaagaagccccagtttgtgattggggaagatcactggagctttcatggtgtaatagccgtagttttggaaaagacccctggggactagacaccggtgctaaaagtttgacgaactgatggagatggacccccccgcccagaatctgttttaaattcagacttccaatagtggccatatttatatagtgcgtaattggtgta

SEQ ID NO: 634386 - DNA, 443 bp, Homo sapiens
actccatggcactgagttgtttctgtatttagctatgtgaataatgctgctataaacatgggggtacaaaaaaaaagctggtgttggttggtgggttggttttttggtttggttttttttttggagagggattctcgcacggtcgcccaggtgggagtgcaggggcgtcatcggggctcacggtaagctccacctccggggttcaggccattctccggcctcagcctcccaagtagctgggactacgggcgcccgccaccactccgggctaattttggtattttaagtggtgatgggggttccaccgtgtgggccaggagggtctcaatctccggacctcgtgatcttctggcctcggcctcccaaagtgcggggataacgggcctgagccacggtgccaggcctttctacatcatttaagataagccagggagtaaatggca

SEQ ID NO: 634387 - DNA, 455 bp, Homo sapiens
  misc_feature (37)..(37): n is a, c, g, or t
gcggcccctactactactactaaattcgcggccgctncgacttttttttttttggaaacagagtctcgcgttgtcacccaggctggagtgcagtggcataatcttggctcactgcaacctccgcctcccaggttcaagcaattctcctgcctcagcctccagagtagctgggattacaggcacacaccaccacacctggctaatttttgtatttttagtagagacggggtttcactatgttggccaggctggtctcaaactcctgacctcaggtgatccacccgccttggcctcccaaagtgctgggattacaggtgtgagccaccgtgcccggcctgccttctttttttttttaaagagagacacattctcgctccatcatctaggctagagtacagtggcatgatcacagctcactgaagcctccaattcctgggctcaagggatcctccagc

SEQ ID NO: 634388 - DNA, 758 bp, Homo sapiens
caggaacgggctccgcggacgacgggctccaggcacgcacaggcagcgggcctcccaccgcgggtgccgggggcgggggggctgcccccatgcggggcccttcctggttgcggcctcggccgctgctgctgctgttgctgctgctgtcgccttggcctgtctgggcccatgtgtcggccacggcctcgccctcggggtccctgggcgccccggactgccccgaggtgtgcacgtgcgtgccgggaggcctggccagctgctcggcactctcgctgcccgccgtgcccccgggcctgagcctgcgcctgcgcgcgctgctgctggaccacaaccgcgtccgtgcgctgccgccaggtgccttcgcgggagcgggcgcgctacagcgcctggacctgcgcgagaacgggctgcactcggtgcatgtgcgagccttctggggcctgggcgcgctgcagctgctggacctgagcgccaaccagctggaagcactggcaccagggactttcgcgccgctgcgcgcgctgcgcaacctctcattggccggcaaccggctggcgcgccctggagcccgcggcgctaggcgcgctcccgcttgctgcgctcactcagcctgcaggacaacgagctggcggcactcgcgccggggctgctgggccgcctgcccgctctaggacgcgctgcacctgccgcggcaacccttggggctgcgggtgcgcgctgcgcccgtctgcgcctggctgcgccggcagccgctgccg

SEQ ID NO: 634389 - DNA, 227 bp, Homo sapiens
  misc_feature (15)..(15): n is a, c, g, or t
cctgatcaacatagnaaaccccgtctctaattaaaaaaaaaaaaaaaaaagtacaaaattagctggggtgtggtgggcacatgcccgaaatctacagctaactcggaaggctgaggcacgagattcacttgaactggggaggcggaggtctgcagtgggctgagattgcgccattgacccccagcctgggcaacaacgggagaaacttcattctcacaaaaaaaaaa

SEQ ID NO: 634390 - DNA, 948 bp, Homo sapiens
  misc_feature (6)..(6): n is a, c, g, or t
  misc_feature (94)..(94): n is a, c, g, or t
  misc_feature (140)..(141): n is a, c, g, or t
  misc_feature (178)..(178): n is a, c, g, or t
  misc_feature (194)..(195): n is a, c, g, or t
  misc_feature (265)..(265): n is a, c, g, or t
  misc_feature (268)..(268): n is a, c, g, or t
  misc_feature (291)..(291): n is a, c, g, or t
  misc_feature (300)..(300): n is a, c, g, or t
  misc_feature (306)..(306): n is a, c, g, or t
  misc_feature (323)..(323): n is a, c, g, or t
  misc_feature (355)..(355): n is a, c, g, or t
  misc_feature (359)..(359): n is a, c, g, or t
  misc_feature (361)..(361): n is a, c, g, or t
  misc_feature (365)..(365): n is a, c, g, or t
  misc_feature (367)..(367): n is a, c, g, or t
  misc_feature (369)..(370): n is a, c, g, or t
  misc_feature (377)..(377): n is a, c, g, or t
  misc_feature (388)..(388): n is a, c, g, or t
  misc_feature (415)..(415): n is a, c, g, or t
  misc_feature (426)..(426): n is a, c, g, or t
  misc_feature (437)..(437): n is a, c, g, or t
  misc_feature (448)..(448): n is a, c, g, or t
  misc_feature (466)..(466): n is a, c, g, or t
  misc_feature (468)..(468): n is a, c, g, or t
  misc_feature (472)..(472): n is a, c, g, or t
  misc_feature (580)..(580): n is a, c, g, or t
  misc_feature (656)..(656): n is a, c, g, or t
  misc_feature (673)..(673): n is a, c, g, or t
  misc_feature (676)..(676): n is a, c, g, or t
  misc_feature (688)..(688): n is a, c, g, or t
  misc_feature (704)..(704): n is a, c, g, or t
  misc_feature (715)..(715): n is a, c, g, or t
  misc_feature (720)..(720): n is a, c, g, or t
  misc_feature (731)..(731): n is a, c, g, or t
  misc_feature (735)..(735): n is a, c, g, or t
  misc_feature (739)..(739): n is a, c, g, or t
  misc_feature (838)..(838): n is a, c, g, or t
  misc_feature (866)..(866): n is a, c, g, or t
  misc_feature (948)..(948): n is a, c, g, or t
tacagncgccccctgcccctgctcctgcaccaaacttggttaactccctcattcccagacagagcaccccagccctgacagagaaggagggggncccaaatgggccctaaacctgccagggcaggggtcagccaggctgnncatcagcacagagcctggggcctctggcttttggtcntttgagaaatagaaanngttgtgccattcgaaacccatttctagaatggtcagtgtcctaacccttcctggtaaggcctttgtcaanagnccctgctccttgggcccctccangccatgccntaatcnctcccactctgtctcancccacctcagctccgaggcatccttccctgantgtnanaganananngacaganaaacagatagncaggcctgtagcagcagtagcacatgnactcgcccggngctccccttcngggagagactnggggggttgatacccctngnagcngccccttcccagcactcagtccatctgtgggcctcctggcctgcacagccatgtgtccacttggggagggagggtccacaggggcccatgggctatccccctgggggntgcatggggtggggaggggaggctgggacgggtccgggccggcagctgggtctgtgggcaggaggcagtgaaaaanagcgaggtccgagaggngcntgagacaggggngcggctcggagggtancggggggagcncaggnggcccctgagntcantcgnctcggacctccaagcgggcctcgcactgccgagcaccatactcattgaccgctttgcaagtgtagaaaccagcatcgccacgctctgcagccaggatcngcagccggcacagcccaccctcagcctnctccgcaaagcgccgctggtctgggcgcacgggctggcggtttttcagccaggagaccacaggcttgggctccccctgcacn

SEQ ID NO: 634391 - DNA, 397 bp, Homo sapiens
ctgcccacgaggatgaggctgtatgatgggacgctcacaaagagttacggtgcttctggaggatatatggagcgcagacggcgctgagtagactaccggcgaggcacattctcatagtgcagagtatggcacgtcattgtcacctcctgtaggggagcagatcatcacctccatgaagtgcatcatggggcaggatggcaccagcctaggtaagtctttcttttcttgaaaccattgcataagtccacctggcagccaaacgtgctgtttttcttgagcttttttcctcaaaataaatagtcaggtttactaataggccgagctggctggtgtgtggtttccatggacacttttttagtgtgtttgatacatatgccatgagaacgaccctggctca

SEQ ID NO: 634392 - DNA, 156 bp, Homo sapiens
gctatagctgtaccgctgctacgcgagcacagcaataggatcgagcacactgcgactgacacagtcacggaatgcggtatcttaacccatgagcaagtcagggatcaacccacaacctcatggttcctagttggatttgttaaccactgagccacg

SEQ ID NO: 634393 - DNA, 325 bp, Homo sapiens
tgacgacagacggacctggctgggtgtggcctcacctctcctggccccggatgacctgggcaatggtgatgcccccaatctctgagtctgctgacagcggcggagaaaggttccgtcgggctcattgagaagaaggctagtaacgtacttgtttgctgatgaagccgatgatcagcctggccgggctacacggagcggactgggtgcatgggcagtgacgtatggacggtgactggttgtactggcttgctcagacctaccccagggtggggacctccccgtgtcagaccccgtagctccggacgaccagcgtttggtgacggtc

SEQ ID NO: 634394 - DNA, 238 bp, Homo sapiens
  misc_feature (36)..(36): n is a, c, g, or t
  misc_feature (162)..(162): n is a, c, g, or t
agcatcgtatgacatctaagatatctgtgtgattanaggtcctactcgtagctcaggacctagcaggaacactactcgaagctaattcttgcagcagacgccatgacagagctgtcacgtctggacaggtgtcgcgtctcagcagggagctgagcttcaggncaggtggctccagttgtttgagggtccggatggctcaggtattgaaccggatagcttgcgtgtacgagctcgaatt

SEQ ID NO: 634395 - DNA, 667 bp, Homo sapiens
  misc_feature (126)..(126): n is a, c, g, or t
  misc_feature (133)..(133): n is a, c, g, or t
  misc_feature (150)..(150): n is a, c, g, or t
ccaaattttgccccggggggtggaggtgcccaaaaaaaaaaagaggaaagggttttttctccgtgtttttctttcctccccgggtcttaaaaaagggaaaaaaaaaaggaaaaaaagggggggggnaaattgnatggggttggggccccnaaaaagggggggaaaaagaaaaaaaaaaacccctggcccccctccccgttttgggttaaccccccccgggttttgccgcccccctttaggggcctccccccccgggggcccggggaaaacccccccttcaaccccccttttttgggggggccccccttttttagggaaccccagaaaacccttaggggggggggggacccttgggcgcccccgggccccaaaattgggggggggggccaaagccccccccccccccccccctttgggtttttttttttataggggcccgggggttcccccttccttttttaaaaaaaattttcccgggcccctttggggggggcttttggggaatttcccccccgcccccctttttcaagggggggttggtgcccctcccccccccccaaaaacccccttcccccgttttttggttgaaaaaaaaaaaataaccggtggggggggcctttcccccaacctgggttttcaaaaaaaataaaattcccccgggggccca

SEQ ID NO: 634396 - DNA, 200 bp, Homo sapiens
ctagtaggatccccttgctggtctcatatgcccagttccttcatgtctccaaagtcccgtctcaccatttacaccccaggtctcacagttctcctgggtgtgcttggcccgacagggggtacgtagacggctggtgctggccccacagtactggatcagggtacgagatatgacctctagggcctggagcaacacgggga

SEQ ID NO: 634397 - DNA, 1042 bp, Homo sapiens
tagagccattgtctgtgttggagtagtgtgattgtggcgcaactaagaagtcgtgaagtagctgggtctagaccccagtgacagtgtgggggacgcccgggtgctttctgatcaagcatagtatgtggagggtagctttaaatggggtcgtacggtaataggattgttcgcttcataatggagccctaccagtgggcggacaagcgtttggctgtggggcctgtttggctcttacactgggtgctatatgttgttgtttttggagccatttttttgctgttctgagagaagggggtccgccccttataacttgaagtgtttctttcacagtccaggagtcattgggttctcactgggaaatgtgagttgtgtgggctgattccaagatacgccagataggaggttgtcgctgacttggggtatcaaagaatgcttcacagtagtcgactgtgagtggtgcacacccaatgtcgcggccttctcccacgtgtgggtcagccagggccaacactgttgtcggtctctgaaccttgtctggggtccccgtagatagcgatgctaccgcgtgcacgtgtgtagattgtaacgggggtatttctggttgccttgcacgccaggcctaggttacagagccggacttccatgtcaggtcaagtcaagtcgatccatgcaatttcagcggtgtgtatcgtacccttggacagggtttcagctctgtatccacaccccaatgttgcatgtccaattgtgaagttccccgttttgtgggagggacctgcgtgggaggtagaattggactcatgggggccgacttcccccttgctgttctcgtgataatgaatggagcgctttgggatctggttgtttaaaagcttgcagccctcccacttcacattttttggtctttccgggtccaacatggccagacgggcctgttcccctttgccttttgccgtgattgtcagtttcctgaggcctccccagccacgcttttgtttacagcctgcagaactttgagtcaattaaacctctttttttcata

SEQ ID NO: 634398 - DNA, 244 bp, Homo sapiens
aaacgggactggagatgtctgaggtgggaggatcgttgacgccaggagttccaggctgtagcgagccatgcttatgcactgtactacagcctgggtgacagaatgagacccccatctctaaaataaaataagatggaatagagcatcatgaccaccctttgtcgagttttagttgtgctcgtggtgtccttcataaacgggagaggcctaactgcactcccttccttcctcagacatctccagt

SEQ ID NO: 634399 - DNA, 1737 bp, Homo sapiens
  misc_feature (287)..(287): n is a, c, g, or t
gcaatatctataaagtaaacaaatcctgcttgaatgtactatatactcatgagtgatgatgaaacgaatgctgtctatcacatatattgtgttttgaccaatctcaccttagagtcaatcgcagagtagacataatcccaatagattgatgacccagttgttgtgaccgactccaaggaactgacggaggcacagatgtggcacctgactgtgctgctgcacagacatctgtcagtccactcaatcctgttcctctctcgcaatcctctaacagactgatcgggatntgacggtcagtctcagcacacgaaggcacgacacagattcgcacattgcaatatccttcatcacaccaatgcacagttcgtgtcccacactatatagagatgcgatcgaatcctcttcaaggccaggtagaaagcagaccaagaccggtgtgagctgacatagaatcgatttcagccttctcaataacccatatcatctcgttcgcgactacagtgtccgtacgtgttctcgaaggcagagaccatagcgtcaacactcgtgagaggagggtacggggcaatgggcgctaagtagtgactatccgcggaaaacttagcacgctcccagcatgcacaggaacatcagggtgagatttaaccaattccgatgaaaacacctgttcttttgcccatttcccaaaacaggcctggatatgggccaataatccaagtgtcatgtcaaagccatggccaggaatagacaaagtcgacttcgtgctagggaaaataaccattggcaatcgcgcgaagtggatatccagtgacattaaacagcaacagagtctgagctccatcattcacaagttgaactttaatgcaatacaagagttccttgggggaggaagttgcctatatatgcacaccgaatggggcacttcttgcacgcgggaaagaccggctaatacatgggcaacatatgcacttcctaaaaatggactcgcataaggccaccttggggagacaccccataaatattatcccttttgaataaattcaacgtcattgcattcagattacaaccggcacgaccatattccacgttcatcaacacagagcaaggagccccaattggttgacacctacacctggtcacagatatggacagaacaaattccaggaggaaaaaggtccacaagcttgaaaactgtaggagagatggaccccctttgagaggaaacacacaacaagggcaccagaacaggaggaccactgaaattattagggacagagtagaagacgacacaacagagaaaggtagcgacatcaaacaaaactagagaagacaaccaaataagagaaatgtagagaaaatgattaacgccagagcgaacaagaaacaacacttcagaggaaaacaacaaatgataagcgaagacgcaaatatcagcaaggcaaaacgatgagcacacacacaaatagaaggcagcaagcacaacactatgcgacacaaaaaggcaaacagagacaagaacgcagagccagagatacaccaaagagagcaggaaagaagacgaaagtacgaagaacagacagagagacgaagggacagcgacacagcagaagacaacagagcaaaggaaaaccaagacactaggaaagtagaaacacgatagaaaaaacaaagagaacaaagagaacaagtcagagcacaacgaacatcaaaaagaaagaacgagaagagaagaaatag

SEQ ID NO: 634400 - DNA, 257 bp, Homo sapiens
gttatcacgcatggggagaagggcagatgtgcatttgcttatctggaaacctggaatcttggggcctgatctatgttttttcagcttttctttatattcttctctgtcctttttttcttcttccctcaactcctctccccaaagatggtacttggcaacggataatttttgcttacttagaaacttgaatatcgtggaaatctaacaaataaaaatgaccctgaaaagtctctagaatgccatgcgtggattgccag

SEQ ID NO: 634401 - DNA, 293 bp, Homo sapiens
cgaccgccctcatcatacctacctaggcatgagaatcgcttgcgcgctaggggcagaggttgcagtgagacaagatggcaccactgccactgtactcctgcctgggtgatggagtgagactattcaaaaaaaaaaaaaaaaaaaaaaaaaaaaaaaaaaaaaaaaaaaaaaaaaaaaaaaaaaaaaaaaaacaccaaaaaggaaaaaacccggcaggtttaaatatccccagaatttggggtctctttggcccctcttctaaaaattcaaaatatacttcggggggggacggc

SEQ ID NO: 634402 - DNA, 1323 bp, Homo sapiens
cacttattggacttaggacacggtacgcatgtgatatgtggaggaacatcgatggtcgaagcaccttgcagtgtccctgcttactccgaagtgcaggaccggacaaatctaaccttgatcgtggtagagcccacatacacctaggaccaagcaataactttagatacctatcggaggatggataaacaaccttcccctattcgttatcaatgtggggaacacaagtgtatgagggattacataatatttccatcatatatactactatagtaatgcaagcggagagatatcaagctagtcgtccgtttactgcagctgcacaacaggagacgttatgacaaaaccatgaagcttgctacaagttgtatatactaacgtaatacagaaattagttgcgaccagtaagtagtggatagcaggtatgcctaggtagatgtacaacatgatagaccgaataactcacggatgttcgaacagtatctatccttgaaagtctctaattattaataccgggaatacctacagtgaaatgttccaggaggaaggcacaatgggtatgccatggagtcgagtttaactagattccccaagcgagtgtcgaacacaatgtagatcatactactaagtgtacggaccaatcgtatgaatagattaaaaacttgaccataggcaataggtatcgtagcgtacattaacatacatttcgttcccgtgttcgccagcttaggtgtttgagcacatactagtgatagatctcccaagtgacgctcgcacaaaaggcgaagattccaactgcattggacggggtccaaactggatgcgaaagcatggcataggcctttaagctcaaagggtacacatagcgatgctctgaacgaaggtcaatctccggtgtgccgcctccagaatacagcgccaaattgggggccactgggttcaaagatctcttggtataccaggtctaatatattccaaaacaagcgagagtatttcccgtgaaactgggatggcacattccgaacccactcgtcaaacatagggccaggtggcttgtttctgggcactttgcaagggaaccgcgtatgaacggatcccacgctgtggttgagcacacatttaccgccacgaaggcataagccccttagaaggtaccttgattcacgccggaatagcgcgttaggcgttggtaacaaactgcgctgtggcgcttacaagctcactcgtggaggggatcggacacgttaaactcgtgggcactggaaaaggttctcaggtcgcaccagagggtggcaaccgcaccttgggagagcgaccctggaatac

SEQ ID NO: 634403 - DNA, 610 bp, Homo sapiens
  misc_feature (126)..(126): n is a, c, g, or t
  misc_feature (146)..(146): n is a, c, g, or t
  misc_feature (592)..(592): n is a, c, g, or t
gcatggtggccgcaataaatgcacagaaaagatcctaaaaaacagacttgaatcttaatccaagaccaataggtgatgtccaggaagatcgtaaccccatttacccagtcaatgaggaactggggnagggacctgcgcactagggnataaattgcttgttgaaatctgctgggggtggctgcatgccagccagacacccagtcttgcaagactgtcattgaaaatctccgttttgctgttctccgggtctctgcgtccagtctttgtgtttggacggacctgccgggccatctttctgcaagaagataaaggaagaccaggagtgcctgccgaactcctatggaggaagtctaggagaggaaggggacagggaggaagatggtgtctgcaaaccaggaagcagccttgccagacacaggattggccacaaccttgaccccagacttccagcctccagaactgtgagaaataaatgtccatattgactaggggcacagggcatgggggaactggttccagacctgcctcctgggaagttgggagggggcatttcaacctgttaatttctcaaattatgtagtcattcaaaaanaaatagaaacacttcatt

SEQ ID NO: 634404 - DNA, 112 bp, Homo sapiens
ccgggttgtattcttccggtgtgcatcttccgggttgtgcatcttccgggttgtgcatccttccgggttgtgcatccttccgggtttgggcatccttccgggttgtgcatct

SEQ ID NO: 634405 - DNA, 428 bp, Homo sapiens
  misc_feature (51)..(51): n is a, c, g, or t
  misc_feature (410)..(410): n is a, c, g, or t
acgggtgagttgatctcacaggtacgactctgtctctatttgcatcaggtncagtttcttcctggttgaccttgtgggtgtgaatgttgtcacagacctgccgggccatctttctgcaagaagataaaggaagaccaggagtgcctgccgaactcctatggaggaagtctaggagaggaaggggacagggaggaagatggtgtctgcaaaccaggaagcagccttgccagacacaggattggccacaaccttgaccccagacttccagcctccagaactgtgagaaataaatgtccatattgactaggggcacagggcatgggggaactggttccagacctgcctcctgggaagttgggagggggcatttcaacctgttaatttctcaaattatgtagtcattcaaaaanaaatagaaacacttcatt

SEQ ID NO: 634406 - DNA, 150 bp, Homo sapiens
  misc_feature (95)..(95): n is a, c, g, or t
gggttgacaatggtggggtacgaaggactggctaccgttcggactgtttgtagtcatgtacgacatgatcagggtgtacactgggctagcgtacngtgaggactgtgttgctcacttccctcacgtgtatccggagattggtcactgttg

SEQ ID NO: 634407 - DNA, 234 bp, Homo sapiens
gacacatagttaaaccctatctcaaaatgaataaacaaaagacacttaaaatatctgaggaaaacaaaaaacttaaaacagtatgttcagctaggcatgatggcacataccattaaacccagcaatcaggaagcagaggcaggtcttcctgtatgtatgccaccctgactcctgcccatgtcccccggcctcagaggaatctgtggtctggtctagaatggctcaggtcgacgc

SEQ ID NO: 634408 - DNA, 466 bp, Homo sapiens
  misc_feature (14)..(14): n is a, c, g, or t
  misc_feature (58)..(58): n is a, c, g, or t
  misc_feature (106)..(106): n is a, c, g, or t
  misc_feature (149)..(149): n is a, c, g, or t
  misc_feature (160)..(160): n is a, c, g, or t
  misc_feature (207)..(207): n is a, c, g, or t
  misc_feature (212)..(212): n is a, c, g, or t
  misc_feature (270)..(270): n is a, c, g, or t
  misc_feature (284)..(284): n is a, c, g, or t
  misc_feature (360)..(360): n is a, c, g, or t
  misc_feature (429)..(429): n is a, c, g, or t
  misc_feature (433)..(433): n is a, c, g, or t
  misc_feature (464)..(464): n is a, c, g, or t
attgtgtggtccangtttatagcaccatttggagtttgattgctgttagttgggtgancctctcctcttgaggtcccaagataaactcagagcttccagacagatnatttccaaattctagaggaaccaggcagagaaataaacatgcntcaaattttgntcataggagtacaccttactcaattattaaaggccataaatagtttnaaatnagtttccttgactcagtctgatgaatgaatttcctttctcggccaacgcaccaaaatnatgtggctccgatnagtggtggagcaccagggtttttggtcctcatgccagcttagatacaaggacacggacacacgtggagtggttttnaggagcagagagttcaataagcaagaaggaaaagagaaggaagaagctaccctgtacatgacggacggnggcnccaaatcatgctcgtgcccaattccctgcancc

SEQ ID NO: 634409 - DNA, 282 bp, Homo sapiens
cggccagtgagcaccttcccttttgcgatctggtaatctccaattgagtgtaatgtcctcaagcattcatccacgctgcgcgtgtctgactttccttcgcttctatagtctgacttattttccagttgtgtatgtgcccattttgctcacccttcatctgttgatggagattgggttgtttccaccttgtacctatttgactattaatcttacccaataccccttggaagcaggtagagtcagatatactatgatgtcctaatctcctccattactagcttg

SEQ ID NO: 634410 - DNA, 268 bp, Homo sapiens
gactctaaggatccttattgaccttctgctctccaaccaagtgtggtgggtgcgggtgagccaatggataagggtgagctggagggaatgaccccagagattattcagaagcttcaagacaaagccactgtgctaaccacggagcgcaagacgagagggaagactgtgcctgaggacgctggtgaagccagaagagctcagcaaaataccggcaggtggcatcccactgtggggttgcacacgtgccatgcacttccatgggactcct

SEQ ID NO: 634411 - DNA, 549 bp, Homo sapiens
  misc_feature (38)..(38): n is a, c, g, or t
  misc_feature (416)..(416): n is a, c, g, or t
  misc_feature (472)..(472): n is a, c, g, or t
  misc_feature (498)..(498): n is a, c, g, or t
  misc_feature (531)..(531): n is a, c, g, or t
  misc_feature (542)..(542): n is a, c, g, or t
ggtaacctgcaaaccatgtacttttgtaaatgaatggnccttcttttgcctaccctcccatgtcctgtcagaggtacagagccttttccaagactgctgatatggtttgaatattttgttgcctccagattttacattgaaatgtgatcccccataggagaggtgggacctggtggaaggtgtttgggtcacaggaccagagccctcatgaatggcttggctcctccccattgtaatgagttacgctgagaactgtttgtttaaagagcctggcacctccccaccccactttctctcaccatgtgacatgtctggtcccacttcactttccaccatggactgggaaacttcctgaggtcctcacaaggaaacagatgttgggcaccatgcatcttgtatagtcttgcaggaacccntgaaaccaggaggaaaccccattttctttattaaaattaacccaggccttgggggnatttccttttaacaggcaatggggtnaaaccaaacttaacacaattaaccgtggccttnttggggggttnatattct

SEQ ID NO: 634412 - DNA, 277 bp, Homo sapiens
tgtattttcagggcatcctgttcatcacggcagatccttcacaagggaacgattttcatgtacccccgacagttgcaggtgcagaggcaagctactgtgtacagctgacaatgccacatttctgtggtgtttatggcatgttccagcacatcacacataaggtatcatgtgacgagctgaatgtgattttaagagagtgatctccaaacttttcatttgccttaaggatgacgcctctgtggaaaacactttaacctctcttttagagttcctcaaa

SEQ ID NO: 634413 - DNA, 467 bp, Homo sapiens
  misc_feature (31)..(31): n is a, c, g, or t
caactcatgcctagacctgctgattacgttnccactatttgctaggccccaactgaagcctagacaatgctgatggtgttgccactatttgctaggccccaactcaagcctagacaatgctgatggtgttgccactatttgctaggccccaactcaagcctagacaatgctgatggtgttgccactatttgctaggccccaactcaagcctagacaatgctgatggtgttgccactatttgctaggccccaactcaagcctagacgatgctgatggtgttgccactatttgctaggccccaactcaagcctagacgactgctgatggtgttgccactatttggctaggccccatctcaagccacggtgtcgatattcagatgaatcttcgactggtgcactgatgtattggtatataaccattatttaaccaggcacgtcagctaagacaaatgcttatatacaatg

SEQ ID NO: 634414 - DNA, 301 bp, Homo sapiens
gtacagtagggccctgctagtgagagtgagtagaggctgatggtgtgacaggtaggtacagcaggggtccagacagcgggtagagccttgactgaaggtcatggacatcatccacgtaggtctacgagcagaggagaacaaggcagctccccctactcctgcacaggatcctggactgagtgagggaacagctgtcctcagacacaggagtccaggccccatccagactcctctgctccttgaacttgccctcaaacgcacggctcaaatctcatccaggtagaaggcgcagaaggcagac

SEQ ID NO: 634415 - DNA, 206 bp, Homo sapiens
tccaaagaattcggcacgaggaaacatcagggagataaattcaacccagtagtaagtaacttcaatttctattggtagaaagttttcagcagccagttgcagtggcacatgcctctaatcccagcactttgggaggtcagtgcaggtgtttggccctgcctgggtaacatggcgagactccctctctgtagaagtttccaagttag

SEQ ID NO: 634416 - DNA, 328 bp, Homo sapiens
  misc_feature (15)..(15): n is a, c, g, or t
ccccgcaggcaaganaagccccggggcccctaccccctagccccctggtagttaaaagatcctaccccctgcccctaatcggttatgttatcctgtagatttacagacattgaagagaaaagcacttgtgaaaatccctgtcctgttctgttctgttctaattgccagtgcatgcagcacctagtcacgtactccctgtttgctcaatcaatcacgaccctctcatgcggacccccttagagttgtgagccctttaagagggacaggaattgcttcactcggggagttcggtttttaagatgtgagtcgttgccgatgccccgtggct

SEQ ID NO: 634417 - DNA, 192 bp, Homo sapiens
ccctctattgattcattcagcttgttacgtcacagattgacgcacagcgacggcctgacacagagcgtaaacagaggtggcaatgactagaaacccgtggcgcctggaggtttttggttggtggttggaggcaccccggagaaggcaccccgcggagggcccccagttggaaagaaggcaagatggtccccg

SEQ ID NO: 634418 - DNA, 216 bp, Homo sapiens
gttctgacgtgcggacgtgctagcagatgtcatcaccacccgtgtgatgaagagtggcttccgctgtgggcggcatggcatgaagggtctggtgcctgtggggtatacctcccttgctccttgtcgccctggtgacccgtttccttgcgctatgttgtctacctctccttgtccacctggtgaactggacatgtgccagctgacacaccactccca

SEQ ID NO: 634419 - DNA, 117 bp, Homo sapiens
ttcgcgccttctcgctgccctccccccttgctgcgtggctctctgcctcttgtcttccgccgcgcgggcccccgccctccctttgggggttccgacgtctcgacacttcgtacctcc

SEQ ID NO: 634420 - DNA, 222 bp, Homo sapiens
acacaaacaaaacaaaacaaaacaaagcaaacaaaaaaaacaaaaaacgactccacccctgcctgttgccctcttcccagaatatatgggacttcacaccacacacacacacacacacacacacacaccagtgtggacactcatcaaggaatacatcaaacaaacacttatacagctgattgctatacaggatcataatttaaatttctcagagatctcatt

SEQ ID NO: 634421 - DNA, 140 bp, Homo sapiens
tacatactattgcgtctgagagaatggctgataagtgcctgtgttcttttatgccgtctctgtatctatatgttatataatcagttgcaatgctggttatatgcgcgcaatttctatatcaagatgggttggctagattc

SEQ ID NO: 634422 - DNA, 138 bp, Homo sapiens
tcggtccaattgactttgggggtcgcaggccttgccctggatcgaggcgcacgaccgatagttcggtggcaagcttgagaaatggagactctcgtgggcatcggctaagggggcccggggccttcccaggcctgctgg

SEQ ID NO: 634423 - DNA, 195 bp, Homo sapiens
tggtatgattctaattacagtcagcgtggtgtcagttctgcgcattctgaaaatccataatttggggccggaacatgaaccattactgaaatgaatcggggagctattctttttaaaatgggcagtaacctctcacacttctgtgcctgatctctgtacaatgggcagaaaagacgagtaacattctcatgatca

SEQ ID NO: 634424 - DNA, 258 bp, Homo sapiens
gaggcttccacgtacgtcgcgctccacggtcaccacgacgcgttcgagcgatcccaatcgcgatcgatgccgggtatcgtgaccagaagcgccggtcctcggtggcgattacggccattgcgaaatatcgctggaatttcgtcgtagctcagtgcatgctcgtgcttctcgcgcatgcgcagggccgtcgcctgtctcacgcgcgcggagacgggattcaacgtgtggaagtacacgtcctgccacatccacaaggtc

SEQ ID NO: 634425 - DNA, 1012 bp, Homo sapiens
gtcacaagtgcaatatggatagaatatgaatcccatacattcatccctataactgcattttaaaatatagtctaaatatcatgggaggaggttaaaacctgagaacatggtacaatacgcacaggaataatttttcatctatatataatttcaggagaagggattaaaactaccaaaggtcattgtgccactccactgcaaacatgtggcctgcatatcctgagctcatgatttagtgtgtggtcaagcgtaatttggtggcctcaagtaaataccatttaaggctacacatttttaaacctttaaaagctacagacacaagtaatgacacttatgagtcacttaaggggggaggtaatatgcttgtatgtcacatggacattggctctgaattgtctctactggggaaatattgggatttcaatgataagctgtgactggttggaccattggcatcaaaatacaggccccatggtactccttcgctagtcgtacacagttcaagaacgctctggcatctgatgtggactacactatagatgatataactatctgctattctgccttggtcctgaaacaattggcttggtcagctaatttcattcaatattggtacctagaaggatctctagtaagttattacattaacttggaagcaaagtggctccattaaaggtacttaatccctttgtaccacctaattctagttaactattatgtaggcattgacaataggttaaggggttccttggactgattggtaacgcaggtgtgactatagaaggccccgaggatggggcccggaaaaggagagggggctccctacaaaacaacgttcccacatctgggaaaaccccgtgggttagtcacgggagcctccaacagcgcacattgtccacagcactagcgcaggaaacgcgcgttgaacaccgcgcgagaaaacgaccacactgggcggaccaaacacgcgacacaaaaacggggcgaagtacattgcgacagcgaaccctag

SEQ ID NO: 634426 - DNA, 1142 bp, Homo sapiens
taaaaacccccatcaataaaggggaacttccaaaaattgtcaacccctcttttaaaaaaggccagtattacgggggggggtttcaaacccaaagaggtggatgtgtggggttgctaaggctgaacatataaggtgggggggattaacaccaaatggtggaggaaaagttgcacccaaataagtgcacgtggaaacccggggaaacccgtggtggccacaaaaatgtgttgcacccgaaaatcgccgtcggaaatgtggttgagaggggaccacctcgaaagaatcactcccgggagggcttgcgagggagggcatacaacaatagaacacacccgagtataacaaagttgctacaaacaacgcgaggcgcgtagaaaatacaatgggggctacaccgaggtgtgtcacccaattaaaacacaacagtggggtgcacgcccgagggtggagcggaacaacacccgtgagagtggcgacagttaacaaagcgcgtgagagtgtatgtctacacgagagacaagtgtgggggacaaacttcaccaagagagggggaccatcataacagcgcgcggggagtgaaagacacccgtgagttgaggaggagagccccacaagtggagcacaccccatccaacaaaaccatgggggggcgaggaaacaagacggcacaccaccagcagcacgcaggagagtgtcggctaaccacaggaggggcttccacaaaaaaacaaaaactcctagctgggcgaacgagaacaacaaacaacaccactctctcccgctcgaggaggggatccaaaaaaccagcgagggagaaaatataacagccccgcagtatatactacaagcaaaggcggcccccatactatatatagggcgcaaaacacgggtgtcgaagcgatgaccagagtggcagcgaggagaccccacagatgagcgaaatgatgcagtgcacatctacccacgcaggagagtaacaaacaaccataccgacggaggccccacaacccaagtagggggacaaaaatatagagggaggaaaccaggcagagcgtaatagaagaaaaaaacaacaacgagccaccaacaaactaatacgacacagaacacgagcgcaacatgagcggaaggatgaacaaaat

SEQ ID NO: 634427 - DNA, 495 bp, Homo sapiens
  misc_feature (49)..(49): n is a, c, g, or t
catggcgaaatttcccatctgaggggatggcttttaatttcactcaccncattaacccagctctttccactgagaagttgccctgaccgatgaagtaagccacaagcttctccatgaaaagcggcttttttaacctctgggaaccttgcttcaagccgatgaataactttggtccaaccgccaaccagggcaaccagggtgccttaattggaacttccttgaatcattcttcccctttctcaagctttctcattcaaaattccttttgtaagttcaagattcttccgaagcaattcattattcaaattttcaagttttttccattgcggtttccgcccaagaaaaacccattccagcaattgccccggaaagcatttccgcaagcattgccgggtaccaacttgccagtggggaaagtaggcgaagaagtaggggctgtgccagtgcgtcaccccaggcatgattatcttctcaacgtcgttgatgatgtcctca

SEQ ID NO: 634428 - DNA, 270 bp, Homo sapiens
ccccccccccctgggggggggccccgggccccccttgggatttttaggggaaaaatccaaaataagggggggccccccccttttcaccaagggttgtttttttttgggacacagggggaagggggggccccccttttttttcccaccccccaaaaagggccccctttccctttggtccgggggttgggggggggggtttaagtttccccctttagggtttcaacaaattttttggccctttcctttcaaaaaggggggggctttccccca

SEQ ID NO: 634429 - DNA, 416 bp, Homo sapiens
cagtgctctcgggattcattggtcgtcccggttctcctgtgtcaaacggcttcctgattgatggctacccgcgggatgtgcagtatggagagtattttgagcgacgggccctgagaccatgacccagcggctcttgaaacgtggagagaccagcgggcgtttggacaacaatgaggagaccatcaaaaagcggttgaagacctattacaatggtccacagaacccgtcatcgccttctatgagaaaggtggcattgtgcgcaaggtcaccgctgagggctccgtgaacagtgtcttctcccaggtctgcacccagctggaggccctaaagtagcaacgctggagccgtttcccgacctcagagcccggacccacccggtcctgatttccaaccttgccagggtcccgagctcgaat

SEQ ID NO: 634430 - DNA, 1021 bp, Homo sapiens
  misc_feature (306)..(306): n is a, c, g, or t
gaagaggccatccgagcgcagatcactgtccttctgccatgggcctgtggatgcgcctcctgacgcctgctggctgctgctgtgcgcctctggggagcctgatcgccagctcgcagtctttgtgcacaccacccgaccctgctgtccggctcacaccctggctggacacggctctcctaccgtagcgtgtgcgggcgcaacgcacgcctctcgttctacacacccgagagactccgcccgggagcgccatgagtgacctgcatgggtggcggcatggctggcagctggtgcggaggagcccatggnttgcacgtgcaagccatgcagccctttgtgcaccatggacggaggaccctgcaagaaagctggtggcagattgtcggaacaacatcgctagctaccaggcactctcgctcccctcataccacgccttggaggacactaactagccagacttagaaactgctagatccagtgagtgcgaagaccccgctcatccaccggcacagcccctccatgtcgacccagagggaggagcaatgggaaattaatatgccccatttgaaacctcgaggcaaaagacacagaaccatatattcacaaaatgaacaaatacaaatagacgattcccaagcaggcaataacactatagatgagaaaactccaagcagcccggacggccataaaccatatacatgacctttcccaggaagtgggcgcagaacataacttcccatgggcgcaaccaatccaagagaaccgtgtccacacggaaaaccggggatccccaccaaaaataagacatggctaccctggcagctgtataaaacattctaggaaagcggcacaaaggctggttaccaccatcagatacaaacaggtgactgaaagagacaggccaacacacagaccaaacacaccctatatcctgccacatctcctaagcaaccaacgggaccccacaacacacacactcaaagtgcacaggtgaaaacaacacattgacacagtcaacgaggaa

SEQ ID NO: 634431 - DNA, 479 bp, Homo sapiens
gctctttagtttaataaagtctcagttgtccatttttggttttgctgcaattgcttttgaattctttgtcataaaatcttaagcgaggccaatgtacagaatagtgttttctgggttttcttctagagtttttatagttttaagttttacatttatgtctttaatccaccttgagttgaattttatatgtgttgaaagaaaatgatccatcctgaatcttttgcatatgcctagttacctatcttaccataatttgttaaatagggggtcctttacctattgcttattttgtcaattttgttgaagattaagtggttgtaggtgtacagctttatttctgggttctctaaccagtttgattggtcttttttattttatttttgctttgtatcaataccattctatttggaactggaatcttgaattttagttttatgtcagacagtgtgatgcttcactttgtctttcctagaaataca

SEQ ID NO: 634432 - DNA, 213 bp, Homo sapiens
  misc_feature (10)..(10): n is a, c, g, or t
  misc_feature (18)..(18): n is a, c, g, or t
  misc_feature (72)..(72): n is a, c, g, or t
  misc_feature (118)..(118): n is a, c, g, or t
  misc_feature (171)..(171): n is a, c, g, or t
  misc_feature (212)..(212): n is a, c, g, or t
ctcgtgcgcntgcgtgcngctggtgtagtcttcactgctctgtgtcttctgctcctagaggcccagcttctntggcctcgttacctgcaggtattgggagatccacagctaagacgcnaggacccactggaagcctagaaatggtgagagtgccgggtccgacatcccganagagggggcggggctggttggaactggtgggaagtaagctnt

SEQ ID NO: 634433 - DNA, 388 bp, Homo sapiens
cccctcccatcgctccaaccgactgctgtcaccttcaccgttccagtttttatatcctgagtcaagccaaaaaaaaaaaaacccggggcaaataaaaaaccccaattaaggccttcccattctaattttgttttttgcccaggttagtttttgtaaaaaaggggggtaccccacctaagtattagcccgcttaaaaccttttgcgggggccaatggggggcccgacctcgaaatactccggttgggggaccaaaatttgttgaaggggggccagcgggcccagattggacccccctttccacacggggtatttgccctaaggaggggcaatatttttgattttttttgagcgaccagagaaggggccccgggctcaaattcgaaataa

SEQ ID NO: 634434 - DNA, 113 bp, Homo sapiens
agataaagtgtttaggtgtgttccccccaccccccccggaatgctctataaattaaaaaaaaatatattcaaccactttgaggaacattaggcccagagggtaatgagttggt

SEQ ID NO: 634435 - DNA, 317 bp, Homo sapiens
  misc_feature (317)..(317): n is a, c, g, or t
atactaatcaacaattccaccaacaatgtatacgttcactcatttaatatcctcattagtacttgttgcattgatgtatttatgtttattatagccattctaaatgggagtgatgcggtacctcatcgtggtttggattagcatttccttagtgattagtaatgtataacatatctctatgttccagttagccatttctgtatcactttttgacaaacatctattaacatgttttgcatttttaacttagattataagtgtattttattttgagattttaaagtttcttatttattctgaatattagccttttgtcn

SEQ ID NO: 634436 - DNA, 280 bp, Homo sapiens
acacggacttgctgggtgcacttacaaggactcttggcatctgccttaggcgaaaaatgctgttgctggattgcaaccccgagggcgatggtctgaagcatgtgctgaagacagttgcctcgttcaacgcacccccgtatccctgcaagcagtcgcctgtccacttagccgcaggaagcggccttgcttgctttcttctctggcagctgcaaacgggcgctgacctcaaccagcaggatgttttaggagaagctccactacacaaggcagcaaaagttgg

SEQ ID NO: 634437 - DNA, 320 bp, Homo sapiens
ctgtccgaaaatacatgaggcaggaagaaggcaagattatgacatccttcactactgactggcaaaaaggagtagccatccccaacgtttttggtaccaggaccaggttcgtggaaaaaaatttttccacggatggggtggggaatcagaaggtttcaggataaaactgttccacctcagatcatcatgcattagataaagcacgcaacgtacatcccttgtatgtgcagttcacaatagaatttgcactcatatgacaatctaatgctcccactgatctgacaggaggtggatggagcacaggtgataaagctagctca

SEQ ID NO: 634438 - DNA, 183 bp, Homo sapiens
ggcccggggcccgggggggggggggtttttttgggggggggggggggcccccccccccccccccgggtttttgggggttgcccccccgggccccgcctttttttgcttcgccaatttgtttttttgggggggggttttccttttttttttagaaaaaaaggggaaatgccttgggggggccca

SEQ ID NO: 634439 - DNA, 369 bp, Homo sapiens
  misc_feature (37)..(37): n is a, c, g, or t
  misc_feature (54)..(54): n is a, c, g, or t
  misc_feature (294)..(294): n is a, c, g, or t
gaggccataaccctttgatttaaaaaaattttttcantgttttttgtttttganacaagggtcttgctctgtcaccccaggctgaaatgcagtggcacgactgcagctcattgcagccttgacctcactggagtgtagtggcatgactgcagctcactgcagtcccaagtagctggcacttacaggcaggtgccaccatgcctggctaatttttaaattttttgtagaaacagggtcttgctggctgggcacggtggctcacacctgtaatcccagcactttgggaggccaaancgggcggatcacgaggtcaggagtttgagaccagcctggccaacatggtgaaatcctgtttccactaaaaatacc
